United States Patent Application Publication US 2024/0327476 A1 - sequence listing, part 127

SEQ ID NO: 241433 - DNA, 723 bp, synthetic construct
  misc_feature 1..723: note = Description of Artificial Sequence: Synthetic coding sequence
  source 1..723: mol_type = other DNA
atgggggacgccttgggcagtgtggtggtcgtgattaccgcgattattttttacgtgcttccactaaagtctgaggatccctgcaactggcagtgctatatagacccgtctctgacagtcttgatggtaattatcatcctttcatctgccttcccactgatcaaagaaacagccgcaattctgctgcaaatggtccctaaaggagttaatatggaggaattgatgagcaagttatcggctgtacccggaatctcgtccgtccacgaagtgcatatttgggagctcgtatctggaaaaatcattgccaccctgcatatcaagtatccgaaagacagaggttaccaggacgcttcgactaagattagagaaatctttcatcacgccggaatccacaacgttacaattcagttcgaaaatgtggacctcaaggaaccacttgagcagaaggacctccttcttttgtgcaacagtccatgcatatctaaagggtgcgctaagcagctgtgctgtccacctggcgctctgccactggcccatgtgaatggatgcgcagaacacaacggcggtccctccttggatacctacggatctgacggtctgagcaggagggatgcccgtgaggtggccatcgaagtgagcctggattcatgcctgagcgatcacgggcagtccttaaataagacacaagaagaccagtgttacgtgaatcggacacacttttag

SEQ ID NO: 241434 - DNA, 672 bp, synthetic construct
  misc_feature 1..672: note = Description of Artificial Sequence: Synthetic coding sequence
  source 1..672: mol_type = other DNA
atggggagatattctgggaaaacttgccgcctcttattcatgctggtgctgacagtcgccttttttgtggccgagctggtctccggatacttgggaaactcgatagccctcctgtcagactctttcaatatgctgagcgatctaatctctctgtgcgtgggtctctctgccggttatattgccaggcgccctaccaggggcttctctgctacctacgggtacgccagggctgaggtggtgggagcccttagcaatgcagtgtttttaaccgcgctttgcttcaccattttcgtggaggcagtcctccgtttggctcgacccgaaagaatcgatgacccagagcttgtcctgatcgtgggagtgctgggcctgctggtgaacgtggtgggactgttgatttttcaggattgcgccgcttggttcgcgtgctgtctcagaggtcgttctagacggcttcaacaaagacagcagctggcagagggatgcgttcccggagcctttggaggtccccaaggtgcagaagacccgaggcgcgctgccgaccccactgcaccaggcagcgactctgctgtgacgttgcgcggtacgtctgtagaacgcaaaagagaaaagggcgctacggtttttgccaacgtggccgaactgattcataacactaggtttttactgtag

SEQ ID NO: 241435 - DNA, 567 bp, synthetic construct
  misc_feature 1..567: note = Description of Artificial Sequence: Synthetic coding sequence
  source 1..567: mol_type = other DNA
atggaccatagccatcatatggggatgtcgtatatggattccaactcaacaatgcagccgagccatcatcatccaactacttcagcatcacatagccatgggggtggcgactcaagtatgatgatgatgcccatgacgttctatttcggcttcaagaacgtcgagctcttattcagcggtttagtcattaataccgctggggagatggccggtgccttcgtggctgtctttttgttagccatgttctatgaaggattaaagatcgcccgagaatccctcctaaggaagtcccaggtttccatccgctataactccatgcctgttcctgggcctaacgggaccattctcatggagacacataaaactgttgggcagcagatgctgtccttcccacatttgcttcagacatgttgggactatcggcacgagccacctcacctcagcctctctcccagttattactctgatttgaattatcccaagaaggcgaaggtcctgctgcgggtgagtgtcgaactgatgattcaagaagccttgatgatcacggccggtgattccctctgttag

SEQ ID NO: 241436 - DNA, 573 bp, synthetic construct
  misc_feature 1..573: note = Description of Artificial Sequence: Synthetic coding sequence
  source 1..573: mol_type = other DNA
atggatcacagccaccatatggggatgagttacatggacagcaattctaccatgcagccatcccatcatcacccgaccacaagcgcttcccacagccatggcggaggcgacagctccatgatgatgatgcccatgaccttctacttcggattcaaaaatgttgaactgttgtttagcgggctcgttattaacaccgctggcgaaatggcaggcgctttcgttgcagtctttcttttggccatgttttatgaaggcctgaagattgcaagggagtcactgctgcgcaaaagccaggtcagcatccgatataattccatgcctgtcccagggcctaatggcacaatcttaatggagactcacaaaactgtgggacagcagatgctgagcttccctcacttgctacagacagtgctgcatattattcaggtggtcataagttactttttaatgctcattttcatgacctataacggatacttgtgtattgcagtcgctgctggagcgggaacaggatattttctgtttagctggaagaaagccgtggtcgtggacatcactgagcactgccactag

SEQ ID NO: 241437 - DNA, 432 bp, synthetic construct
  misc_feature 1..432: note = Description of Artificial Sequence: Synthetic coding sequence
  source 1..432: mol_type = other DNA
atggccatgcattttatcttctccgacaccgccgtcctcttattcgacttttggtccgtgcactctccggctgggatggccctgtcagtcctggtcctgttgttgctagctgtgctctacgaggggatcaaggtgggaaaggccaagctgctaaaccaggttcttgttaaccttccgacgagcatatctcagcagacaatagccgagaccgatggagattcggcaggtagcgactccttcccagtaggtaggactcaccaccgatggtacctgtgccatttcggacagagcctcattcatgtgatccaagtggtaataggatactttatcatgcttgcagtcatgagctacaacacctggattttcctgggcgtcgtgctcgggagtgctgtgggttattatttggcctatcctctcctctcaacggcatag

SEQ ID NO: 241438 - DNA, 1650 bp, synthetic construct
  misc_feature 1..1650: note = Description of Artificial Sequence: Synthetic coding sequence
  source 1..1650: mol_type = other DNA
atgtcaccaactatctcccacaaagattcatccagacagaggaggcccggaaacttttctcacagtctggatatgaagtcaggacccctgccccctggcggatgggacgatagtcaccttgacagcgcaggtagagagggtgatagggaagctctcctgggtgacactgggacgggagattttctgaaggcccctcaaagttttcgcgctgaactttctagcatcttactcctcttgtttctttatgtcctccaggggattccactggggctggcagggtcgattcctctgatcctgcagtccaaaaacgtgtcttataccgatcaggcatttttttcattcgttttttggccctttagcttaaagctgttatgggctcccctggtggacgcggtctacgttaagaattttggcaggcgcaaatcttggctggtgcctactcaatatatcctcgggctgttcatgatatacctatcgactcaggtcgacagactgctcgggaacacagacgaccgcacgcctgacgtgatcgccctgactgttgccttcttcctgtttgagtttcttgcagccacacaggacatcgcggttgacgggtgggctctgactatgctgtccagagagaacgtcggctacgcatccacctgtaacagtgtcggtcaaaccgcagggtatttccttggtaacgtgctgtttctggccttggagagtgctgatttctgtaataagtacctgcggtttcagcctcaacccagggggatcgtgactctgagcgatttcctgttcttctggggcaccgttttcctcattaccacaactttggttgccctgctcaagaaagagaacgaggtgtcggttgtcaaagaggagacacaaggaatcactgacacttataagctgctgttcgctataattaagatgcctgccgtgctgacgttttgcctgctgatcctaacggccaaaattggattcagtgccgctgacgccgttaccgggctgaagctggtcgaagagggcgttcctaaagaacatcttgctctgctcgccgtccccatggttccactccagatcattctccctctgataatttccaagtatacagccggacctcagcccctcaacacattttataaggccatgccctatcgactgctgcttgggttggaatatgccctgctagtctggtggacgcccaaggtggagcatcagggcggtttccctatctattattatatcgtggtgctcttaagttatgcattacaccaagtcactgtgtattccatgtacgtgtctatcatggccttcaacgctaaggtgagcgatcccctgatcggcggaacatacatgaccctgctgaataccgtgagcaatttaggtggaaactggccgtccactgttgctttatggttagtagatcctctgaccgtgaaagagtgcgtgggagcttccaaccagaactgtcgtactcctgacgctgttgaattgtgcaaaaagctcggcggatcttgtgtgaccgccctagatggctactacgtggaatccatcatttgtgtcttcataggtttcgggtggtggttctttctgggcccaaagttcaaaaaactacaagatgaaggttcatcatcctggaaatgtaagagaaacaactag

SEQ ID NO: 241439 - DNA, 1650 bp, synthetic construct
  misc_feature 1..1650: note = Description of Artificial Sequence: Synthetic coding sequence
  source 1..1650: mol_type = other DNA
atgagcccgaccatttctcataaggatagcagccggcaaagacgacccggtaatttctcacactcattggacatgaaatctggccctttgccacccggagggtgggatgacagccaccttgactccgcaggcagagagggtgaccgcgaggcactactgggagacacaggtacaggagactttcttaaagcaccgcagtccttcagggccgagctttcctccatcctcctgttgttgtttctgtacgtcttgcaggggatccccttaggtttggccggatctatccccctcatattgcagtccaaaaacgtttcctacaccgatcaagcatttttttccttcgtcttctggcccttttcactgaagctattatgggcccctttggttgatgcagtttacgttaagaatttcgggagacgcaagtcatggctggtacccacacaatatattctgggtctcttcatgatctatctcagcactcaggtggaccgtctgctcgggaacactgacgaccgcactccagacgtcatagcactgactgtggccttcttcctgttcgagtttctggccgctacccaggacatcgccgtcgatggatgggcattaactatgctctcacgagaaaatgttggatacgcttcaacatgtaactctgttggacagaccgcgggttactttttgggcaacgtgctgtttctggcccttgagtctgctgacttttgcaataaatatctaaggttccagccccagcccaggggaattgttactttatccgacttcttgttcttctggggaacagtatttttgattaccaccacccttgtggctcttctaaagaaggaaaacgaagtgtcagtggtaaaagaagagacgcagggtattacagacacctataaactgctgttcgccatcattaagatgccagccgtcctgaccttttgcctgctgatcctgactgccaaaattgggttctccgctgccgacgctgttactggccttaagctggttgaggagggcgttccaaaagaacaccttgcactacttgccgtcccaatggtgcccctgcagattatactccccctcattatctcgaaatatacggctggcccacagcccctaaacacattttacaaggcaatgccataccggttactattgggtctggaatatgctctgctcgtctggtggacccccaaggtggaacaccagggaggtttccctatttactactatattgtagtgctcctgtcatatgccttgcatcaggtgactgtgtactctatgtacgtgtctatcatggcctttaacgcaaaggtgtctgatcctttgattggcggtacttatatgacgctgttaaacactgtgtctaatttgggaggaaattggcctagcaccgtggccctgtggctggtcgaccctctaactgtgaaggaatgcgttggcgctagcaaccagaattgccgtacaccagacgctgtcgaattatgtaagaagctcggaggctcttgtgtaactgccttggacgggtactatgtggaatccataatatgcgtctttatagggtttggatggtggtttttcctcggaccaaagttcaaaaagctgcaggacgagggaagctcatcatggaaatgcaagagaaacaactag

SEQ ID NO: 241440 - DNA, 1920 bp, synthetic construct
  misc_feature 1..1920: note = Description of Artificial Sequence: Synthetic coding sequence
  source 1..1920: mol_type = other DNA
atgctgagctatggggaacgcctgggatctcctgctgtctcccccttacccgtgaggggaggccacgtgatgcgtggcactgccttcgcctatgtcccctccccacaagtgttgcacagaatcccgggtacctcagcctatgccttcccttcactgggtccagtggcattggctgagcacacatgtccatgcggcgaggtccttgaacgccacgagccgctgcctgcgaaactggctcttgaagaagaacagaaacctgaaagtaggctggtgcccaaactgcgacaggcaggcgcaatgttactgaaagtgccattgatgctgacattcttatatctgtttgtgtgcagcctggacatgctctcaagcgctttccagctggcaggcggaaaggtcgctggcgatattttcaaggacaacgccattctaagtaatccggtcgccggtcttgtggtcggtattctcgtgacagtactggtgcagagctccagtacatccacaagtatcatcgtaagtatggtgagcagtggcttattggaagtgtctagcgccattcccattatcatgggtagcaatatcgggacaagtgtcacaaacaccatcgtggccctgatgcaggctggcgacagaaccgattttcggagagcattcgcaggtgcaactgtgcacgattgcttcaattggctatccgtgctcgtgctgttgcctctggaggccgctaccgggtatttgcaccacatcactcgattggtggtcgcaagctttaacatccacggcggaagagacgccccagatctgcttaaaatcattaccgaaccctttacaaagctcataatccagctcgatgaatctgtaatcacctcgatagctaccggagacgaatccttgagaaaccacagcctgattcagatctggtgccaccccgatagtctccaggcaccaactagcatgagccgggcagaagcgaactcaagccagaccctggggaacgctacaatggaaaagtgcaaccacatttttgtcgacacgggactgcccgacctggcagtaggcctgattctcctcgcaggtagtctcgttttactttgtacttgcctgattttgctggtcaagatgctcaattctttgctgaaagggcaggtcgccaaagtgattcagaaggtgatcaataccgattttccagctccttttacttgggtgacgggttattttgccatggtcgtaggtgctagcatgaccttcgtagtgcagtctagtagtgtgtttacctccgccataactccactaatcggcctgggggtgataagcattgaacgcgcataccccctgaccctagggtcgaatataggaacaacaaccacggctattctggctgctctcgcttctccacgggagaaactgtcaagcgccttccagatcgctctttgccattttttcttcaacatcagcggcatcttgttgtggtaccctgtgccatgtacccgactgcccatcagaatggccaaagccctgggaaaacgaacagccaagtacagatggttcgccgtgttgtacctcctggtatgtttcctcttgctcccctccctggtgtttgggatctctatggctggctggcaggtgatggtgggagtgggtactccgttcggagcactactggcctttgtcgtgttaatcaacgtcttacaatcaaggtccccgggacatctgcctaaatggttgcagacttgggatttcctaccccgatggatgcattcattaaaacctcttgaccacctgatcacacgcgcaaccctatgctgcgcacgcccagaacccagatcccctccactgcctcccagggtcttcctggaggagttgcctccagccaccccaagccctcgcctagcattgcctgcgcatcataacgccacacgcctgtag

SEQ ID NO: 241441 - DNA, 330 bp, synthetic construct
  misc_feature 1..330: note = Description of Artificial Sequence: Synthetic coding sequence
  source 1..330: mol_type = other DNA
atgctctcctacggagagagattgggatctccggctgtctcgcctttgcccgtgcggggaggccacgtgatgaggggaactgcttttgcttacgtgccaagccctcaggtgctgcacaggattccaggcacatccgcatatgcatttccttctctgggcccagttgccctggccgaacacacatgtccatgcggagaggtgctggagcgacacgagcccttgcccgctaagttggcgctcgaagaggaacaaaaaccagaatcccggcttgttccaaaacttcgacaggcaggcgcaatgttactcaaggtgcccctcatgctgacatag

SEQ ID NO: 241442 - DNA, 1023 bp, synthetic construct
  misc_feature 1..1023: note = Description of Artificial Sequence: Synthetic coding sequence
  source 1..1023: mol_type = other DNA
atgctgtcctatggagaacggttaggaagccccgcagtgagtcccttacccgtaaggggaggccatgtcatgaggggcaccgcctttgcttatgtgccatcaccacaggtactgcaccgcatcccagggacatctgcttacgctttccccagtttggggccagtagcactggccgaacacacatgcccttgcggtgaggtgctggaacgacatgagcctctcccagctaaactggccctggaggaggaacagaaacccgaatcccgcctggtacccaagcttcggcaggcgggagcgatgcttctgaaggtgccactgatgctcacatttctgtacctgttcgtttgcagtctcgacatgttgtcctcagcttttcagctggcgggagggaaggtagccggagatatcttcaaggacaacgccattctgtcgaaccctgtcgccggactggtagttggcatactcgtcacagtcctcgtgcagtccagtagcacctctacctccattattgtttccatggtgagcagtggcctccttgaagtctcctctgccatcccaatcattatgggctcaaacattgggacaagcgtcaccaatacaatcgtcgccctcatgcaggccggagatagaactgacttcaggcgagcgtttgccggtgccaccgtacacgactgctttaattggttgagtgtgctggtgttgttacccctcgaagcagcaactggttatctccaccacatcactaggttggtggtggcctcttttaatatccacgggggtcgggacgccccagatctgctcaagatcatcacagaaccattcactaagttaatcatccagttagatgaaagcgtcataacttccattgcaaccggggatgaaagtctccgtaaccatagtcttatccagatttggtgccaccccgactctctccagcagaatttggaagggcgagagatcactcactttgacctgaggaagaaacaagccatggaggacagttcggtgccccactgtccatag

SEQ ID NO: 241443 - DNA, 2073 bp, synthetic construct
  misc_feature 1..2073: note = Description of Artificial Sequence: Synthetic coding sequence
  source 1..2073: mol_type = other DNA
atggcaccatggccagaactgggagatgctcagcctaaccctgacaaatatttagaaggtgctgccggtcagcagccaaccgcccctgacaaaagcaaggagactaataaaacggacaatactgaagcccctgtgaccaagattgagctcctcccttcctacagcaccgctaccctcatagacgagcctaccgaggtggacgacccctggaacctccctactctgcaggactcagggataaaatggagcgagcgggacaccaaaggaaaaatcctgtgtttttttcagggcattggaagattgatcttactgttggggttcctgtacttttttgtttgttccctggacatcctgagttccgctttccagctggttgggggaaagatggcaggacagttctttagcaatagcagcataatgagcaatccgctcttgggcctggtgatcggcgtcctggtcactgtgctggtgcagagctcgagcacctccacgtccatcgttgtctccatggtctcatcctccttgctgacagtcagggcagcaatccccatcatcatgggggctaatatcggaacctcaattactaatacaatcgtcgccttgatgcaggtcggagacaggtctgagttccgcagagctttcgccggagccacagtgcatgatttctttaattggctgagcgtcctcgtgctactgccagttgaggtggcaacccattacctcgaaattatcacacagcttattgtggagtcattccactttaaaaatggagaagatgctcctgacttgcttaaggtcattaccaagccgttcacgaagctcatagtgcaattagataagaaggtgatttctcagatcgctatgaacgatgaaaaggccaagaataagtcccttgtgaagatatggtgcaagacattcacgaacaagacacaaattaacgtcacagtgccaagcacagctaactgcacatctccaagtctgtgctggacagacggaatccagaactggaccatgaaaaacgtaacttacaaggagaatattgcaaagtgccagcatatcttcgtaaatttccacctgcctgatctagcagtaggaactattttgctgatcctgtcacttctcgtgctctgtgggtgcttgatcatgattgtgaaaattcttgggtcagtgcttaaaggccaagttgccaccgtgatcaagaagactataaacactgactttccctttcccttcgcctggctgaccggctacctcgcaatcctagttggcgctgggatgacctttatcgtccagagctcctctgtgttcacctccgcactcacccccctcataggcataggagtcatcacaatcgagcgagcttaccctctcaccctgggctccaacatcgggactaccactacggcaatcctggcagcgttggccagccccggtaacgcgctgcgctcaagtctgcagattgccctctgccattttttctttaatatttctggtatcctcctgtggtatccaattccatttaccagactgccaattcgaatggctaaggggctcggcaatatcagtgccaagtataggtggtttgccgtgttctacctcatcatatttttctttctaatccctttgaccgtgtttggactgtcattagctggatggagagtcctcgtcggagtcggagttcccgtggtgttcattattatcctcgtgctgtgcctgcggttactgcagtcccgttgccctagggtgctccctaagaagttgcaaaactggaacttccttccactgtggatgcggagtcttaaaccttgggatgctgtggtcagcaaattcaccggatgtttccagatgaggtgctgctgttgctgcagagtgtgttgccgcgcttgttgccttctctgcgactgcccaaagtgctgcagatgtagcaaatgttgcgaggacctagaagaagcgcaagagggccaggatgtgcccgtcaaagcacccgagacgtttgacaatataacgatttctagagaggcccaaggggaagtgcccgcaagcgattcaaaaactgaatgcactgctctgtag

SEQ ID NO: 241444 - DNA, 2070 bp, synthetic construct
  misc_feature 1..2070: note = Description of Artificial Sequence: Synthetic coding sequence
  source 1..2070: mol_type = other DNA
atggccccatggcccgaactcggcgacgcccaacctaacccagataaatatctcgaaggagccgctggtcagcagcctactgcgccagataagagcaaagaaactaataagaataataccgaggcccctgttaccaagatagaactgcttccctcgtacagtacagcaacgttgatcgatgagccaacagaggtggacgatccctggaaccttcctaccttgcaggactccggtatcaaatggtccgaacgcgacactaaaggaaagattctatgcttttttcaaggcattggcaggctgatcctcctgttgggattcctttacttttttgtgtgttctctggacattctctcatctgcatttcagcttgtgggaggaaaaatggccggacagtttttttctaacagtagtattatgtcaaatcccctcctcggtctcgtaatcggcgtacttgtcaccgttttagttcaatcgagctctacctctactagtatcgttgtaagcatggtgtcatcctcgttactgaccgtaagggcagctatccccataataatgggcgcaaacatcggcacatctatcaccaacactattgtcgcccttatgcaagtcggcgatagaagtgaatttagacgagcgttcgctggcgcaactgtgcacgactttttcaactggctcagcgtgctggttctgctacctgttgaggtcgctactcactacctggagattattactcagctgatcgttgaatcttttcacttcaaaaacggagaggacgcacctgatctcctgaaagttattactaaaccattcacaaagctcatagttcaactagacaaaaaggtaatatcccagatcgccatgaatgacgagaaggcgaagaataagtccctggtcaagatctggtgcaagacattcaccaacaagacccagatcaacgtgaccgtgcccagcacagcaaattgcacatctccaagtctctgctggacagatggtatacaaaattggaccatgaaaaatgtgacatacaaggagaatatcgcgaaatgtcagcacatctttgtgaattttcatttaccagatctggccgtagggactatcctactgatactgtcactgcttgtcctgtgcgggtgcctcattatgatcgtgaagatcctgggctccgtgctgaaagggcaggtggcaacagtcattaagaagacaatcaataccgactttcctttccccttcgcttggctcaccggatatctcgccattctcgtcggtgcaggtatgacttttatcgttcagagttctagcgtttttacttctgcacttacccctctgataggtatcggcgtcataactatagaaagggcctaccccctgacattgggaagcaacatcggcacgactaccaccgccatcctggctgcgctagccagccctggcaacgctctgagaagttctctgcagattgccctgtgccactttttttttaatatctccgggatcctactctggtatccaattccatttaccagattaccaatccggatggccaaaggcctgggcaacatatctgccaagtaccgctggttcgcagttttttacttgattattttcttcttcctaatccctctgactgtgtttggcctgtccctggcaggctggcgcgtgctcgtgggagtgggtgtgcctgtggtgttcattattatccttgttctttgtctgcggctgctgcagtcgcgctgtcccagagtgctgcctaaaaagttgcagaactggaacttcctgcctttatggatgagaagtctgaagccatgggatgcggtggtgagtaagttcactggttgcttccagatgaggtgttgttgttgctgcagagtgtgctgtcgggcatgctgtcttctgtgcgactgccctaaatgttgtcggtgttctaagtgctgtgaagatttggaggaagcacaagaagggcaggatgtccctgttaaggcccctgaaacctttgacaacatcacaatctctcgagaggctcagggcgaagtgcctgcttctgattctaaaacagagtgcacagctctatag

SEQ ID NO: 241445 - DNA, 2070 bp, synthetic construct
  misc_feature 1..2070: note = Description of Artificial Sequence: Synthetic coding sequence
  source 1..2070: mol_type = other DNA
atggctccttggcccgagctgggtgacgcccaacctaatccagacaagtacctcgagggagcggctggacagcagcctaccgccccagataaaagtaaagaaaccaataagaataatacggaggctcctgtgactaagatcgagctcctgcccagctattccaccgcaacattgatcgacgagccgacagaagttgatgacccatggaacctccccaccttacaagacagcggaattaagtggagcgagcgagacaccaaagggaaaatcctgtgttttttccagggaatagggcgactaatccttctgctcgggttcctgtattttttcgtgtgttccctcgacatattaagttcagcttttcaacttgtcggcggaaaaatggctgggcaatttttcagcaacagctctataatgtctaaccctctcctaggcctggttatcggcgtgcttgtgacggtgctggtgcagagctcatccaccagcacaagcattgtggtgagcatggtgtctagtagcctgctaaccgtgagggccgctattcccatcattatgggcgctaatataggcacatcgattacaaacacaatcgttgcattaatgcaggtcggtgatagatccgaattccggcgtgcatttgccggtgctacagtccatgatttctttaattggctgagcgtgcttgttctgctccccgtagaggtggccactcactatttggagataattactcagctgatcgtggagagttttcacttcaagaacggcgaagacgcgcctgatctcctgaaggtgattaccaagccatttaccaagttgatcgtccagctggataaaaaggtaatcagccagatcgcaatgaatgatgagaaagctaaaaacaagagtcttgtgaagatttggtgtaagaccttcactaacaagacccagataaacgtgaccgttccgagcacagcaaattgtacctctcctagcctttgctggacagacggaatccagaactggaccatgaaaaatgtgacttacaaagaaaatattgctaagtgccagcacatcttcgtgaattttcacttgccagacctggctgttgggacgatactgctcatcttgtctttactcgtgctatgtggctgcctgatcatgatcgtgaaaatcctgggctccgtgctgaaaggccaggtggctacagttattaaaaagaccatcaatactgatttccccttccccttcgcctggctcacgggatacctggccatccttgtgggagctggcatgacgttcatcgtccaatcttccagcgtgtttaccagcgccctcactcccttaatcggaattggcgttattaccattgagcgtgcctatcctctgaccttgggctctaacatcgggaccactactacagccatcctcgccgctctggcctccccagggaacgctttgaggagttccctccagattgcgctgtgtcatttcttttttaacatttctggaattctgctctggtatccgattcctttcactaggcttcccatccgaatggccaagggcctcggtaatatatcagccaaatataggtggtttgctgtgttttatctgattatcttcttctttttaatccccctgaccgtgtttggactctctctggctggttggagggttctcgttggtgtgggcgtgcccgtggtctttattattattttagtgctgtgcctgagacttttgcagtcacgctgtcccagagtattgcctaagaagctgcagaactggaactttttgccgttatggatgagatccctgaagccctgggacgctgtagtgtccaagttcactggctgctttcagatgcggtgttgttgttgctgccgcgtgtgctgtagagcatgttgtttactgtgtgattgccctaaatgttgtagatgcagcaagtgttgtgaggacctggaggaggcacaggaggggcaggatgttccagttaaggcacccgagacttttgacaacatcaccatttccagagaagctcagggggaagtaccagctagcgacagtaagacagagtgtaccgctctgtag

SEQ ID NO: 241446 - DNA, 486 bp, synthetic construct
  misc_feature 1..486: note = Description of Artificial Sequence: Synthetic coding sequence
  source 1..486: mol_type = other DNA
atggcaccttggccagagttgggcgatgcccagcccaatcccgacaaatacctggaaggggctgccggtcagcaacccactgccccagacaaatccaaggaaacaaacaagactgacaatacagaagctccagtcactaaaatcgaacttctaccctcctattcgaccgcaaccctgattgatgagcccactgaggttgacgacccctggaatctccccacactgcaggactcaggcataaaatggtctgagcgcgacacaaaaggaaagattctgtgtttctttcaggggataggaagattaattctgctattaggattcctttacttttttgtgtgttctctggatatactgagttcggccttccagctcgtgggaggaaaaatggccggacaatttttctcaaattcctctatcatgagcaacccactccttggtttggtaatcggagtgttagtgacagtgctggtgcagtcgtcatcctag

SEQ ID NO: 241447 - DNA, 492 bp, synthetic construct
  misc_feature 1..492: note = Description of Artificial Sequence: Synthetic coding sequence
  source 1..492: mol_type = other DNA
atggctccttggcccgagctcggggatgcacagcccaaccctgataagtatcttgagggcgctgcagggcaacagccgacagccccagataaatcgaaagaaacaaataagaacaataccgaagcccctgtgaccaagatcgaactgctgccctcttattcaaccgcgacattaatcgacgagcccacagaagttgacgacccctggaacctgccaactctgcaggacagcggaatcaagtggtccgaacgggatactaagggtaagatcctgtgctttttccagggaataggaagattgatcctgttactgggttttctctactttttcgtctgctccctggatatcctctcgtctgcttttcaactggttggtggcaaaatggctggacagtttttctcgaacagttccattatgagtaatccattactcggtctggtgattggagtacttgtcacagtccttgttcaaagttctagtactagcacctag

SEQ ID NO: 241448 - DNA, 1800 bp, synthetic construct
  misc_feature 1..1800: note = Description of Artificial Sequence: Synthetic coding sequence
  source 1..1800: mol_type = other DNA
atgccatcttccctcccaggctctcaggtaccgcaccctacactcgatgctgtcgacctggtggaaaaaactctgcggaacgagggaacgagctcatcagctcctgtcctggaggagggcgatacagacccatggactctgcctcagctgaaggatactagtcagccatggaaagaactgcgtgtagcaggccgtctcaggagggtagctgggtccgtgctgaaagcctgcggcctgttgggctcattatatttcttcatatgctctctcgacgttttgagctcagcgttccagctgttggggtctaaagtagccggagacatatttaaggataatgtcgtgctgagtaaccctgtggcgggtctggtcatcggcgtcctggtcacagcgctcgtccagagtagcagcactagctccagcattgttgtgagcatggtggcagctaaactgctcactgtccgcgtgtccgtgccgatcattatgggggtcaatgtcggaaccagcataacatctacactggtttccatggctcaatcgggcgaccgggacgaattccagcgcgctttctccggttcagccgtccacggaatattcaactggctcacggtgttagttttgcttcccctggaaagcgccacggcgctgctggaacggctcagcgagctcgctttgggtgctgcgagcctcacaccccgagcacaagccccagacatccttaaggtgctgacgaaacctctaactcacctcattgtgcagttagattctgatatgatcatgtctagcgccacgggaaatgcgactaactcatcgctgattaagcactggtgtggaacaactggccagccaactcaggaaaatagcagctgtggcgctttcggaccctgcactgagaagaattcgactgcacccgcagaccgcctgccctgtcgccacttgttcgcaggaacggaattgactgatctcgcggtggggtgcattctgttggcaggatctctcctggtgctatgtggttgcttagtcctaattgtgaagttgttgaacagtgtccttcggggacgggttgcgcaggtcgtccgcaccgtgatcaacgccgatttcccattcccattgggatggctggggggatatctggcagtgctcgcaggtgcgggtttgacatttgcccttcagagttcatctgtatttacagctgcggtcgtgccgcttatgggagtaggcgttattagcctggacagggcctatcctctgctgctgggtagcaacattggcacgacaactacggctctcctagcagcacttgcatctcctgctgacaggatgctttccgctttgcaagtcgcactgatacatttcttcttcaatctggctggtatcttactgtggtacctcgtgcctgctctgcggcttccaataccattggccaggcattttggcgttgtgacagcccgttaccgctgggtggccggagtgtatctgttgttgggattcttgctgcttccgctggccgcattcggcctttctctggccggaggaatggaacttgcggcagtgggagggccattggtggggttggtcttactagtgatcctcgtgactgtactccagcgcagacgacccgcatggctgccggtgcgtctgcgctcttgggcctggctcccagtttggctgcattccctggaaccatgggacagactggtgacgaggtgttgcccatgtaatgtttgtagcccgcctaaggcaaccaccaaggaggcatactgctatgagaaccccgagatcctggcgtcccagcaactgtag

SEQ ID NO: 241449 - DNA, 1800 bp, synthetic construct
  misc_feature 1..1800: note = Description of Artificial Sequence: Synthetic coding sequence
  source 1..1800: mol_type = other DNA
atgccttcttccctgcccggatctcaggtgccccatccaactctggacgcagtcgatcttgtggagaagacacttcggaatgaaggtacttcaagctcggctcctgtgcttgaggaaggagataccgacccatggactcttcctcagctaaaagacacttctcagccttggaaggaattaagggtggcagggaggttacgcagggtggccggaagtgtgctgaaagcttgcggattactgggctcactctatttctttatctgctcactcgatgtgctgtcaagtgcatttcagctgttggggagcaaggtggctggtgacattttcaaggataatgttgttctctccaatccagtggccggactggtgattggagtcctggttaccgctctggttcaatcatcatccacctcgtctagtattgtggtttccatggtggcagctaaattactgacagttcgcgtgtccgtaccaatcatcatgggggtgaatgtggggacctctattacctctaccctcgtgtctatggcacagtcgggagaccgcgatgaatttcagcgggctttctccggttccgcagtacatggtatcttcaattggctaaccgtgctggtccttctgccactcgagtctgccacggctctcctagaacggctgtccgagctggccctgggtgcagcctcgctgactcccagagcgcaggctccagatattctgaaagtgctcaccaaaccactcacgcatctgatcgtgcagcttgatagcgatatgatcatgagcagtgcaaccgggaacgctaccaatagctccctgattaagcactggtgcggcaccacagggcagcctacccaggagaatagcagttgcggcgcatttgggccttgtactgaaaaaaatagcactgctcccgcagatagacttccgtgtagacatctctttgccggaacggaattgacagatcttgctgttggatgcatcttactggctggcagcttgctggtgttatgcggctgtctggtattgatcgtaaaactgctgaactccgtgctgcgcggacgtgtcgcgcaagtcgtcagaacagtcatcaatgctgactttccatttcccctgggctggttggggggatacctcgctgtccttgcaggagcaggcctgacctttgcactgcagtcatcttcagtattcactgccgctgtcgttcccctgatgggagtgggagttatttctctggatagagcctaccccctcttactagggtcaaacatcggaaccaccaccacagcgttactcgctgccctagcttctccggctgatagaatgctgtcggcattacaggtcgccctgatacactttttcttcaacctggccggaatactgctttggtatctggtgcctgccctcaggttgccgattccactggcccgacactttggtgtcgtgaccgctagatatagatgggtggcaggtgtgtatctgcttctggggttcttactgctaccacttgccgctttcgggctgagtcttgcaggcggaatggagctcgccgcagtcggtgggccactggttggcttagtgctattggtaatcctggtgaccgtcttacagagacgcaggcctgcctggctcccagttcgccttcgttcctgggcctggctccccgtttggctccatagcctggaaccttgggataggcttgtcacccggtgttgcccctgcaatgtgtgctctcctccaaaggcaacgacgaaagaggcgtattgttacgagaatcccgagatactggccagccagcagctctag

SEQ ID NO: 241450 - DNA, 570 bp, synthetic construct
  misc_feature 1..570: note = Description of Artificial Sequence: Synthetic coding sequence
  source 1..570: mol_type = other DNA
atgaccctaatggcagcggtctataccattgctctaagatacacccgaacatctgacaaagagctgtatttcagtacaaccgcggtgtgtattaccgaggttatcaagttgctgctctctgtcggtatcttggctaaagagaccggctccttaggcagattcaaggccagcttaagagaaaacgttctaggatcaccaaaggaactgctcaagctatctgttccttccctggtgtatgccgtgcaaaataacatggcctttctcgccctttctaatctggacgccgctgtttaccaagtgacatatcagctaaagattccctgtactgcactttgcaccgtccttatgcttaatcgaacgttgtccaaacttcagtgggtgtcagtttttatgttatgcgccggtgtaacactggtgcaatggaagcccgctcaggccaccaaggtcgtcgagtatatcctgaaaaagtttaaggagttcaggtattttagtctgggagagaagcactcgaacgttagcatcagggactattgtgacatcagctggaggctactcgtacgatggtcctag

SEQ ID NO: 241451 - DNA, 1014 bp, synthetic construct
  misc_feature 1..1014: note = Description of Artificial Sequence: Synthetic coding sequence
  source 1..1014: mol_type = other DNA
atggctgctccacgggataatgtgactttattgtttaaattatattgcctggcagtgatgactttgatggccgctgtgtatacgatcgctttaaggtatacaagaacatccgataaggaactctatttcagtacaaccgccgtctgcatcactgaggtgattaagctgctcctgagtgttggaatcctggccaaagagactgggtctctcggaaggttcaaggcttctctccgagagaatgtacttgggtccccaaaagagttgcttaagctgtcagtgcccagcctcgtttacgccgtccagaataacatggccttcttggctctttcaaatctcgatgccgctgtctaccaggtgacttaccaactgaaaattccatgtacagctttgtgtacggtgctgatgctaaatcgcaccctaagtaagctgcagtgggtcagcgtgtttatgctttgtgcaggagtcaccttggtccagtggaagcctgcccaggcaacaaaggtggtggtggaacaaaacccacttctgggattcggggctatcgccatcgccgtgctatgctctggctttgccggtgtgtacttcgagaaggtgctgaagtcaagcgatacgagcctttgggtgcggaacatccagatgtatctctccggcatcatcgtgacccttgctggagtttaccttagtgacggagctgagatcaaggagaaggggtttttttatgggtacacttactacgtctggtttgtgatcttccttgcttcagtgggcggactgtatacatccgtggtcgtgaagtacactgacaatatcatgaagggcttttcagccgctgcggctatcgttctatctacaatcgcctcagtcatgttattcgggctgcagattactctgactttcgccctgggtaccctattagtttgtgtcagtatctatttgtatggtctcccacgccaggacacaaccagcatccagcaaggagaaaccgccagcaaggagcgggtcattggagtgtag

SEQ ID NO: 241452 - DNA, 837 bp, synthetic construct
  misc_feature 1..837: note = Description of Artificial Sequence: Synthetic coding sequence
  source 1..837: mol_type = other DNA
atggctgcccctagggacaacgttactctactattcaagctgtactgtctggccgttatgaccctaatggccgcagtgtatacaatagcccttagatacaccaggacatccgacaaggagctttacttctctaccacagcggtgtgcattactgaggtcattaagctgctgttgtcggtgggtatcctggccaaggaaacaggctcactggggcgtttcaaagcaagcctgagagaaaacgttcttggaagtcctaaggaactgttgaagttgtctgtgccttccctcgtctatgctgtgcagaacaacatggcattccttgcactgtcaaatctggatgccgcagtctaccaggtgacctaccaactaaagataccttgtactgcactgtgtactgtgctgatgttgaatagaactctgagcaaactgcaatgggtcagtgtattcatgctctgcgccggagttacattggtgcaatggaaacccgcacaggccactaaggtcgtcgtggagcagaatcccttgctgggcttcggtgccatcgcaatagctgttttgtgctcaggatttgctgtgctggccagtgtgggaggcctttacacctctgtcgtagtcaagtacacggacaacatcatgaaaggattctccgctgctgctgctatcgtcctaagcacgatcgcctctgtgatgctgtttggactgcagattaccctcactttcgcactcggtactttgctggtgtgtgtcagtatctatttgtatgggctcccaagacaggatacgacatccatccagcagggcgaaaccgccagcaaagagagggtgatcggggtgtag

SEQ ID NO: 241453 - DNA, 570 bp, synthetic construct
  misc_feature 1..570: note = Description of Artificial Sequence: Synthetic coding sequence
  source 1..570: mol_type = other DNA
atggccgcaccaagggacaacgtcaccttgctgttcaaactgtactgtctggcagtgatgacattgatggctgctgtatataccatcgcgctccggtatacacggacctcagataaagaactgtacttttctacgacagctgtttgtataaccgaggttataaagctgttgcttagtgtaggcattctcgccaaagaaacggggtcgctgggcaggttcaaggcaagcctgcgagagaatgtgctggggtcccctaaagagctgctgaaactttctgttccaagtcttgtgtacgccgttcagaacaacatggccttcctggctctttctaacctcgatgccgctgtgtaccaagtcacatatcagctgaaaatcccctgcaccgccttgtgcaccgtgctcatgctgaatagaacactgagcaagctgcaatgggtcagtgtgtttatgctgtgtgctggcgtcacactagtccaatggaaacccgctcaagccactaaggttgtctttctgcaggttcttgtcgcgtcaaccttactcctctggctatctacacagacaacatcctag

SEQ ID NO: 241454 - DNA, 537 bp, synthetic construct
  misc_feature 1..537: note = Description of Artificial Sequence: Synthetic coding sequence
  source 1..537: mol_type = other DNA
atggcggctcctagggacaacgtgactttgctattcaagctgtattgcctggcggtgatgaccttgatggccgctgtgtacacaatagcattacgctacaccaggaccagcgataaggagctgtacttctcaaccaccgcagtgtgtattacagaagtcatcaaactattgctttccgtgggcatcctagccaaggaaactggcagtctggggcgattcaaggccagcctgcgagagaacgtcctgggcagtcctaaggaacttctgaaactgtccgtaccatcccttgtttatgctgtgcagaataatatggcatttctggcactgtctaacctggatgcggcagtttaccaggtgacctaccagctcaaaattccttgcaccgcactgtgtacagtgttaatgctgaaccgcaccctcagcaagttacagaagaaagacttctccatggttacgcacatcatgtcaggacttagctcggtcagcatccaggagctgaaggtgctgtctcgatcatttatttttttcctgtcgtag

SEQ ID NO: 241455 - DNA, 612 bp, synthetic construct
  misc_feature 1..612: note = Description of Artificial Sequence: Synthetic coding sequence
  source 1..612: mol_type = other DNA
atgcttaaccgtaccctgtccaaactgcagtgggtttcagtgttcatgctctgtgctggggtgacacttgtgcaatggaaaccagctcaggcaaccaaggtggtggtggagcagaatcctctccttgggttcggcgcaattgcaattgccgtgttgtgtagcggattcgcaggagtatactttgaaaaggtccttaaaagctcagacaccagtttatgggtgcggaacatccagatgtacctgtccggcattatcgttactttggcaggagtgtacctgagcgacggcgcagagatcaaggagaagggcttcttttacggatatacttattatgtgtggttcgttatctttctagcttcagtggggggtctttacacttccgtggtggtcaaatataccgacaatatcatgaagggattctccgccgctgccgcaatagtcttgtccaccattgccagcgtgatgctattcgggttgcaaatcacgcttacctttgcgctggggacgctgttggtatgtgtgtctatctatctgtacgggctgccccgacaggatactacctccattcagcagggcgagacagcctccaaagagagggtgatcggagtgtag

SEQ ID NO: 241456 - DNA, 1191 bp, synthetic construct
  misc_feature 1..1191: note = Description of Artificial Sequence: Synthetic coding sequence
  source 1..1191: mol_type = other DNA
atggccgcagtgggcgctggcggttccaccgctgctcctgggcctggtgccgtgtccgctggtgccttagaacccggaactgcctctgccgcacaccgcagactgaaatatatctctctggccgtgctagtggtccaaaatgcctcacttatcctgtctattagatacgcacggaccctcccaggcgaccggtttttcgccacaaccgcagttgttatggctgaagtgctgaaagggttgacctgcctactgctcctgtttgcgcagaaacgaggtaacgtgaagcacctggtcctcttcctgcacgaggcggtgctggtgcaatatgtggacacattgaaattagcagtgcccagtttaatttatacgctacaaaataacctccagtacgtggccatatctaatctccctgcagctactttccaggtgacgtaccagctcaaaatcctgacaactgccctgttcagtgtgctgatgctaaatcgttccctttcccgcctccaatgggcatcccttcttctgctgttcacaggcgtcgctatcgtgcaggcccagcaggcaggcggaggcggacccaggcccctggatcagaatcctggtgctggtcttgccgctgtggttgcttcctgcttgagctccggcttcgccggtgtatattttgagaagatcttgaagggttcatccggtagcgtgtggctgcggaatctccagctggggttgttcggcacggccttaggacttgttgggttgtggtgggcagagggaaccgctgtcgctacaagggggttcttcttcggatacacaccggcagtgtggggagtggtcctcaatcaagcatttgggggactattggtcgccgtggtggtgaaatatgctgataacatcttgaagggctttgccactagccttagcatcgtgctgtccaccgtcgcgagtataagattgtttggatttcacgttgacccccttttcgccttgggtgcaggcctggtgattggcgcagtgtacttgtattctcttcctcgcggtgccgctaaggcaatcgccagtgcttccgcatctgcatctggcccttgcgtgcaccagcagcccccaggccagccaccccctccacagctttccagccaccgaggtgatcttatcacagagcccttcctgccaaagctgctgacaaaggtgaagggttcctag

SEQ ID NO: 241457 - DNA, 492 bp, synthetic construct
  misc_feature 1..492: note = Description of Artificial Sequence: Synthetic coding sequence
  source 1..492: mol_type = other DNA
atggctgccgtcggcgcaggcggatctacagccgctccaggacccggagcagtttcagctggagcgctagaacccggaaccgcatctgcggcacaccggaggctaaagtacatctcactcgcggtgttagttgtacagaacgcttcactgatactatccatcagatatgccagaaccttacccggtgatcgtttttttgccacgacagccgttgtgatggctgaggtgcttaaaggtttaacatgcttattactcctgttcgcccagaagagaggtaacgtgaaacacttggttctgttcctccacgaggcggtgctggtccagtacgtagacactttaaagctggccgtgcccagtctaatctacaccctacagaacaacctgcagtacgtggctatatccaacctacccgctgccacctttcaggttagtccaaagccatccatggcaccagaagagcttaccgggctgggcacaggggtgtgggagtag

SEQ ID NO: 241458 - DNA, 657 bp, synthetic construct
  misc_feature 1..657: note = Description of Artificial Sequence: Synthetic coding sequence
  source 1..657: mol_type = other DNA
atgaagttgtgccgagacgcccataggcgcttaaagtacatatcactcgcagttttggtcgtacaaaacgcatcacttatcctcagcatccgctacgcaaggacgctcccaggcgatagattttttgcaactactgctgtagttatggccgaggttctcaagggactgacctgtcttctgttactgttcgcgcagaagagaggcaacgtcaaacaccttgtgctgttcctgcatgaggccgtactggttcagtacgtagacacgctgaagctggcagttccttctttgatctataccttacaaaacaatctgcagtacgttgccatctcgaaccttcctgccgctacatttcagccatccccacggtgcagccaaagccacagcttatgcttatgcctcagactccgggcacttaggagtcctgcagcctcacgagcggctacgactactgctgctgtctttcccccatggcgccctcatcatggggctctgtccgcaaaagtatctgcgggagaggtgcgagcgggttccaatgggggtacgcaggggagaggaaccggcgtggagggagtgggccatcttcaggatccaagccggcatccccctggtccaggaagctccggcttcgggcgatggagtttcctgccaggccactag

SEQ ID NO: 241459 - DNA, 1182 bp, synthetic construct
  misc_feature 1..1182: note = Description of Artificial Sequence: Synthetic coding sequence
  source 1..1182: mol_type = other DNA
atggcagctgtgggagctggtggatccaccgcagctcccggacctggtgccgtgtctgcaggagctctggagcctggcacagcatctgccgcacacaggcgcttgaagtacatctctcttgctgttttggtggtgcagaacgcttcactcatcttgtctatccggtacgcaagaacactgcccggagatagattctttgctactactgccgtggtcatggccgaggtattgaaaggccttacatgtctcctgctcctgttcgcccagaagaggggcaacgtcaagcacttagtgctatttctgcatgaagccgtactggtgcagtatgtcgataccctaaagctggcagttccttcactcatctacacgttacaaaataaccttcagtacgtggctatatccaacctaccagctgccacgttccaggtgacctatcagcttaagatcctgaccaccgcactgttctcggtgctgatgctgaatcggtctctctctcgcctacagtgggcatccctactcctactgttcacaggtgtggccatagttcaggctcaacaagcagggggaggcggtcctcgccctctagaccaaaatccgggagcaggtctagctgcagtcgtggcctcctgcctttcttccggatttgcgggtgtctatttcgaaaagattctaaaaggttccagtggcagcgtctggcttagaaacttacagctcggcctattcggcaccgccctgggcttagttgggctgtggtgggccgagggaaccgctgtagccaccagaggctttttcttcggttacaccccggcagtgtggggggtggtgttgaatcaggccttcggcggactcttggtggctgtggtcgtcaaatacgctgacaacatcctgaaaggattcgctaccagcctgtcaattgtgttgtcaaccgtggcttctatccggcttttcggatttcatgtggacccgctttttgccttgggcgcaggtctggtcatcggggctgtttacctgtatagcctgcccagaggggctgcaaaggctatcgcgtcagcatccgcctcagcgtctggtccctgtgtccatcaacagcccccaggtcagccacctcctccccagctctcttcacataggggagacctcatcactgaaccgttcctgcccaagagcgttcttgtaaaatag

SEQ ID NO: 241460 - DNA, 675 bp, synthetic construct
  misc_feature 1..675: note = Description of Artificial Sequence: Synthetic coding sequence
  source 1..675: mol_type = other DNA
atggccgctgtaggcgcagggggatcaaccgcggctccgggacccggtgccgtgtctgcaggagccctagaacccggaacggcctccgcggcacatagacggttgaagtatatctctctggctgtgctggtggtgcaaaatgcaagcttaattttgtcaatccgctacgccaggaccctgcctggcgacagattcttcgccaccacagcagtggtgatggcagaggtgttgaaagggctgacttgcctgcttctcctgttcgcacagaaacgtggaaatgtcaaacacctggtgcttttcttgcacgaggccgtcctcgtgcaatatgtggacaccctgaaactcgctgtgcctagtttaatctacaccctgcagaataatctgcaatacgtcgccatcagcaacctaccagctgcaacgtttcagccatcgcccagatgttcccaaagccacagcctgtgcttatgtttgcgcttacgtgcacttcgatcccctgcggctagtcgggctgccaccaccaccgctgctgtctttccaccttggagacctcatcacggagccctatcggcaaaggtggcccaccagggtgaggggttcctggccgctggcatcgaggatattggcctggcctcattctctctgcttgccctgggtccggctgggactaagctctag

SEQ ID NO: 241461 - DNA, 999 bp, synthetic construct
  misc_feature 1..999: note = Description of Artificial Sequence: Synthetic coding sequence
  source 1..999: mol_type = other DNA
atggcggctgtgggggcaggcggatctacggctgctccaggacccggagccgtctcggccggagccctggagcctggaactgcaagtgccggaaacgtaaaacacctggtgctctttttacacgaggctgttctcgtccagtatgtagatactctcaaactggccgttcccagcctgatctacacgctccagaacaatctgcagtatgtcgcaatttccaatctcccagcagcaacttttcaggtcacatatcaacttaagatcctgaccacagcgctgttctcggtgctcatgcttaacaggtccctcagccggctgcagtgggccagccttttactactctttaccggagtagccatcgtgcaggctcagcaggccggaggcggaggcccacgccctctggaccagaaccctggggctggccttgccgctgtagttgcgtcttgcttgtcttctggtttcgcgggagtgtactttgaaaaaatcctaaagggctcttccggatcagtatggctgagaaatctacaactggggctattcggcaccgccttaggattggtcggcctgtggtgggcagaagggacagcggtcgctacacgaggatttttttttggatacacaccagcagtatggggcgtagtcctcaatcaggcattcggtggattattggttgccgttgtggttaaatacgccgacaacatactgaaggggttcgctacctcattgtctatcgtactgtccactgtcgcctccatacgactgttcggtttccacgtggacccgctgtttgccctgggcgctgggcttgtgatcggtgccgtgtacttgtactcattacccagaggagctgctaaggcaattgcaagcgcatcagcctcagcaagtggcccttgtgtgcatcaacagcctcccggacagcctccccctcctcagctctcctctcatcggggagacctcatcaccgaaccatttttgcccaagtccgtactggtaaaatag

SEQ ID NO: 241462 - DNA, 729 bp, synthetic construct
  misc_feature 1..729: note = Description of Artificial Sequence: Synthetic coding sequence
  source 1..729: mol_type = other DNA
atggcagccgtcggtgctggcggtagcaccgcggctcctgggccaggggcagtgtctgcaggcgcactggagccaggaacagccagcgctgcacaccgaagactgaagtacatttcgctggccgtgcttgtcgtccagaatgcgagcctaatcctgagcatacgctacgcacggactctgcctggcgatcggttctttgcgactacagctgtcgtgatggccgaagtccttaaggggctaacctgcctcctcctgctgttcgcccagaaaagagggaacgtgaagcatctggtactgttcctccacgaagccgtcctggtgcaatatgtggatacactcaaactcgctgttcctagcttgatttacacactccagaacaatctccagtacgtcgcgataagcaatctgccagcggctacttttcaaccaagtcctcggtgttcccaaagtcactccctgtgcctgtgcctgaggctgcgcgcactaagaagtcctgctgcttccagagctgcaacgaccactgccgctgtatttcctccttggcgtccccaccacggagctctgagcgccaaagtctccgcaggcgaggtccgtgccggatccaatggaggtacccagggtcggggaaccggggtggaaggtgtggggcacctgcaggaccctagcagacatccgcctggacccggaagctcgggcttcggtcggtggagctttctgcctgggcattag

SEQ ID NO: 241463 - DNA, 531 bp, synthetic construct
  misc_feature 1..531: note = Description of Artificial Sequence: Synthetic coding sequence
  source 1..531: mol_type = other DNA
atggcagaggtgctgaagggcctaacatgcctcttgttgctattcgcccagaagagggggaacgtgaaacatctggtcctttttctccatgaggctgtgctggtgcagtacgtggataccttgaagcttgccgttcccagcctgatctacactctccagaataatcttcagtacgtggccatttctaatctccctgcagccacttttcaggtaacctatcagctgaaaatactgacaacagccttgttttccgttctcatgcttaataggtctctcagccgactgcagtgggcgagtctgcttctgctcttcactggagtggctattgtacaggctcagcaggcaggtggtggaggtccacgacccctggaccaaaatccaggcgcaggactggcggcagtggtggcaagttgtctgtcaagcggcttcgcaggcgtgtatttcgagaaaattctgaagggtagcagcggatccgtgtggctcaggaatctgcagctggggcttttcgggaccgcccttgggcttgtgtag

SEQ ID NO: 241464 - DNA, 1266 bp, synthetic construct
  misc_feature 1..1266: note = Description of Artificial Sequence: Synthetic coding sequence
  source 1..1266: mol_type = other DNA
atggctgctgttggggctggcggatctacggctgctccagggccaggagctgtcagcgccggagctcttgagcctgggacagcctcagcggaacttctcctgacatgggaggaagccgaggctagaggccaaggcctcccacagcctttgccagatacaagcgttcggatccctgcgcatcgaaggttaaagtatatttccttagcagtcctagttgttcagaacgctagcctgatcctatccatccggtacgcccgtacgctgcccggagacagatttttcgctacgactgccgtcgtgatggccgaggtgcttaaaggcctcacctgcctcctgctcctgttcgcccaaaaaaggggtaacgtgaagcacctggtgctttttctccatgaagcagttcttgtacagtacgttgataccttgaagcttgctgtcccgagccttatatatacgctgcagaataatctgcagtatgtcgctatctccaacctcccagccgcaacctttcaagtgacgtatcagctcaaaatcttaacgaccgcgctgttcagcgtgttgatgttgaacagatctcttagtaggctgcagtgggcctcacttttgctgctgttcacgggagtagcgatagtccaggctcaacaagccggaggtggcggacccaggccactcgatcagaacccaggtgctggactggcagcagtggtggcctcttgtctgagtagcggtttcgcgggagtgtatttcgaaaagattctcaaaggcagtagcggcagcgtgtggctacgaaacctgcagctggggctgtttggcacagcactcgggctcgtgggattgtggtgggcagagggaacagctgtagccacacggggtttcttcttcggatatactcctgctgtttggggcgttgtgctgaaccaggcctttggcggactgctagtggcggtcgttgtgaagtatgcggacaacatcctcaaaggattcgctacatccctgtctatcgttctgtctaccgtcgctagtatcagattgttcggtttccacgtggatccattattcgccctaggcgctggattggtgatcggagccgtgtatttgtacagcttgcctagaggtgccgctaaggctatcgcctccgctagtgcaagcgccagcggcccttgcgttcaccagcagccgcctggccagcctccaccaccacagctgagctcccataggggcgacctcatcactgagccattcctgccgaagtctgtgctggtgaaatag

SEQ ID NO: 241465 - DNA, 1068 bp, synthetic construct
  misc_feature 1..1068: note = Description of Artificial Sequence: Synthetic coding sequence
  source 1..1068: mol_type = other DNA
atggccgaggtgcataggagacaacatgcccgtgttaaaggggaagccccagcaaagagcagtacactccgcgacgaggaggagctcggtatggcctcagccgagacgctaacagtgtttctgaaactgttagctgccggattctatggcgtgagttctttcctgatcgtggtggttaataaaagcgtactgacaaactataggtttccctcgagcctgtgcgttggtttgggccagatggtagccaccgtggctgttctctgggttgggaaagccctgagagtcgtgaaatttccagatctggataggaatgttccaagaaagacctttccactacctctgctgtacttcggaaatcagataacgggcctcttttccaccaaaaagttaaaccttcccatgtttaccgttttgagaaggttttcgatactgttcactatgttcgctgaaggagttctgctgaagaagacatttagctgggggataaagatgacggtgtttgctatgatcatcggagcttttgtggcggctagcagcgatctcgccttcgacctagaaggctacgcctttattttaatcaatgatgtcctcacagccgcaaatggcgcatatgtgaaacagaagctggattcgaaagagctggggaagtacggacttctgtactataatgcgctgttcatgatcttgccaactttagccatcgcctactttactggggatgctcagaaggcggttgagtttgaaggctgggccgacactctgttcctgctgcaatttacccttagctgcgtcatgggctttatcctgatgtacgctacagtgctgtgtacacagtacaattcagccttaacgactaccattgtaggctgcattaagaacattttaatcacatacatcggaatggtatttggcggagattacatctttacctggaccaacttcatcgggctcaatatctcaattgctgggagtctggtctacagctatatcactttcactgaggagcagcttagcaagcagagcgaggccaacaacaagctggacattaagggaaaaggcgcagtgtag

SEQ ID NO: 241466 - DNA, 783 bp, synthetic construct
  misc_feature 1..783: note = Description of Artificial Sequence: Synthetic coding sequence
  source 1..783: mol_type = other DNA
atggttgctacagttgcagtcttgtgggtgggaaaagccctccgggtggtgaagtttccggacctggataggaacgtgcctcgaaagacttttcccctcccactcctttacttcggaaatcagattacaggattgttttccactaaaaaattgaacctaccaatgtttacagtcctacgtcgcttttcaatccttttcacgatgtttgcagagggagtgctactcaaaaaaactttttcctggggcataaaaatgactgtctttgcgatgattatcggagctttcgtggcagccagttcagatttagcgtttgatcttgagggttacgccttcatcctgatcaacgatgtgctgactgccgcaaacggtgcctacgtgaagcagaaactagatagtaaggagttaggtaagtatggactgttatattacaacgcgctgtttatgatcttaccgaccctggctatcgcctacttcaccggcgatgctcagaaagcagtggagtttgaaggctgggccgacactctgtttctcttgcagttcacgctgagctgcgttatgggcttcatcctcatgtatgctaccgtcctgtgtacgcagtataattctgctctcacgacaactattgtgggatgcattaagaacattctcataacatacattggaatggtattcggcggtgattacatattcacatggaccaattttataggcctgaacatctcatgcatttgccaccgaggcctgtgcgagctacgggtgggctcagctaccttgggcggatag

SEQ ID NO: 241467 - DNA, 1104 bp, synthetic construct
  misc_feature 1..1104: note = Description of Artificial Sequence: Synthetic coding sequence
  source 1..1104: mol_type = other DNA
atgagttcaaggagcgtcctgagtcccgtggttgggactgatgcacctgaccagcacctggaactcaagaaaccacaagagttgaaggaaatggagcgtctccccctcgcaaacgaagataagacaatgtttgctaacctgaagtacgtgtctttagggattcttgttttccagacaacgtccctcgtcctgaccatgagatacagccgaaccttgaaagaggagggccctaggtaccttagcagcacagcggtcgtcgtggcggagctgctcaagatcatggcctgcattcttctcgtctataaggattcaaagtgcagcctgcgcgctttgaatagggttctccatgacgaaattttaaacaaacccatggagacgctgaaacttgccattccatccggaatttacaccctgcagaacaacctcttgtacgtggccctgtccaatctggatgccgctacataccaggtcacctatcagctaaagatcctgaccaccgccctgttctcagtttctatgttgagcaaaaagcttggtgtataccagtggctgtccctcgtgatcctgatgacaggcgtggcatttgtgcagtggccatctgacagccaactggactcgaaagaactctccgccggaagtcagtttgtgggccttatggcggttctgaccgcatgctttagcagcggatttgcgggagtgtatttcgagaagattctgaaggagaccaaacaatccgtttggatcagaaacattcagctgggattcttcggatctatcttcggccttatgggcgtgtacatatatgacggcgaattggtgtctaagaacgggttcttccagggttataatagattaacatggatcgtggtggtcctacaagcactcggaggcctcgtaattgcagccgtcataaagtatgcagacaatattctaaagggtttcgctacatctctgtcgataatcctctccacccttatctcttacttctggttgcaggacttcgtcccaacgtcagtcttctttctgggcgcaatcctcgtcattaccgcgaccttcttatacggctacgacccaaaacctgctgggaatcctaccaaagcctag

SEQ ID NO: 241468 - DNA, 978 bp, synthetic construct
  misc_feature 1..978: note = Description of Artificial Sequence: Synthetic coding sequence
  source 1..978: mol_type = other DNA
atgttcgccaatttaaaatacgtatccctcggtatactggtttttcagactacctcactagtactgacaatgaggtactcccgaactcttaaggaggagggcccacgttacctctcgtcaacggctgttgttgttgcggaattactgaagatcatggcctgcatcctgctggtgtataaggactcaaagtgctctctcagggccctcaaccgagtcctgcacgacgagatcctgaacaaacccatggagacgctcaagcttgccataccctccgggatctacaccttgcaaaataacttactgtatgtggcacttagtaatctggatgccgctacataccaggtcacatatcagctcaaaatcctgaccaccgccctcttttcggtttcgatgttgtctaaaaaacttggcgtgtaccaatggctgagcctcgtgatcctcatgaccggagtggctttcgtgcaatggccatcagactcccagcttgatagcaaggaattgtctgccggaagccaattcgtagggttgatggctgtccttacggcctgtttcagtagtgggtttgccggagtttactttgagaagatccttaaggaaaccaagcagagcgtctggattaggaatattcagttgggatttttcgggtcgatttttggactaatgggagtgtacatttatgatggagaactggtatccaaaaatgggttctttcaggggtacaacagactgacctggattgtggtcgtcttgcaagcactcggagggctcgtaattgccgcagttataaaatatgcagataacatcctgaagggatttgcaacgtcactgtctatcattctgtccacacttataagctatttttggcttcaggatttcgtgccaacttccgttttctttctgggtgccatcctcgttatcaccgccaccttcttgtatggatatgacccgaaacccgcaggaaacccaacaaaagcttag

SEQ ID NO: 241469 - DNA, 675 bp, synthetic construct
  misc_feature 1..675: note = Description of Artificial Sequence: Synthetic coding sequence
  source 1..675: mol_type = other DNA
atgttcgccaatttgaagtacgtgtcgctcggaattctggtgtttcagaccacctccttggtattaactatgagatattccagaacgctgaaagaagaagggcctcgctatctgagttctactgccgtggtcgtggcggagttgctcaaaatcatggcttgtatccttctggtatacaaagacagcaagtgctctctgagggctcttaatagagtattgcacgacgaaattctcaataagcccatggagacactcaagctcgccatcccatccgggatttacaccttgcagaacaatcttctctatgtggccttaagcaaccttgacgccgctacctaccaggtgacctaccaactgaaaatactgacaaccgcgttgttcagcgtctctatgttatccaaaaaactcggcgtctatcaatggctgtccttagtcatcttgatgaccggagtggcgtttgtccagtggccaagcgacagtcagctcgactccaaggaactatccgcagggagtcagtttgtggggcttatggctgtgctgactgcatgtttctcctccggattcgctggggtgtatttcgagaagatactgaaggagaccaaacagtccgtgtggatccgcaatattcagctcgggttttttgggagcatcttcggacttatgggggtgtattag

SEQ ID NO: 241470 - DNA, 978 bp, synthetic construct
  misc_feature 1..978: note = Description of Artificial Sequence: Synthetic coding sequence
  source 1..978: mol_type = other DNA
atgttcgcaaaccttaaatacgtgtccctcggaatattagtcttccagactactagtctagtgttaaccatgaggtattcccgaaccctcaaggaagaaggccctcgctatttgtccagtaccgctgtggtcgtcgcggagctattaaagatcatggcttgcatcttgctggtatacaaagattcgaaatgttctctgcgagcacttaaccgtgttcttcatgatgaaatcctgaacaagccaatggagaccttgaagctggcaatccccagtggaatctacaccctgcaaaacaacttgttgtatgttgctctttccaacctggatgccgctacataccaagtgacttatcagcttaagatcctcaccactgcactgttcagtgttagtatgctgtccaagaagctgggcgtctatcagtggctctccctggtcatcctgatgaccggagtggcatttgtccaatggccgtcagattcccagctagactcgaaggaactctccgccggttcccagtttgtgggcctgatggcagtgctaaccgcttgcttctcatccggtttcgctggcgtgtactttgagaagattctcaaggagacaaagcagagtgtgtggattcgcaacattcagctgggctttttcggctctatttttggcctgatgggtgtctacatatatgatggggagctagtgagcaagaacggtttcttccagggctacaacagactgacttggattgtggttgtgttacaggccctcggcggactcgtaatagccgcagtgatcaaatacgccgacaatattctaaagggtttcgccacatctctatctatcattctcagcactctgatttcctatttctggctgcaggactttgttcctacatctgtgttcttcctgggcgcaattctcgtgataacggctacattcctgtatggttacgatccaaaacccgcaggcaacccaactaaagcctag

SEQ ID NO: 241471 - DNA, 663 bp, synthetic construct
  misc_feature 1..663: note = Description of Artificial Sequence: Synthetic coding sequence
  source 1..663: mol_type = other DNA
atgtttgccaatctgaagtacgtgtccctcggaatcctcgttttccaaacaacctccctggtgctgactatgcggtactctagaacccttaaggaggaaggccctcgctatttgtcttcaacagcggtggtggtggctgagctccttaaaatcatggcatgcatcctcctcgtctacaaagatagcaagtgtagtttaagagctcttaacagagtgctccacgacgagattcttaacaaacccatggagacactgaagttggcaatcccatctgggatctatactctgcaaaataacttgctttacgtggcccttagcaatctcgacgccgctacataccaggtgacctaccaactcaagatattaactaccgcactgtttagcgtgtcaatgctgtccaagaagctgggagtttatcagtggttgtctttagtcattttgatgaccggcgttgcgttcgtgcaatggcctagtgactctcagctggactcaaaggaactgtcggccggaagtcagtttgtgggactcatggccgtcttgaccgcgtgtttttctagcggcttcgctggggtttatttcgaaaaaatcttaaaggaaaccaaacagtcagtgtggatccggaacatccagctggtttctttcagcctggaaccctctctgtag

SEQ ID NO: 241472 - DNA, 258 bp, synthetic construct
  misc_feature 1..258: note = Description of Artificial Sequence: Synthetic coding sequence
  source 1..258: mol_type = other DNA
atgttcgcaaatctcaagtacgtcagcttgggaatcttggtctttcaaactacatctcttgtcttgactatgagatatagccgcaccctgaaggaggagggcccaagatacctttcaagcacagccgtggtggtagctgaactgcttaagataatggcctgcatcctcctggtgtacaaggactcaaagtgtagcttaagggccttgaacagagtactccatgacgagattctaaataagccgatggagacattgtag

SEQ ID NO: 241473 - DNA, 1104 bp, synthetic construct
  misc_feature 1..1104: note = Description of Artificial Sequence: Synthetic coding sequence
  source 1..1104: mol_type = other DNA
atgtccagcagaagcgtgctgtctcctgtggtagggactgacgccccagatcagcacctggagctgaaaaagcctcaggagctgaaagagatggaacgcctgcctctggcgaacgaggacaagaccatgttcgctaatctgaaatacgtgtccttagggattcttgttttccagaccacctccctggtgctgaccatgcgttattcccgcactctcaaggaggaaggccctcggtacctttcatcaacggccgtggttgtggccgaacttctgaagatcatggcttgtattctattggtttacaaggactccaaatgctccctgagagccttgaacagagtgctgcatgacgaaatattgaataagcccatggagacactgaagctggctatcccgagtggcatctataccttgcaaaacaatctgttgtatgttgcgcttagcaacctggatgcggctacctatcaagtaacctatcagttaaagatcctgacaacagcactgtttagtgtctccatgctgagcaagaaactgggggtataccagtggctttcactggtcatcctgatgaccggagttgcattcgtgcagtggccgagtgatagtcagctggacagcaaggagctttcagcaggaagccaatttgtgggcttaatggccgtgttgactgcttgtttttccagcggcttcgcaggcgtgtattttgagaaaatcttaaaagagactaaacagagtgtgtggatcagaaatatccagctggggtttttcggttcaatatttgggctgatgggcgtttacatctacgacggcgagctcgttagcaaaaatggattcttccagggctacaacagattgacttggattgtcgttgtgctgcaagcactcggcggactcgtgatcgccgcagtgatcaagtatgctgataatatcctgaaaggattcgccaccagtctctccatcatcctgtccaccctaattagctatttttggctccaggactttgtgcctacatccgtgttcttcttaggagcgatcttagttatcacagccacgtttctgtatggatacgacccaaaacccgctggaaatcctactaaggcctag

SEQ ID NO: 241474 - DNA, 969 bp, synthetic construct
  misc_feature 1..969: note = Description of Artificial Sequence: Synthetic coding sequence
  source 1..969: mol_type = other DNA
atggcctcaagctcctcattggtacctgaccgtctgcgtctccccttatgttttctgggggtcttcgtctgctatttctactatggaatcttgcaagaaaaaataacaagaggcaagtatggcgagggtgcaaagcaagagacctttacctttgctcttacattagtgtttatacagtgtgtaataaatgctgtctttgcgaagatactgatacagttctttgacacggctcgcgtggatagaacaaggtcctggctgtatgcagcatgcagcatctcttaccttggcgcaatggtttcatcaaattcggctcttcagtttgtcaactatccaacacaggtgctggggaagagttgcaagcccatccccgtaatgctactaggagtgactcttctaaagaagaagtatcccctggccaagtatctgtgtgttcttctgatcgtcgctggagttgccctctttatgtataaacctaagaaggtcgtgggcatcgaggaacataccgtggggtacggagagctgctgctgctgctcagcctcacattggacgggctcaccggtgtatcccaggaccacatgcgggcacactatcagacggggtctaatcacatgatgttaaacattaacttatggtcaacactcctgcttggaatggggatcttgtttactggagaactgtgggaattcctatcattcgccgagcgctaccctgccattatctacaacattcttctgttcgggctcacttccgctttgggtcagtcttttatttttatgactgtcgtatacttcgggcctctgacgtgttcaatcattacgaccacacgaaaattttttacaattctggcctctgtgatattgtttgccaatcccatttcccctatgcaatgggtgggtacagtgctcgtcttccttgggttgggcctggacgcaaaattcggaaagggcgcaaagaagacaagccattag

SEQ ID NO: 241475 - DNA, 450 bp, synthetic construct
  misc_feature 1..450: note = Description of Artificial Sequence: Synthetic coding sequence
  source 1..450: mol_type = other DNA
cctcaaagctgcctaatcggaaagattagtcgagctcgggaccagtctaggggctgtcgatttccctggcccagcggcatggaacctcgcacaagggtcgggcctcttctggtcttacccgatgcttgcaagcaaccaatcaggcccagaccttggtgtcactccaggaatacagtctccagctgtctgggaactagaggcaagtacggcgaaggagccaagcaggaaacattcacctttgctctgactttagtgttcatacagtgcgtgatcaacgcggtgttcgccaagatatggtggattgtgccaggggctggaagcatgctgcccgttttgtccccaatttgggtgccatggagtcccgctatccagcactatagcctttctaccacccagctgcggtcactggtgaatcctgcatcgcagagccaaagctgcagcctcggctag

SEQ ID NO: 241476 - DNA, 1080 bp, synthetic construct
  misc_feature 1..1080: note = Description of Artificial Sequence: Synthetic coding sequence
  source 1..1080: mol_type = other DNA
atgagacccctgccacccgtcggagacgtccggctggaactcagcccgcctcctcctttattaccagtccccgtggttagcgggtccccagtgggttcatctggccgacttatggctagttcgtcttcactcgtcccagaccgccttaggctgcccctttgttttttgggtgtgttcgtctgctatttttattacggcattctccaagagaagatcacaagaggcaagtatggagagggtgctaaacaggagacgtttaccttcgcactgaccttagtctttatccagtgcgtcatcaatgctgtcttcgcaaagattctgattcagttctttgacacagccagagtagataggactagaagttggctatacgccgcttgctcaatcagctatctgggcgcaatggtgtcctccaattccgccctgcagtttgtgaactaccctacacaagtgcttggcaaaagttgcaaaccaatcccagtcatgctcctgggcgtgactctgttgaagaagaagtaccccctggccaagtatctctgtgtacttttaatagtggcaggagttgcgctgttcatgtacaagcccaagaaggttgtagggatcgaggagcacactgtcggttacggcgagctgctgttactcttatccctgaccctcgatggcctgaccggagtgagccaggatcacatgcgggcacactatcagacgggctccaatcatatgatgcttaacatcaacctttggtcaacgctgctgctggggatggggatcctttttaccggcgaactttgggaattcctctctttcgccgagagatatcctgccattatctacaatattctcttgttcgggctgacctccgctcttgggcagtcatttatcttcatgacagtcgtttactttggtcctctgacctgctctataattaccactacgcggaagtttttcactatcttagcaagcgtgatcctgttcgcaaaccctatctctcctatgcaatgggtaggtaccgtcttggtgtttttgggactcggactggacgccaagtttgggaagggggctaaaaagacaagccattag

SEQ ID NO: 241477 - DNA, 720 bp, synthetic construct
  misc_feature 1..720: note = Description of Artificial Sequence: Synthetic coding sequence
  source 1..720: mol_type = other DNA
atggcatccagttctagcctggttcccgataggttaaggctgcccctctgtttcttgggggtcttcgtctgttacttctactatggtatcctgcaggaaaagatcacacgcggtaagtatggggagggcgcaaaacaggaaaccttcaccttcgccctgaccttggtgtttatccagtgcgtgatcaatgcggtctttgccaagattctgatccagttcttcgacactgctcgagtagatcgcaccaggtcctggttgtacgctgcctgttcaatatcgtatctgggggcaatggtctcatcgaacagtgctctgcagtttgtgaactacccgacgcaggtgcttggaaaaagttgcaagccaattcctgttatgcttctgggagttactttactcaaaaagaaatatcctctcgccaagtacctgtgcgtgcttctgatcgtggccggagttgctctgttcatgtacaaaccaaaaaaagtggtgggtattgaggagcacacagttgggtacggcgagctgctgctcctcctgtctctgactctcgacggactcaccggtgtgtcacaggaccacatgcgcgctcactatcagactgggagcaatcacatgatgctgaacattaacctgtggtccacattgttgctgggcatgggtgagagtcagttttgctgcagttcccatgtgtcccctgaggggagactgccatcctctttctag

SEQ ID NO: 241478 - DNA, 597 bp, synthetic construct
  misc_feature 1..597: note = Description of Artificial Sequence: Synthetic coding sequence
  source 1..597: mol_type = other DNA
atgctcttgggagtcacactactgaagaagaagtatccgcttgcgaaatatctttgtgtgctgctcattgtcgccggagtcgccctctttatgtacaagcctaagaaagtcgtgggtattgaggagcacaccgtgggttacggagagttattgctgctgctcagtctgacactggatggcctcaccggtgtaagccaagaccacatgagagcacactaccagacaggctccaaccacatgatgctcaatattaatctctggagcactttactgctgggcatgggaatactgttcactggagaactgtgggagttcctgagcttcgccgagcggtaccctgccattatttacaacattctcctctttggactaacatctgcactgggccaatctttcatcttcatgaccgtggtgtattttggtccccttacctgctctattattactaccacgagaaagttctttaccatcctggcatctgtgatactgtttgctaatcctatcagcccgatgcaatgggtggggacggtcctggtatttttgggactgggacttgacgctaagtttggtaaaggagccaagaaaacctcccattag

SEQ ID NO: 241479 - DNA, 570 bp, synthetic construct
  misc_feature 1..570: note = Description of Artificial Sequence: Synthetic coding sequence
  source 1..570: mol_type = other DNA
atgctactgggcgtgaccctgttaaagaagaaatatcctctggcaaaatacctctgtgttttactgatcgtcgccggtgtggccttatttatgtataagcccaagaaagtggtgggcattgaagagcacacagtcggatacggcgagctgctgcttctgcttagtctgacactggacggtttgaccggtgtgagccaggatcacatgagagcacactaccagaccggttccaaccacatgatgctgaacattaacctttggtctactttattgctcgggatgggaatcctgttcactggagagctatgggagtttctgagtttcgcagaacgctaccccgctatcatatacaatatacttctgtttgggctgacctccgccctaggtcagagtttcatatttatgaccgtggtctactttggtcccctcacatgttccataattactactactcggaaattcttcacaattctggctagtgtgattctgtttgcaaatcctatcagtcccatgcagtgggtgggaaccgtcttagtcttcctggccatgggatcttgttgcgtggcgtag

SEQ ID NO: 241480 - DNA, 1179 bp, synthetic construct
  misc_feature 1..1179: note = Description of Artificial Sequence: Synthetic coding sequence
  source 1..1179: mol_type = other DNA
atggatgccaggtggtgggccgtagtggtcttggccgcattccccagtttaggcgcagggggagagacacccgaggctccaccagaatcttggactcagctctggttttttcgctttgtagtgaacgccgctggctacgcctcattcatggtcccaggctatctgctggtgcaatactttcgccgaaagaactacctggaaactggcagagggctctgctttcccctggtgaaggcgtgtgttttcggcaacgagccaaaggcttccgatgaagttcctctggcgccacggaccgaggcagccgaaaccacacccatgtggcaggctcttaaacttttgttctgcgccactggcttgcaagtgtcatatctgacctggggcgtcctgcaggagcgggtcatgacaaggagctatggagccaccgccacttctccaggggagaggttcacggactcccaattcctggtgctcatgaatagggtgctcgcgcttatcgttgccggactctcctgcgttttatgcaagcagccacggcatggcgcaccaatgtatagatactccttcgcatcactctcaaatgttctgtcatcttggtgccagtacgaggccctcaagtttgtgtccttcccaactcaggttcttgcgaaggcgtccaaggtaattccagtgatgctcatgggcaagctggtgagcagaagaagctacgagcattgggagtatctgactgccaccctgatctccatcggggtgtccatgttcctgctttcctctggccctgaaccacggtcaagtcctgccacaacgctctccggcctattcacagtcggcagcctactggaacagggagcgctgctcgaagggaccaggtttatggggcgacacagcgaattcgcggctcacgcgctgctgctatctatctgctcagcctgcggacagctgttcatcttttatacgatcgggcagtttggagccgctgtcttcaccattataatgactctgagacaggcgttcgccattctcttgagctgtctcctgtatggccacaccgtgactgttgtcggaggtcttggcgtcgccgtggtcttcgctgccctgctcctccgggtctacgcacgtggcaggcttaaacagagaggtaagaaggctgtacctgttgagtctcctgttcagaaggtgtag

SEQ ID NO: 241481 - DNA, 1299 bp, synthetic construct
  misc_feature 1..1299: note = Description of Artificial Sequence: Synthetic coding sequence
  source 1..1299: mol_type = other DNA
atggacgctcggtggtgggctgtggttgtactggccgcttttccctcactgggggcaggcggagagacccccgaagcaccgcctgagagttggacacagctttggttcttccgttttgtggtaaacgccgctggctatgcctccttcatggtccccggatacctgctcgtccagtatttccgcagaaaaaattacctggaaacagggagggggctgtgcttccctctggtgaaggcctgtgtgtttgggaacgagcccaaggctagcgacgaggtaccacttgccccacggacggaagcagccgagacgactcctatgtggcaagctcttaaactgttgttttgtgcaacaggccttcaggtcagctacctcacttggggagtgctgcaagagagggtgatgacacggtcttacggtgcgacagccacgagcccaggcgaaaggtttaccgactcacagttcttggtgctgatgaaccgcgtgctggccctgattgtagcaggcctcagctgcgtgctgtgcaaacagcctcgtcatggggctcccatgtaccgatatagttttgccagtctaagtaacgttttgagcagctggtgtcagtatgaggccctgaaattcgtaagcttccccacccaggttctggctaaggccagtaaagtaattccagtgatgctcatgggcaaacttgtatcaaggaggagctatgagcactgggaatatctcaccgccaccctcattagtattggagtctcaatgttcctgctctcatccggacccgaaccacgcagttcaccagctaccaccctctctggcctcattctactggcaggatatattgcctttgacagtttcacaagtaattggcaggacgcgttgtttgcttataagatgtcaagcgttcagatgatgttcggtgtaaacttctttagttgcctgtttactgttggctccctgctggaacagggggcattactcgaagggacccggttcatggggaggcactcagagttcgctgcccacgcgctgttattgtcaatttgttccgcctgcggccagttgttcattttctatacaattggacagtttggggcagcagtgtttaccatcataatgacactccgtcaagcttttgcaatcctcctttcttgtctgctatatggtcatactgtcacagtggtgggagggcttggggtggcagtggtgtttgccgctctgctgctgcgcgtctatgccagagggagattaaagcaaagaggcaaaaaagctgtaccagttgaatctcctgttcagaaagtgtag

SEQ ID NO: 241482 - DNA, 900 bp, synthetic construct
  misc_feature 1..900: note = Description of Artificial Sequence: Synthetic coding sequence
  source 1..900: mol_type = other DNA
atgacgcggtcctatggggcaacagcgaccagcccaggtgaaagattcaccgactctcagttcctggtgctaatgaaccgcgtgctcgcactgatcgtcgccggattatcatgcgtattatgcaaacaacccagacacggggcacccatgtaccgctattcctttgctagcttatcaaacgtactgtcctcctggtgtcagtatgaggcactgaaattcgtctcctttccaactcaggttcttgcaaaggcgagcaaggtgatccctgtcatgctgatgggcaagttggttagtaggagatcttacgagcattgggagtaccttaccgccaccctcatctcaattggtgtgtccatgttcttgctctcctctggccctgaacctcgtagctctccagcaactacgctcagcggcctgatactgctagcgggatatatcgcgttcgactcttttacatctaactggcaggacgcactttttgcctataaaatgtcaagcgtccaaatgatgttcggcgtgaattttttttcatgtctgttcactgtgggttcgctgctggaacagggggctcttctggaaggaacccgcttcatgggaaggcattcggaatttgccgctcacgccttgctcctcagcatctgtagcgcttgcggccaactcttcatcttttatacaataggccagtttggagccgctgtgtttacaattataatgacactccgacaggcatttgccatcttgttgtcatgcctcctgtacggccatacggtgaccgtggttgggggattaggcgttgctgtggtgtttgcggctttgttactgcgcgtttacgccagaggcaggctcaaacaaagaggcaagaaggccgtacctgtagagtctcccgtgcaaaaggtttag

SEQ ID NO: 241483 - DNA, 1020 bp, synthetic construct
  misc_feature 1..1020: note = Description of Artificial Sequence: Synthetic coding sequence
  source 1..1020: mol_type = other DNA
atgctcctggccatgcctgcgctgtggtacctcgcgacttcctggtgttctacttcaggcggaagaaccacttggcgtcccgtctcctaccttacttggggcgttctgcaggaacgcgtcatgactcgctcctacggtgctactgccacaagccctggggaacgtttcacagatagtcagtttctagtcctgatgaacagggttctcgccctgattgttgcagggctgagctgtgtgctgtgcaaacagcctaggcacggtgcccctatgtaccgttacagtttcgccagcctctctaatgttttaagcagctggtgtcagtatgaagctctgaagtttgtctcttttcctacgcaagtactggccaaagcttccaaagttatacctgtgatgctgatgggaaaactggtgagtcgtcggagctacgaacattgggagtacctcaccgcaacactgatttcaattggcgttagtatgttcttattgtcttccggaccagaaccacggtccagccctgctaccacacttagcgggctcatactgttggcaggatatattgcattcgactcatttacgtcaaactggcaagacgcgctcttcgcctacaagatgagtagcgtacagatgatgtttggcgttaactttttcagttgtctgttcaccgtcgggagtctgctcgaacagggtgccctcctagaggggaccaggttcatgggacggcactccgagtttgccgctcatgcgctgctcctgagcatctgctcagcatgcgggcagctgttcatcttttacacaatagggcagttcggagccgcagtgtttacgatcattatgaccctgcgtcaggcgttcgcaatcttgttgtcatgtttgctgtacggccatactgtgacagtcgtcggcggactgggggtggccgtggtgtttgctgctctgctgctccgggtttatgcccgaggccgtctgaaacagagggggaaaaaggctgtgcccgtggaatccccagttcagaaagtatag

SEQ ID NO: 241484 - DNA, 852 bp, synthetic construct
  misc_feature 1..852: note = Description of Artificial Sequence: Synthetic coding sequence
  source 1..852: mol_type = other DNA
atggacctgacgcagcaggcgaaggacattcaaaacatcaccgttcaggagacgaacaagaacaactcggagtctattgaatgctccaagatcaccatggacctcaagtttaacaatagccgtaaatacatctcaattaccgttccaagtaaaacacaaactatgagtccgcacatcaaatctgtggatgacgtcgtcgtgcttggcatgaatcttagcaaatttaacaaactcacacagttcttcatatgcgttgctggcgtttttgtgttctacctgatctatgggtatctccaggagctgatcttttctgtcgaaggcttcaagtcttgcgggtggtatttgacacttgtccagtttgccttctactcgatcttcggcctgattgagctgcagttgattcaggacaaaagaagacgcattccaggcaagacatacatgattatcgcgttcctaaccgtcggtactatgggcctttctaacacctcactgggctacttgaattaccctactcaggtcatcttcaaatgttgtaaactcatccccgtgatgttgggcggagtattcattcaaggaaaaagatacaatgtggccgatgtgagtgccgcaatttgcatgagcctaggtctaatatggttcacgttagccgattcgaccacagcaccaaattttaatctgactggggtggtgctgatttccctggctttgtgtgctgatgccgttattggaaatgttcaagagaaggcaatgaaactgcataatgcctcgaattccgaaatgaatattacaactagctcttactcaggtgtcttcatttttcccaacaagctgaagatcccactagttctgtag

SEQ ID NO: 241485 - DNA, 1206 bp, synthetic construct
  misc_feature 1..1206: note = Description of Artificial Sequence: Synthetic coding sequence
  source 1..1206: mol_type = other DNA
atggatcttacccagcaggcaaaggatatacagaatatcaccgttcaggaaacaaataaaaataacagtgagtccattgagtgtagtaagatcacaatggacctcaaatttaacaattctaggaagtacatttcaatcaccgttccttcgaaaactcagaccatgtctccccatatcaaatccgtagacgacgtggtggtcctgggtatgaatctatccaaattcaataaactaacccagttctttatctgtgtcgccggagtgttcgttttttatttaatatacggctacctccaggagctgatcttcagtgttgagggctttaaatcctgtgggtggtatttgaccctggtgcagttcgctttctattctattttcggattaatagaactgcagctcattcaagataagaggcggaggatcccgggtaagacatatatgataattgcctttctgacggttgggaccatgggactgagcaataccagcctgggctatctgaattaccccacccaggtcattttcaaatgctgcaaactcattcctgtcatgcttgggggagtgtttattcaaggaaagcgctacaatgtcgcagacgtatccgcagcaatttgtatgtcactaggtctgatttggtttacactggcggattccactacagcccctaacttcaacctgactggcgtcgtcctgattagcttggcactttgtgcagatgcagtcatcggtaatgtgcaggagaaggcaatgaaattacataacgcgtcaaatagtgagatggttctgtattcgtactccattgggtttgtttacattctgctgggcctaacatgcacatctggcctcggaccagccgtgacattctgcgccaagaatccagtccgcacatacggatacgcatttctgttttctcttaccgggtacttcggcatctcttttgtactcgccctgattaagattttcggggcactgatcgccgtaactgtcaccaccggtcgtaaagcaatgaccattgtactcagttttatcttttttgccaagccattcacattccaatacgtctggtccgggctcctggtggtccttgggatctttttaaacgtctactccaagaacatggataagattcggctaccatccctgtacgatctgattaataagagtgtggaggcacgaaagtcacgcacgctggcccagactgtatag

SEQ ID NO: 241486 - DNA, 657 bp, synthetic construct
  misc_feature 1..657: note = Description of Artificial Sequence: Synthetic coding sequence
  source 1..657: mol_type = other DNA
atgctgagactagcccagacccctaggcgtctgcccagcccttttcgcgttacctaccgaccttggggcacccgcgcattcggcgctttccctgtgtttggtacacaaatctcttcgcccccagagaatttggataccgcacacttaccgcatcctgagggtgcctttgaggagtggatgagatctggatggaaaaaaagggatcttactcaacaagcaaaagacatccagaatatcacagttcaagaaaccaataaaaataattcagaatccatagagtgctccaagataaccatggatctgaaatttaataacagccgaaagtacatctcgatcacagtgcccagcaagacgcagacaatgagcccccatattaagtctgttgacgacgtcgtggtgctggggatgaacctgtctaagttcaacaagttgacccaattctttatctgcgtcgctggagtttttgtgttctatctgatctatggatacttgcaggagctaattttctccgttgagggattcaaatcttgcgggtggtatctgacactggtgcagtttgcgttttactctatcttcggtctgatcgagttacagctgattcaagacaagcggcgaaggtatgtggtctgtttttacttcttgatcttcctgtactag

SEQ ID NO: 241487 - DNA, 996 bp, synthetic construct
  misc_feature 1..996: note = Description of Artificial Sequence: Synthetic coding sequence
  source 1..996: mol_type = other DNA
atgcgcccagcactggcggttggcctggtcttcgctggttgctgtagtaacgttatttttctcgagctgctcgccaggaaacacccgggatgtggaaatattgttacatttgcacaattcctgtttattgccgtggaagggttcctctttgaggctgaccttggccgaaagcctcctgctatccctattcgctactacgcgatcatggtgactatgttttttacagtttccgtggtcaacaactacgctcttaatctcaacattgcgatgcctttgcacatgatcttccgttctggctcactcattgctaacatgattctcggaatcatcattctcaagaaaagatactctatctttaaatatacttccattgccctggtgtcggttggcatattcatctgtacattcatgtcagccaagcaggtaacatctcagagctcactttctgagaatgacggctttcaggccttcgtttggtggctgctgggtattggtgcactgaccttcgcactgctgatgtcagcccgaatgggcatctttcaggaaacactctataagcgatttgggaagcacagtaaggaagccctgttctataatcatgcgctgccactgccgggatttgtttttctggcgtcggacatatatgaccatgccgtgctcttcaataagtccgagctgtacgagatccccgttatcggagtcactttgcctattatgtggttttatctcttgatgaacataattacacaatacgtttgtatcagaggggttttcattttgactaccgaatgtgcctcgctgaccgtgaccttggtcgtcaccctccgaaagtttgtgtccctgatctttagcatcttgtacttccaaaatccctttaccctgtggcattggctgggtacattgttcgtcttcattgggaccttgatgtatactgaggtgtggaacaacttgggcactactaaaagtgagccccagaaggacagcaagaaaaactag

SEQ ID NO: 241488 - DNA, 1095 bp, synthetic construct
  misc_feature 1..1095: note = Description of Artificial Sequence: Synthetic coding sequence
  source 1..1095: mol_type = other DNA
atgaacagagcccctttaaagagaagtcggattctgcacatggccctaaccggtgcatccgaccccagcgcagaggccgaggcgaatggcgaaaagccctttctgctccgcgcactgcaaatagccttagtggtcagtttatactgggtgacttctatcagtatggtgtttctgaataagtaccttctggacagcccaagccttcggttggatacccctatttttgtgacattctatcaatgtttagtgactaccctgttatgtaagggccttagcgcccttgccgcttgctgcccaggcgcagttgatttcccaagccttcgcttggatctaagagttgctaggagcgttcttcctctgtctgttgtgtttatagggatgattacatttaataatttatgcctaaagtatgtgggggtcgcattctacaacgtcggccgaagtctcacgaccgtgtttaacgtgctcctctcctacctcctgttgaagcagaccaccagtttctacgctctactgacttgtggaattataatcgggggattctggctgggtgtggaccaggagggcgcagaaggcacactgtcctggttgggtaccgtgttcggagtgttggcatccctgtgcgttagcttaaatgccatatacactactaaagtccttcccgctgttgatggatctatctggaggttgacattttacaataatgtgaacgcatgcattctctttctgcccttgctgttgctgctgggtgagctccaagccctgagagactttgcacaattagggtccgctcacttttggggtatgatgaccctcggcggactgttcggtttcgctataggatatgttaccgggctccagataaaattcacctcccctctcacccacaacgtctcgggcaccgccaaggcctgcgcgcagaccgtgctggcagtgctgtattacgaggagaccaagagcttcctttggtggacgtctaacatgatggtgttaggcggatcttcagcttatacctgggtgcggggatgggagatgaagaagacccccgaagagccatctcccaaagattcagagaaatccgccatgggggtgtag

SEQ ID NO: 241489 - DNA, 1056 bp, synthetic construct
  misc_feature 1..1056: note = Description of Artificial Sequence: Synthetic coding sequence
  source 1..1056: mol_type = other DNA
atggcactcacaggtgcttctgacccttcagctgaggctgaagcaaacggggagaagcccttcttgctcagggcactccagatagccttggtggtaagcctctactgggtcaccagcataagcatggtcttcctgaacaaatacctactggattcccctagtctccgactcgacactcctatcttcgtcaccttttatcagtgcctcgtaaccactttactctgcaaaggcctgtctgccctggccgcatgctgtccaggcgctgtggacttccctagcctgcgtctggacctccgagtagcgaggagcgtcctgcccctgagcgtggtttttatcggaatgataacgttcaataacttgtgcctgaagtatgttggtgttgctttctataatgtcgggagatccctgaccaccgtatttaatgtattattaagctacctcctactcaaacagaccacaagcttctacgcgttgctgacctgcggcatcatcatcggcggattttggttaggggtagaccaggaaggcgcagaaggcaccctgagttggctgggcactgttttcggcgtgctggcctctctgtgtgtgagcctgaacgcaatttacaccacaaaggtgctacccgcagtagacggttctatatggcgccttaccttctacaataacgtcaatgcttgtatcctgtttttgccactgctactgctcttaggcgaactacaggccttgcgcgactttgcccaattgggatcggcccacttctgggggatgatgacactaggaggactgttcggatttgctatcggttacgtgacaggcttgcaaataaagtttactagccccctgacccacaatgtttccggtaccgctaaggcatgtgctcagaccgtgctggccgtgttgtattacgaagagaccaaaagcttcctctggtggaccagcaatatgatggtcctcgggggtagctccgcctatacgtgggtgcggggatgggaaatgaagaaaacccctgaggagccaagccctaaagatagcgagaagtctgcaatgggtgtctag

SEQ ID NO: 241490 - DNA, 1056 bp, synthetic construct
  misc_feature 1..1056: note = Description of Artificial Sequence: Synthetic coding sequence
  source 1..1056: mol_type = other DNA
atggctctgaccggcgcatctgatccatctgccgaggcagaggcaaatggggagaaaccatttctgctgcgcgcactccagatcgcgctcgtggtctcactttactgggtcacttcaattagtatggtctttttaaataagtacttgctagattcaccatctctccgcctcgatactccgattttcgtgacgttctaccagtgccttgtgacgactctgctttgcaagggactgtctgcactggcagcgtgctgccccggtgctgtggacttcccaagcctaaggcttgacctgcgagtcgctcgtagtgtcttgcccctatcagtggtgtttatcggaatgatcacattcaacaatctgtgtctcaagtatgtgggcgtcgccttttataacgttggacggtcactgacaacggtcttcaatgtcctgcttagctatctcctcctaaagcagacaactagtttctacgcattactgacctgtggtatcattatcgggggattctggctgggagtggaccaggaaggcgcagagggaaccttgtcatggttaggtactgtctttggtgtactggccagtttgtgtgtctctctgaacgccatctataccaccaaagtcctgccggctgtggacgggtctatctggcggctgactttttacaataacgtcaacgcctgtatcctgttcctgccgctgctgctgctgttaggcgaactgcaagcccttagggactttgcacaactgggaagcgctcacttttggggcatgatgaccctaggaggcctgttcggcttcgccattggttatgtaactggcctccagatcaagttcaccagtccgttgacacacaatgtaagtggcaccgctaaagcctgtgctcagaccgtgctagctgttctttactacgaggagacaaagagctttctgtggtggacctctaacatgatggtactcgggggaagtagcgcatatacctgggtgcggggttgggaaatgaaaaagactcctgaggagcccagtccgaaggactcggaaaaatccgctatgggggtctag

SEQ ID NO: 241491 - DNA, 219 bp, synthetic construct
  misc_feature 1..219: note = Description of Artificial Sequence: Synthetic coding sequence
  source 1..219: mol_type = other DNA
atggctttaactggtgcatcagacccttcagccgaggccgaggcgaacggcgagaaaccctttctgctccgggcactgcagatcgccctggttgtgtccttatactgggtaacctctatctctatggtgtttctgaataaatacctgctcgacagccctagcctgagactcgacactcctatctttgtaaccttttatcagtgcctggtgacgacgtag

SEQ ID NO: 241492 - DNA, 498 bp, synthetic construct
  misc_feature 1..498: note = Description of Artificial Sequence: Synthetic coding sequence
  source 1..498: mol_type = other DNA
atggccttaacgggtgccagtgatccatctgcagaagctgaagcaaatggggaaaaacccttccttttgcgagctctccagatagcactagtcgtttcactgtactgggtcaccagtatcagtatggtatttctcaacaagtacctgctggattcaccctctctccgtcttgatacacctatctttgtgacattttaccagtgcttggtaacaacccttctgtgcaaaggactctccgctctggctgcctgttgcccgggtgcagtcgattttccatctttgcggctggacctaagagttgcgaggagtgtgctccctttgtctgtcgtgtttatcggaatgattaccttcaataatttgtgcttaaaatatgtgggagtagccttctacaatgtgggaaggtccctcacaacagtctttaacgtcttactatcctacttactcttgaaacaaactacttccttttacgctctgctgacgtgtggtatcattatctag

SEQ ID NO: 241493 - DNA, 741 bp, synthetic construct
  misc_feature 1..741: note = Description of Artificial Sequence: Synthetic coding sequence
  source 1..741: mol_type = other DNA
atgaaccgggctcctctaaagcgatctcgcattctacatatggctctgaccggcgcaagtgacccctcagccgaggccgaggctaacggagaaaagcccttcttattaagggcgctgcagatagcattggttgtgagcctgtactgggtgacaagcatttcaatggtgttccttaacaaatatctgctcgacagcccctctctgagactagatactcccatcttcgtgacattctatcagtgccttgtgacaaccctactgtgcaagggcctctcggccctggctgcttgctgccccggtgctgtagatttcccctctttgcgtcttgatctccgcgtggcaagaagcgtcctgccccttagtgtcgtgttcattgggatgatcactttcaacaacctctgtttgaagtatgtgggcgtcgcattctacaatgtaggcaggtcattgaccacagttttcaatgtgctgttaagttatcttctgctgaagcagaccaccagtttctacgcactgttgacctgtggtattattattggcggattctggctgggcgtcgatcaagagggagccgagggcacactcagctggcttggaacagtattcggtgttctagcttcattgtgcgttagcctgaatgctatttacacaactaaggtattgccggctgtcgacggttccatttggcgactcacattctacaataatgtgaacgcctgcatactcttcctgcccctgctctag

SEQ ID NO: 241494 - DNA, 1014 bp, synthetic construct
  misc_feature 1..1014: note = Description of Artificial Sequence: Synthetic coding sequence
  source 1..1014: mol_type = other DNA
atgacagcaggaggccaagcagaagcagagggcgctggtggcgaacctggcgcagcgagactgccatcacgcgtggctcgcctgttgagcgctctgttttacgggacttgtagtttcctcatcgtgctcgtgaacaaggctctccttacaacctacggctttccctcaccaatcttcttaggaattgggcaaatggccgctaccatcatgatcttgtatgttagtaagttgaacaaaatcatccatttcccggatttcgacaaaaaaattcccgtgaagctcttccccctgccgctgttgtacgttggtaaccatatctcgggactctctagcacctcaaaactgtcgctgcctatgttcaccgtgctgcggaagttcactattcccctgactctgctgttggagactattatactgggaaaacagtactccctaaacatcattctatctgttttcgctattatcctgggagcttttattgctgctgggagtgatttggcctttaacctggaagggtacatttttgtcttccttaatgatatttttacggccgcaaatggagtctacaccaagcaaaaaatggaccctaaggaactcggtaaatacggggtactgttctataatgcttgcttcatgatcattccaacattgatcatatcagtctctacgggcgatctccagcaagcaacggagtttaaccaatggaagaatgtggtgtttatactacagttcctattgagttgcttcctgggcttcctcctgatgtacagtactgtgttgtgttcctactacaatagtgctctcacaactgccgttgtcggggcaatcaaaaacgtgtctgtcgcctacatcggtatcctgattggcggagactatattttttccctcctcaacttcgtaggactgaacatttgcatggccggtggtctaagatactcctttctgaccctgagttctcagttaaaaccgaagccagtgggggaagaaaacatatgcttagaccttaaaagctag

SEQ ID NO: 241495 - DNA, 492 bp, synthetic construct
  misc_feature 1..492: note = Description of Artificial Sequence: Synthetic coding sequence
  source 1..492: mol_type = other DNA
atgaccgctggcggacaggcagaagccgagggggcaggcggtgagcccggtgccgctcgccttcctagcagggtggccagactcctaagtgccctgttttatggcacttgcagctttcttatcgtgcttgtcaacaaggctttactcactacgtacgggtttccatctcctatttttctcggaatcggccagatggcagccaccattatgatcctctacgtgagtaagttgaataagatcattcattttcccgatttcgataagaagattcccgttaagttatttccactgcccctgctgtacgtcggaaaccatattagtggattgagtagtacttccaaactgagcctcccaatgtttactgtactccgcaaattcacaattcctcttaccctgttgcttgagactataatcctcggaaaacagtactcactgaatattatactctcagtgtttgctatcatcctcggcgctttcatcgccgctggatag

SEQ ID NO: 241496 - DNA, 750 bp, synthetic construct
  misc_feature 1..750: note = Description of Artificial Sequence: Synthetic coding sequence
  source 1..750: mol_type = other DNA
atgacagctggtggacaggccgaggccgagggtgcgggtggcgagcctggcgctgccaggctgccttcacgggtggccagactactttctgccttattctatggaacgtgcagctttctcattgttctggttaacaaagccctgttgacaacatacggatttccaagtcctattttcctggggataggacaaatggctgccactattatgatcttgtacgtgtccaagcttaacaagataatccatttccctgacttcgataaaaaaataccggttaagctctttcctctgcccctgctgtacgtggggaatcatatctctggcctctcatccacaagcaagctatccttaccaatgtttactgtcctccgaaaattcacaattcctctgaccttgctgctcgaaactatcattctgggaaagcagtattccctgaacatcatcttgagcgtgtttgcaattattctaggagcttttattgctgccggttttttacttatgtattctacagtgttatgttcctattataattctgcattgaccaccgccgtcgtcggggctattaaaaatgttagcgtggcatatattggaattcttattggcggagattacatcttctcattgctgaactttgtgggccttaatatctgcatggcagggggactacgctactccttcttgacactgagttcccagctgaaaccaaagccagtaggtgaagagaacatctgcctcgacctgaagagctag

SEQ ID NO: 241497 - DNA, 1251 bp, synthetic construct
  misc_feature 1..1251: note = Description of Artificial Sequence: Synthetic coding sequence
  source 1..1251: mol_type = other DNA
atgcgccagctgtgtaggggacgggtcctgggtatttctgtcgccatagcccatggagtgttctctggatctctgaatattctgctgaagttcctgattagccggtatcaatttagctttcttaccctggtgcagtgcctcacctcctccactgcagctctgagcttagaactgctgcgcagactgggcctgattgccgttccgcctttcggcctgtccctggcgagatcctttgcaggagtcgccgtgctgagcacactccagagctctttgacactgtggagtctgagggggctctctttgccgatgtacgtcgtctttaaaaggtgcttgccgcttgtcacaatgttaattggggttctggtgctcaagaatggagctcccagccctggtgtccttgctgcagttcttataactacttgcggagccgctctggctggagccggagacctcactggagacccaataggatacgtgacgggcgttttagcggtcctggtgcacgccgcttacctggtgctgatacagaaagcatcagccgacacagaacatgggccactcaccgcccaatatgtgattgctgtgagtgcgacacctctgttggtaatctgttccttcgccagtaccgacagcatccacgcctggacgtttccgggatggaaagaccctgccatggtctgcattttcgttgcttgcatcctgatcgggtgtgctatgaatttcaccacgctgcactgcacttatatcaattcagcagtgacaactagcttcgtgggagttgttaagtcgattgctactatcaccgttggaatggtggcattcagcgatgtggagcctactagtctgtttatagcaggagtggtggtgaatacgttggggtccattatatattgcgtggccaagttcatggagacaagaaagcaatccaattacgaagacctggaagcacagccacgcggtgaggaagctcagctttccggcgaccagcttccttttgtgatggaggaactcccgggtgaggggggtaacggcaggtcagaaggtggagaggccgctggtggacccgctcaggaaagccgccaggaagtgagaggatcaccaagaggggtacctcttgtggccggatctagcgaggaagggtctcgcaggtccctcaaggacgcctatctggaagtgtggagactagtgagaggaacacgctacatgaagaaagactacctgattgagaacgaggagctccccagtccttag

SEQ ID NO: 241498 - DNA, 1431 bp, synthetic construct
  misc_feature 1..1431: note = Description of Artificial Sequence: Synthetic coding sequence
  source 1..1431: mol_type = other DNA
atgtccacccagcggctgagaaacgaggattaccatgattacagtagcacagacgtcagccctgaagagagcccttcagaaggactgaacaacctctcaagccctgggtcctatcagcgatttgggcagtctaactcaacaacctggtttcagacactcatccatctactcaaagggaacattggaacgggactcctagggctcccgctcgcagtgaagaatgctggcattgttatgggacccatcagcctgttgatcatagggatcgtggcagtccactgtatggggattcttgtgaagtgcgcccaccacttttgtaggagacttaataaatcattcgtcgattatggcgacaccgtcatgtacggcctggaaagcagtccctgcagctggcttcggaaccatgcacattggggacgccgtgttgtagacttctttttgattgtaacacagcttggattttgctgtgtgtatttcgtctttctggcagataacttcaaacaggtgatagaggcagccaacgggaccacaaacaactgccataacaacgagaccgtgattctcactcccacaatggatagccgcctctacatgttgagctttcttccctttcttgtgttgctggtgttcatcaggaatcttcgagcactgtccatctttagtctgctggccaacattacaatgctggtgagtctcgttatgatctaccagttcatcgtgcagcgtatccctgatccttcacacctccccctcgtcgctccttggaagacctaccccctgttcttcggcaccgccatcttttcctttgaagggataggcatggtgttaccactggagaataagatgaaggacccgagaaagtttcccttgattctctatcttgggatggtgattgtcaccattctttacatctctcttggctgccttggctatctgcagttcggcgcaaatatccagggatcaattactctcaacctccccaattgctggctgtaccagtccgtcaagcttctgtatagtataggcatcttcttcacctatgcccttcagttctatgtgcctgctgagatcataatccctttctttgtcagtagggctcccgaacattgcgaactagtggtagatctctttgtccggaccgtcctggtgtgtctgacgtgtatcctggcaatactcatccccagattagaccttgtgatatctttagtgggctccgtgtccagcagtgcactcgctcttatcattccgcctctccttgaggtgacaactttctatagcgaagggatgtcccctctcaccatattcaaggacgcactcatttcgatcctggggtttgtcggtttcgtcgtagggacttatgaagccttgtatgagctgatccagccttctaacgccccaatctttatcaacagtacttgtgccttcatttag

SEQ ID NO: 241499 - DNA, 1161 bp, synthetic construct
  misc_feature 1..1161: note = Description of Artificial Sequence: Synthetic coding sequence
  source 1..1161: mol_type = other DNA
atgagcactcagaggctgagaaacgaagactaccacgattattccagcaccgatgtttcacctgaggagtctcctagcgagggtctgaacaacctctctagccccggaagctatcagcgttttggacagtccaattcaacaacatggttccagacactgatccacctacttaagggaaatattggcacaggcctgttgggtctgccgctcgcggtgaagaatgccggaatagtgatgggccctatcagtctactcatcatcgggattgttgcagtccattgtatggggatactggtgaagtgcgcacaccacttctgcagacgcctcaataaaagtttcgtggactatggagacaccgtgatgtatggccttgagtcatccccctgcagctggttgcgcaatcacgctcattggggaagacgcgtagtcgatttttttcttatcgtgacccagctgggtttctgctgcgtgtacttcgtgtttttagcagacaacttcaagcaggtcatcgaggctgccaacggaacaacaaacaattgccataataacgagacagttatccttaccccaacaatggactctcgactgtacatgttgtcctttttgccatttctggttctgttggtcttcataagaaatctgcgtgccctgagcatcttctcacttcttgcaaacatcaccatgctcgtgtctttggttatgatttaccagtttattgtgcagagaatccctgacccttcccatcttcctcttgtggcaccatggaagacgtatcccctatttttcggtacagccatctttagtttcgaggggatcggtatggtgctgcccttggagaataagatgaaagaccccagaaaatttcccctgatcctgtacttgggtatggtcatcgttacaatcctgtatataagcttaggctgcctcggttacctgcaatttggagcgaacatacaggggtctatcactctgaacctgcccaactgctggctttaccaatccgtcaagctgctgtacagcatcggaattttctttacctacgcactccagttctatgtgcccgcagaaattatcattccattctttgtgagccgagcacctgaacactgcgagttggtagtggacttgttcgtgcgtacagttctggtgtgccttacatag

SEQ ID NO: 241500 - DNA, 213 bp, synthetic construct
  misc_feature 1..213: note = Description of Artificial Sequence: Synthetic coding sequence
  source 1..213: mol_type = other DNA
atgagcacccagcgactgcgcaacgaggattatcacgactattccagtaccgatgtctcccccgaggaatctcccagtgagggcttgaataacttatcttcccccggaagctatcaacggttcggacagtcaaattccacaacatggttccagaccttgattcacctcctgaagggaaacataggcacgggcttactgggcttaccactgtag

SEQ ID NO: 241501 - DNA, 219 bp, synthetic construct
  misc_feature 1..219: note = Description of Artificial Sequence: Synthetic coding sequence
  source 1..219: mol_type = other DNA
atgagcacccagagacttcgcaacgaggactaccacgactactcctccaccgacgtgtcgcccgaagagagtccctctgagggccttaataacctgtctagtcctggtagctaccagcgatttggtcaatccaactcaaccacatggttccagacgttgattcacctgctcaaagggaatatagggaccggactgctcggattacccctggctgtgtag

SEQ ID NO: 241502 - DNA, 1431 bp, synthetic construct
  misc_feature 1..1431: note = Description of Artificial Sequence: Synthetic coding sequence
  source 1..1431: mol_type = other DNA
atgtcaactcagcgactgaggaacgaagactatcatgattattcctccacagatgtctcacccgaagaaagtcctagcgaggggctgaataatctaagcagccctggctcataccagcgtttcggacaaagcaattcaaccacatggttccaaacattgattcaccttctgaaaggcaatatcggcactggtctgctcgggctccctctcgccgtgaagaacgctggaattgtcatgggtcctatttccctgcttatcatcggcatcgtggcggtgcactgtatgggaatcctcgtcaagtgtgctcaccacttctgccgaaggctcaacaaatcatttgttgattacggggacactgtcatgtacgggctggagtctagcccatgttcttggctgcgcaatcacgctcattgggggaggagggtggtggattttttcctgatagtgactcagctgggtttctgctgcgtctacttcgtgtttctggcggacaattttaagcaggtgattgaagcagctaacggaaccactaataactgtcacaacaatgaaacggttatcctcactcctaccatggactcccggctgtacatgttgagcttcctgccattccttgttctgctggtcttcatccgcaacttaagagccctgtccatctttagtctactcgcgaacattactatgctagtctcgttggtcatgatttatcaattcattgtccagcgcatccctgacccttcacatctgcctctggtcgcaccttggaaaacgtaccctctcttcttcggaaccgctatattctcgttcgagggcataggcatggtgctcccactggagaacaaaatgaaggaccccaggaaatttccacttatcctgtatcttgggatggtgatcgtgaccatcctgtatatatctctgggttgcctcggctatcttcagtttggcgcaaatatccaagggagcattaccttgaatctgccgaattgttggctttaccagtccgtgaaactgctttatagtattgggatattctttacatacgccctacaattctatgtgcctgccgaaattatcatccccttctttgtgagccgggctcctgagcactgcgaattggtggtggacttattcgttcgaaccgtacttgtttgccttacctgcatcttggccattcttatcccgcgactggacctggttatttccctcgtcggatccgtgtcttcttccgccttggcactcattattccacctttacttgaagtaacaaccttctactctgaggggatgtccccattgacgatttttaaggacgccctgatatccattctagggttcgtagggttcgttgtcggcacgtacgaggcgctttatgaactgatccagccatccaacgctccgatcttcatcaactcaacctgtgccttcatttag

SEQ ID NO: 241503 - DNA, 1167 bp, synthetic construct
  misc_feature 1..1167: note = Description of Artificial Sequence: Synthetic coding sequence
  source 1..1167: mol_type = other DNA
atgagtacccaaaggctacgcaatgaggattaccacgactatagttctacagatgtgagccccgaggagagcccctcagaagggttaaacaatctgagctctcctggtagttatcaacgattcggccaatccaattccaccacgtggtttcagaccttaatacatctcctcaagggcaacattgggaccggcttgttaggcctaccactcgcagtgaagaacgccggaatcgtgatgggtcctatttcattattaatcattgggattgtggccgtgcactgcatgggcatattagtgaaatgcgcacaccatttctgccggaggctgaataagagcttcgtagactacggcgacacagtaatgtatggactggagagctctccatgttcctggctgcggaaccatgcacactgggggcgtcgggtggtcgacttttttctgatcgtgacccaactcgggttttgctgcgtgtacttcgtcttcctagcagataactttaagcaggtgatcgaagccgctaacggcacaacaaataattgtcacaataatgagaccgttatccttacacccaccatggatagcagactctacatgctctcttttctgccgttcctagtgctgctagtgttcatcagaaacctgagagccttgtctatcttttcactgctcgccaatataacgatgctcgtgtccctggtgatgatttaccagtttattgtgcaacgcatccccgatccctcgcatctccctctggtagctccttggaagacgtacccactgttcttcggcactgccatcttttcatttgaagggatagggatggttctgccactcgagaataagatgaaagaccccaggaaatttcccctgattctgtacctgggaatggtcatcgtgaccatattgtacatctctctcggctgtttggggtacctgcagtttggcgctaatatacagggttctattacccttaacctaccgaattgctggttgtaccagtccgtgaaattactttactcgattggtatcttcttcacttacgctttgcagttctacgtgcctgccgagattatcatcccctttttcgtaagtcgggcaccagaacactgcgaattggtggtggacttatttgtgcgaacggtcctggtatgtttgacatgtgagtag

SEQ ID NO: 241504 - DNA, 1452 bp, synthetic construct
  misc_feature 1..1452: note = Description of Artificial Sequence: Synthetic coding sequence
  source 1..1452: mol_type = other DNA
atgtccgtgaccaaatccacagaaggaccccaaggcgcagtagccatcaagcttgacctgatgtccccaccagagtcagctaagaagcttgagaataaggactcaacttttctggatgagtctccctcagaatccgccggactgaagaaaactaagggaatcaccgtgttccaggccctcatacatctggttaagggaaatatgggcaccgggatccttggacttccactggcagttaaaaacgccggaatacttatgggacccctcagtctacttgtgatggggttcattgcgtgtcactgcatgcacatccttgtcaagtgcgcccaaagattttgcaaacgcttaaacaagcctttcatggattatggtgacactgtaatgcatgggttggaggctaatccaaatgcatggctccagaatcatgcgcactgggggcgacatatcgtttcattctttctgattattacccagctaggcttttgttgcgtatacattgtcttcctggcagacaacctcaagcaggtggtggaggccgttaacagcactactaataactgctacagtaacgaaaccgtcattctgacaccgacaatggactctagactctacatgctaagctttctgcccttcctggtcttgttggtgctgattagaaacctgaggatactgactatcttcagtatgttggcaaacataagcatgctggtgtcactggttatcataattcagtacatcacccaggagattcctgacccctccaggcttccactagtggcttcatggaaaacttatccgctcttcttcgggaccgcaatttttagcttcgagagcatcggcgtcgttctccccttggaaaataagatgaaaaacgcccgacattttcctgcaattttgagtctgggtatgagcatcgtgaccagcttgtacattggaatggccgctttgggctacttgcgtttcggcgacgacatcaaagcctctatttcactaaatctccctaattgctggctgtatcagagcgtgaagttgctgtatattgccggaattttgtgcacatatgccctgcagttttatgtacctgctgagattatcatcccttttgctatttcaagagtatctacgcgctgggccctaccattggacctctccattaggctcgtcatggtatgtctgacctgtctcctagccatcctgatcccccgactcgatctggtcatatcgctggtaggtagtgtgagcggaactgcactggccttgataatccctccccttcttgaagttaccacgttctacagtgagggaatgagccctctgacgattttcaaggacgccctgatttctatcctgggctttgtggggttcgttgttggcacataccaagccctcgacgagctgctgaaaagcgaagattctcacccattctctaactccaccacatttgtcaggtag

SEQ ID NO: 241505 - DNA, 624 bp, synthetic construct
  misc_feature 1..624: note = Description of Artificial Sequence: Synthetic coding sequence
  source 1..624: mol_type = other DNA
atgaatgatactgctgtgctgcccttagagaacaagatgaaaaacgcccgtcacttcccagctatcctttccttggggatgagcatcgtgaccagtctgtatattggtatggccgctctcggatatttgaggtttggcgacgatattaaggctagcatttcattaaacttgcccaactgttggttgtaccagtcagtgaagctgctctacattgccggtattctctgtacctacgccctgcagttctacgtacctgccgagatcataatcccctttgccatatcccgcgtgagtacccgttgggcccttcccctggatctttcgatccggctagttatggtctgtctgacctgcctccttgcgatcctgattcccaggttagatttagtcatttctctggtggggagtgtgagtgggaccgccctcgctcttatcattccacccctgctggaagtcacaaccttttacagtgaaggcatgtcaccactgaccatctttaaggacgctcttatctcaatactgggtttcgtgggttttgttgtggggacataccaggccttggatgagctcctgaagagtgaggactcccaccctttcagcaacagcactaccttcgttcgctag

SEQ ID NO: 241506 - DNA, 1413 bp, synthetic construct
  misc_feature 1..1413: note = Description of Artificial Sequence: Synthetic coding sequence
  source 1..1413: mol_type = other DNA
atgtccctgttgggacgggactataattcagaacttaacagcttggacaatggacctcagtccccaagcgagtcctcttccagcattacgagcgaaaacgtgcaccccgctggcgaggccggtctgtccatgatgcagaccctgatccacttgcttaagtgcaacatcgggaccggcttacttggtctgcccctggcgattaagaatgctggtctactggtgggcccagtgtctttgcttgcaattggcgtcctgacagtccactgcatggtgatacttcttaattgcgcccagcatctctcccagagactgcagaaaacattcgttaattatggtgaggccaccatgtatggactggaaacatgcccaaacacctggctgcgagctcacgccgtatgggggagatatactgtgtcctttttgctggtgattacccagctggggttctgttcagtttacttcatgttcatggccgataacttacagcagatggtggagaaagctcacgtgacgagtaatatctgccagcctagggagattctgacactcacccccattttagacattagattctatatgctgatcattttgccattcctgatcctgctggtgtttatacagaatctcaaggtgctcagcgtgtttagtacacttgctaatataacgacattaggtagcatggccctgatatttgagtatataatggaaggcatcccatacccctcaaacctgccacttatggccaactggaaaacctttctgctcttcttcggaacagccattttcacttttgaaggagtgggtatggtcttgccacttaagaatcaaatgaagcaccctcagcagttttccttcgtgctgtacttgggcatgtctatcgtgataatattatacattttgctagggaccctcgggtacatgaagtttggatcagacacacaagcttccattactttgaacctcccaaattgctggttatatcagtccgtgaagctaatgtattctattggaattttctttacctatgcactgcagtttcatgttccagcagagattattatcccttttgcaattagccaggtcagtgaaagttgggctctgttcgtggatctgagtgtgcggtcagcacttgtgtgcctcacttgcgtgagcgccattctcatacctaggttggatctagttatctcactggtaggcagtgtcagctcctcagctttagcactaataatcccggcacttctggagattgtgatattctacagtgaggacatgtcctgcgtgacaatcgctaaggatattatgatctccatcgtgggcctcctcggatgtatttttggaacctatcaagccctttacgagttgccacaacccatttcacattctatggctaacagcaccggggttcacgcatag

SEQ ID NO: 241507 - DNA, 1536 bp, synthetic construct
  misc_feature 1..1536: note = Description of Artificial Sequence: Synthetic coding sequence
  source 1..1536: mol_type = other DNA
atgagcctcctggggagggactacaattcagagctgaatagcttggacaatggaccacagagtccgagcgaatcctcctcttctattacatccgaaaatgttcaccccgctggcgaggccggtctctcaatgatgcaaaccctgattcacctcctcaaatgcaatattggtaccggtctgcttgggctgccattagccattaagaatgctgggttactggtaggtcctgtttccctgctcgctattggcgtgcttaccgtgcactgtatggtgatcctcttgaactgcgcacagcacctgtcacagcgtttacagaaaactttcgtaaactatggtgaagccaccatgtacggcctggagacctgtcctaacacatggttgcgcgctcatgctgtgtgggggagatggaatctggctcttagtccacgattggagtgcagtggaaagatctctgctcactgcaatcctcacctacagggaagctccaactctcctgcccaggcttccagggtcgccggaatttatcgatacaccgtttccttccttttggtgatcacgcagctcgggttctgctctgtgtattttatgttcatggccgacaatcttcagcagatggtcgagaaagcccatgtcaccagcaatatatgccagccgcgagaaatcctaactctgacacccattctcgacatccgcttctacatgctgattattcttcctttcctgattctgttggtgttcatacagaacctgaaagtactctctgtatttagcaccctggccaatatcaccaccctggggagtatggccctaatttttgaatatatcatggagggaattccctatccgagtaacttacctcttatggccaactggaaaacctttctcctgtttttcggcactgccatcttcaccttcgaaggagtgggaatggtactccctcttaagaatcaaatgaaacaccctcagcagttctcctttgtgctttatctggggatgtcgattgtgattattctatacatcctgctgggaaccctcggatacatgaagttcgggagcgacacacaggccagcattactctgaatttgcccaactgctggttatatcaaagcgtgaaactgatgtatagcatcgggatcttcttcacctatgctctgcagttccatgtcccagccgagatcattatccccttcgccattagtcaggttagcgagtcatgggctctctttgtggatctgagcgtcagaagcgccctagtatgcctgacatgcgtctcagccatcctgatcccacgactggacctcgttatctccttggtaggaagtgtatcaagcagtgccctcgctctgatcatcccagcccttttggaaatagtgatcttctatagtgaagacatgtcatgcgtaactattgctaaggacataatgatcagcattgtgggcctcctgggttgcatatttggaacctaccaggctctgtacgaacttccccaacccatctctcacagcatggccaatagtactggcgtgcacgcctag

SEQ ID NO: 241508 - DNA, 1515 bp, synthetic construct
  misc_feature 1..1515: note = Description of Artificial Sequence: Synthetic coding sequence
  source 1..1515: mol_type = other DNA
atggaagccgctgcaacccccgcagccgctggcgctgccagacgtgaggaactggatatggatgtgatgcgtcccttgataaatgaacaaaattttgacggcacatcagacgaagagcacgagcaggaactcctccctgtgcaaaagcattaccaactagacgaccaagaaggcatttcattcgtgcagaccctcatgcatttactcaaagggaatattggaaccggcctgctcggtctcccgctggcaatcaagaacgccggaattgtgctggggcctatctctctcgtgttcattgggattattagtgtgcattgtatgcacatcctggttagatgctctcatttcctttgcctacgattcaaaaaatcaactctcgggtactccgataccgtatcattcgcgatggaggtttccccctggtcatgtctgcagaagcaagccgcatgggggaggtctgttgtcgatttctttttagtcatcacccagcttggtttttgcagcgtctatatagtgtttctggccgaaaacgtgaaacaagtccacgaagggtttctggagtcaaaagtcttcattagcaactccaccaactcctctaatccatgcgagagacggtcagtcgatctgagaatttacatgctgtgcttcctcccgtttatcatcctgctcgtgtttattcgtgagctgaagaacctttttgtactgtcttttttagccaacgtgagcatggccgtttcacttgtcattatataccagtatgttgttagaaatatgccagaccctcacaatctccctatcgtggccggatggaaaaagtatcccctattcttcggaactgccgtgtttgcgtttgagggcattggcgttgtgctgcctttagagaatcagatgaaggagagcaagaggtttccccaggccttgaacatcggcatgggaattgtgactaccctgtacgtgacattagcgacgctcgggtatatgtgctttcatgacgagatcaaaggcagcataacattgaatcttcctcaggatgtgtggctctatcagtcggtcaagattctctactccttcggaatctttgtaacctacagcatccagttttacgtaccggctgagataatcattccgggaattacgtcgaagttccacacaaagtggaagcagatatgcgaatttggaattaggtcttttcttgttagtatcacctgcgccggagcaattttaatcccccgactggacattgtaatttcttttgtgggcgcagttagtagctccacactggctctgatcctgccgccactggttgaaatcctgactttctccaaagaacactacaacatctggatggttttaaagaacatcagcatcgcctttacaggtgttgtgggattcttacttggcacctacatcaccgtcgaagagatcatttacccaactcctaaggtggtcgcgggaacaccccagtccccatttcttaacctaaactcgacatgcctcacatcaggcctgaaatag

SEQ ID NO: 241509 - DNA, 1602 bp, synthetic construct
  misc_feature 1..1602: note = Description of Artificial Sequence: Synthetic coding sequence
  source 1..1602: mol_type = other DNA
atggcacggcttcccgctgggatccgcttcattatttcctttagccgcgatcagtggtacagggcattcattttcatactgactttcctcctctacgccagcttccatctgtctcgtaaacccatctctattgtgaagggcgagctgcataagtattgcaccgcatgggacgaggccgatgttaggttcagctctcaaaatcggaagtccgggtctgccgctccacaccaactgcccgataacgaaactgattgcggatgggcgcctttcgacaagaacaactatcagcaactcctgggcgctctggactattcctttctgtgtgcatatgcagtaggcatgtatctgtccgggattatcggagagcggctgccaattcgatactatctaaccttcggcatgttagcctccggtgcctttacagccctctttggtctcggttatttttataacatacattccttcggcttttacgttgtgacccaggtcatcaatggcctcgtccagacaaccggctggccctctgtcgtgacttgtcttggcaattggtttggcaagggcagaaggggcttaatcatgggtgtttggaatagccacacaagcgtgggaaacatattgggttccctcattgccggatattgggtgagcacgtgctggggcctttcttttgtagtgccgggtgctattgtcgccgcaatgggaatagtttgcttcctctttttgatcgaacatcctaatgacgtcaggtgctctagcacactcgtgactcatagcaaagggtatgaaaatggtaccaaccgccttaggctgcaaaagcagatcctaaagagcgaaaaaaacaagccactggatccagagatgcagtgcctgctgttgtccgacgggaagggctccattcatcccaatcacgtcgtgattcttcctggtgacggaggcagtgggactgctgcaatctcttttacgggcgcactgaagatacctggggtcattgagttctctctatgcttactttttgccaagttggtgtcctacactttcctgttctggttacctctttatatcactaacgtggatcacctggacgccaagaaggcaggcgaactgtccacactgttcgacgtgggcggtatttttggtgggatattagcaggagtgattagtgaccgactggaaaagagagcctccacatgcggcctcatgttacttcttgccgctccaactctctatattttttcgacggtctccaagatgggtctggaagcaaccatcgcaatgctcctgttatccggggctctagtatctgggccttacaccctaatcacaaccgctgtgtcagcagacctggggacacataagtcacttaaaggcaatgcccacgccttgtccactgtcacagcaattatcgacgggaccggatccgtgggagccgctctggggcctctcctggccggtctgctctccccatccggctggtccaatgttttctatatgctcatgttcgctgacgcctgcgcactgcttttcctcatcagactgattcataaggagttgtcatgccccggaagcgcaactggtgatcaggtgccgtttaaggaacagtag

SEQ ID NO: 241510 - DNA, 1602 bp, synthetic construct
  misc_feature 1..1602: note = Description of Artificial Sequence: Synthetic coding sequence
  source 1..1602: mol_type = other DNA
atggcccgactacctgccggtatccggttcatcatatctttctcccgcgaccagtggtatcgtgccttcattttcatacttaccttcctgttgtacgcgtcttttcacctgtctagaaaacctatctccattgtgaaaggggaactccacaaatattgcaccgcctgggacgaagccgacgtcagattcagtagccagaatcggaaaagtggctctgcggcacctcatcagctacccgacaatgagactgattgcggatgggctccgttcgataaaaacaattaccagcagctgcttggcgctttggactattctttcctgtgtgcatatgctgtaggaatgtacctatccggtatcattggcgagcgcctaccaattcgctactacctgaccttcggaatgctggctagtggagcctttacggcgttatttggtctcggctatttttataatatccacagttttggattttacgtggtgacacaggttatcaatgggcttgtgcagacaaccggatggccctctgtggtaacttgcctggggaactggtttggcaagggaagaaggggcctaatcatgggcgtctggaactctcacacctctgtgggtaacattctaggctcactgatcgcagggtattgggtgagcacttgttggggactgtcctttgtcgtgccaggagccattgttgctgccatgggtatcgtgtgctttctctttctcatcgaacatcccaacgacgtacgctgtagctcgacactggtgacacattccaaaggatatgagaatggtactaatcgactccggttacagaaacagatccttaagtcagaaaagaataagccccttgatcccgaaatgcagtgtctgctgctttctgatggaaagggatctattcacccgaaccacgtcgtcatcctgccgggagacggagggagcgggacagcagctataagtttcaccggcgcattaaagatccccggagtgattgagttttccctttgcttgctcttcgccaagcttgtgtcatacaccttccttttctggctgcccctgtacatcacaaatgtcgaccaccttgatgcgaagaaagccggagagctatcgactctgtttgatgtcggtgggatatttggcggaatcctggccggtgtcattagtgataggttagagaagagggcgtctacatgcggactgatgttgctgctcgccgctccaactctgtacattttttcaaccgtgtccaaaatgggactggaggccactatagctatgcttctcctgtctggtgcccttgtttccggaccttacaccttaatcaccacagcggtttccgcagatttgggcacccacaaatccctgaagggtaacgctcacgcgctgagtacggtcaccgcgattattgatggaaccggcagcgtgggcgctgccttgggcccacttcttgcaggcctgctgagtccgtccgggtggtcaaacgtattctatatgctgatgtttgccgatgcctgcgcactgctttttctgatacgtctgatccataaagagctgtcatgtcccggttccgcaacaggagaccaggtcccctttaaagagcaatag

SEQ ID NO: 241511 - DNA, 57 bp, synthetic construct
  misc_feature 1..57: note = Description of Artificial Sequence: Synthetic coding sequence
  source 1..57: mol_type = other DNA
atggccagactccctgccggtatcaggttcatcattagttttagcagggaccaatag

SEQ ID NO: 241512 - DNA, 57 bp, synthetic construct
  misc_feature 1..57: note = Description of Artificial Sequence: Synthetic coding sequence
  source 1..57: mol_type = other DNA
atggcacgcctgccggcaggaatcaggtttattatttctttcagccgagaccaatag

SEQ ID NO: 241513 - DNA, 1464 bp, synthetic construct
  misc_feature 1..1464: note = Description of Artificial Sequence: Synthetic coding sequence
  source 1..1464: mol_type = other DNA
atgatgcatttcaaatctggtctggagttaacagagctgcagaacatgacggtacctgaggacgataatatatcgaacgatagtaatgactttacggaagtagaaaacggccaaatcaactccaaatttatatccgacagggagagtaggaggtctctgacaaactcacatttagagaagaagaaatgtgatgagtatattcctggaacgacaagcttggggatgagcgtcttcaatctcagtaacgccattatgggttccgggatcttagggctggcatttgctctggcaaacacagggatcctcttattcctggtcctgctaaccagcgtgacattactttccatctattccatcaatctgctactgatctgctccaaagagactgggtgtatggtatacgaaaagcttggagagcaggtcttcgggacaaccgggaagtttgtgattttcggtgccacttccctccagaacacgggcgcaatgctatcatacctgtttattgtaaaaaacgagctgcctagcgccatcaaattcctgatgggtaaagaagagactttctcggcctggtatgtcgatggcagagtcctggtcgtcattgtgacgttcggcataatcctgccattgtgcttgctgaaaaacctggggtacctgggctatacgagcggctttagtctctcatgtatggtcttttttttaatagttgtgatatataagaaattccagatcccttgcatagtgccagagctgaacagcacaatctcagccaattcaacaaatgcagatacttgtactcctaaatatgttactttcaattccaaaaccgtgtatgccctcccaactatcgccttcgcttttgtgtgccacccctctgtcctgcccatctacagtgagctgaaggatcgcagccaaaagaaaatgcagatggtatctaatatcagcttctttgctatgttcgtcatgtatttcctcaccgcaatttttggatacctcaccttttatgataacgttcagtccgacctgctccacaagtatcagagcaaagatgatatcctcatactgacggttcgcttagccgtcatcgttgccgtcattctgacagtcccggtcctattttttactgtgagaagctccctcttcgagctcgctaagaaaacaaaattcaatttatgccggcacactgtcgtgacttgtatcctgctggtagtcataaatctgctggtcatcttcatcccatcaatgaaggatatctttggcgtagtcggcgtcacctccgcgaatatgctgatatttatcttgccttcatcgctgtacctaaaaatcaccgatcaggatggcgacaaaggaacccagagaatctgggccgcactcttcctcggactcggggtgttgttcagccttgtatccattcccttagtgatctacgactgggcttgttctagtagcagcgacgaaggccattag

SEQ ID NO: 241514 - DNA, 1464 bp, synthetic construct
  misc_feature 1..1464: note = Description of Artificial Sequence: Synthetic coding sequence
  source 1..1464: mol_type = other DNA
atgatgcacttcaagagtggactggagctgaccgagcttcagaatatgaccgtgccagaggatgacaatatttctaatgatagtaatgacttcactgaggtagagaatgggcagatcaacagcaaattcatctccgaccgcgaatcgcgtcggtctctcactaattcgcacttggagaaaaaaaaatgcgatgagtatatcccgggtaccaccagcttaggtatgtccgtgttcaacttgagtaacgccattatgggatctggcatcctgggcttagcctttgctctggcgaacacagggattctgctctttttggtgctattgactagcgttacactcctctctatctatagcattaatctattgctaatttgtagcaaggaaaccggatgtatggtctacgagaaattgggcgagcaagtttttgggaccacagggaagttcgtgatcttcggggctacatctttgcaaaatacaggagctatgctgagctatctgttcatcgtgaaaaatgaactgccatcggccatcaagttccttatgggcaaggaagaaactttctccgcctggtatgtggacggacgggtcctcgtcgtgattgtcacttttggcattatcctgcccctctgtctactgaagaacctgggttatctcggttatacatccggattcagcttatcctgcatggtttttttcctgattgtggtcatctataagaagttccagataccctgcatagtgcctgaactgaactcaactatatcagccaattctacaaatgccgacacctgcacacccaagtacgtgacttttaacagcaagaccgtctatgcgctgccaacgatcgctttcgcattcgtgtgtcatcctagtgttctcccaatctacagtgaactgaaagaccggtcacagaaaaagatgcagatggtgtctaatatcagttttttcgcaatgtttgtcatgtattttctgactgcaattttcggctacctgacattctatgataatgtgcagagcgatctgctgcacaaataccaatcgaaagacgatattttgatcctcactgttaggctagcagtgatagtcgccgttatactgactgtgcccgtcctgttttttacagtccgatcatccttattcgagctggcaaagaagactaagttcaacctttgtcgccatacagtcgtgacttgcatccttctcgtcgtgatcaacctgctggtgatatttatccccagtatgaaggatatattcggtgttgttggggtaacaagtgcaaatatgctgatatttattctgccttcaagcttgtacctgaaaatcactgaccaagatggggataaagggacacagaggatctgggcagccctattcctgggactgggcgtgctatttagcctggtgagtatccccctggttatctatgattgggcctgcagctcctcctcagacgagggacactag

SEQ ID NO: 241515 - DNA, 1464 bp, synthetic construct
  misc_feature 1..1464: note = Description of Artificial Sequence: Synthetic coding sequence
  source 1..1464: mol_type = other DNA
atgatgcactttaagtccggactcgagctgaccgaattacaaaacatgacagtcccagaagacgacaacatctccaacgactctaatgattttactgaagtggagaacgggcagatcaactccaagttcatttcagaccgagaaagtcgccgaagcctcaccaactcgcacctcgaaaagaagaagtgtgacgagtacattcctggcactacgtcactgggcatgtcagtgtttaacctgagtaatgcgatcatgggaagtggcatattgggattggccttcgcgttggctaatacaggaattcttttatttttggtgctactgacatcagtcaccctactcagtatctatagtatcaatctgctgcttatctgcagcaaggaaaccggctgcatggtgtacgagaaactaggtgagcaggttttcgggacaaccggcaaattcgtcatctttggagcaacatcactgcagaataccggtgcgatgctatcctacctgttcatagtgaagaatgagctccctagcgcaatcaaatttttaatggggaaagaagaaaccttttccgcatggtacgtggacggtagggtgctggtggtgattgtcacctttggtataattcttcctttatgcttgctgaagaacctaggctacctcgggtacactagcggcttcagcttatcgtgcatggtattttttctgatcgtcgtcatttataaaaagtttcagattccctgtattgtgccagagctcaacagcactataagcgccaattctaccaacgctgacacatgtactccaaaatatgtgactttcaatagtaagacggtctacgcactgccgaccatcgccttcgcctttgtttgtcaccccagcgtgttgccaatatattccgagctgaaagaccgctctcaaaagaaaatgcaaatggtttctaatatctcattctttgccatgttcgtgatgtattttctaacggccatcttcggttacctgacattctacgataatgtgcagagcgaccttctacacaagtaccagagcaaagacgatattctcattctaactgtgcggcttgcagtaatcgtggccgtgattcttaccgtgcccgttctcttttttaccgtgaggtcttcactcttcgagctggccaaaaagacaaaatttaatctgtgccggcataccgtagttacatgtatcttacttgtagtgattaaccttcttgtcatctttattccgagcatgaaagatatattcggagtcgtgggagtcactagtgctaacatgctgatcttcatcctcccttccagtttgtatctgaagatcacagaccaggacggcgacaaagggacacagcgcatttgggcagccctctttctaggcttaggcgttcttttctcactagtgtctattcctctggtgatatatgattgggcatgctcgtccagtagcgatgaaggtcactag

SEQ ID NO: 241516 - DNA, 1464 bp, synthetic construct
  misc_feature 1..1464: note = Description of Artificial Sequence: Synthetic coding sequence
  source 1..1464: mol_type = other DNA
atgatgcacttcaaatcgggattggagctgacagagttgcagaacatgaccgtgcccgaagatgataacatctccaacgatagtaatgacttcaccgaggtggaaaatggacagattaactccaagttcattagcgatcgggaaagccggagatccctaaccaattctcacttggaaaaaaagaagtgcgacgagtatatacctggcaccaccagcctcgggatgtcggtgttcaacctcagtaacgctatcatgggatccggtatcctagggctggccttcgctctggccaatactggaattctcttattccttgtcctgctcacaagtgtcacgcttctgtcaatctacagcatcaatctgctacttatatgttctaaggagaccgggtgcatggtttatgagaagctgggcgagcaggtgtttggaactaccggcaaatttgtgattttcggcgcaacaagtttgcagaacacgggagctatgctatcctacttgttcattgttaagaacgaactaccttcggcaattaaattccttatggggaaagaagagaccttcagcgcctggtatgttgatggacgcgttcttgtagtgatcgtaacatttggtattatcctgcccctctgtcttttgaagaacctcggttacctgggatacacctcaggtttctccctgtcctgcatggtgtttttcctaatagtcgtcatctataagaaattccagatcccttgcattgttccggaactgaattcgaccatatccgccaactccacgaatgcggacacatgcaccccgaaatacgtcacattcaatagcaaaacagtctacgccctgcctacaattgccttcgcattcgtttgtcacccatcagtgttaccaatatactccgagctgaaagacaggagtcagaaaaaaatgcaaatggtctctaatatctctttcttcgccatgtttgttatgtatttcctcaccgccatcttcgggtacctgactttttacgataacgtgcagtctgaccttctccacaagtaccagagcaaggatgatatattgatactgacagttcgcctggccgtgattgtagcagtcatcctgactgtgcctgtgctcttcttcacggtgaggagctccttgttcgagctggcgaagaaaactaagttcaacctatgcaggcacaccgtggtgacctgtatcctgctcgtcgtgataaacctgctggtcatctttatcccaagcatgaaggatattttcggagtggtgggcgtgaccagcgccaacatgctgatcttcattttgccctcaagcctgtaccttaaaattacggatcaggacggagacaaaggaacccagagaatatgggctgccctgttccttgggctcggggtgcttttttccctcgtatccatcccattagtcatttatgattgggcatgctccagcagtagtgatgaaggccattag

SEQ ID NO: 241517 - DNA, 1521 bp, synthetic construct
  misc_feature 1..1521: note = Description of Artificial Sequence: Synthetic coding sequence
  source 1..1521: mol_type = other DNA
atgaagaaagctgaaatgggcaggtttagcatcagccccgatgaagatagctccagttactcatcaaactctgatttcaattactcttatcccaccaaacaggccgctctgaagagccactacgcagatgtggaccccgagaatcaaaattttctgctggagtctaacctcggtaaaaaaaagtacgagaccgaattccatccagggactactagcttcgggatgtcagtgttcaacctgtctaacgccatcgtgggctccggcattttgggattgtcttatgcaatggctaataccggcatagcactctttatcattctgctgaccttcgtgtcgattttctcactgtatagtgtccacctattactgaagaccgccaacgaaggagggtcactgctctacgagcagctcggctacaaggcgttcggcttagtggggaaactcgctgctagtgggtccatcaccatgcagaacatcggagccatgtcttcttacctgtttattgtgaaatatgagctgcccttagtcatccaagccctcaccaacatagaggacaaaacaggcctatggtaccttaacggcaactacctggtgctgcttgtgagccttgtcgtaattcttcctctgagtctcttccgtaacctaggctacctggggtacacaagcggattgagcttgctgtgtatggtgttttttctcattgtggttatctgtaagaaatttcaagtgccgtgtcccgtagaggccgcactcattatcaatgaaaccatcaatactaccctcacgcaacctactgccctggttcccgctctgtcccataacgttacagagaacgactcttgtcgtccacactatttcattttcaactcccagacagtttatgccgtgcctattctgatcttcagcttcgtgtgtcatcccgctgttctgccaatatatgaggagctcaaggaccggtcccgtcgcagaatgatgaatgtgtctaagatttcgttcttcgctatgtttctgatgtacctgttggcggctctattcggttacctgaccttttatgaacacgtcgaatccgagctcctccatacatacagcagcatcctcggcacagacatcttgctcctgatcgttagactcgcggtcctgatggccgtgaccctgaccgtgcccgtcgtcatctttcctattcgctcctctgtgacccacttgctgtgtgcttcgaaagatttctcttggtggcgacactcattgatcactgtgtctatccttgcattcaccaacctgctcgtgatattcgtgccaactatcagggacatttttggctttatcggcgctagtgctgcctccatgctgatcttcattctgccatccgcgttttacattaaactggtgaaaaaagagcccatgaaatctgtccagaaaatcggggcactgttcttcctgctgagtggcgttctagtcatgacggggagtatggccctgattgtcctggattgggtgcacaacgcaccgggagggggtcattag

SEQ ID NO: 241518 - DNA, 1644 bp, synthetic construct
  misc_feature 1..1644: note = Description of Artificial Sequence: Synthetic coding sequence
  source 1..1644: mol_type = other DNA
atggacccgatggaactccgaaatgtcaacatcgagccggacgacgaatcatcctcaggcgagagtgcccctgattcatatattggtatcggcaacagtgaaaaagccgcaatgagcagtcagttcgccaatgaggataccgagtcccaaaagttccttacaaacggctttttggggaagaagaagctggcagattacgctgacgagcaccatccaggtacaacgtcatttgggatgagttccttcaatctatccaatgcaattatgggaagcggtatccttggcctgtcctatgccatggcaaatacaggcatcatcttgttcatcatcatgctccttgccgtggcaatcttgagtctctatagcgtccacttgctcttaaaaactgccaaggagggaggatcactcatctatgagaaactcggagagaaggcattcggatggcccggtaagatcggagcttttgttagtatcacgatgcagaacattggcgcaatgtcatcctatctctttatcatcaaatacgaactcccagaagttatccgcgctttcatgggcctggaggaaaataccggagaatggtatctgaacggcaattatctgatcatctttgtgtctgtaggcattatcttgcctctttcccttctcaagaatctgggctatctaggatatactagtggtttttcactgacctgtatggttttttttgttagcgtcgtcatttacaagaaattccaaattccttgtcctctccctgtgctagaccactccgtgggtaacctaagcttcaacaatacgctcccgatgcacgtggtgatgctgccgaataattcagaatctagcgacgtgaattttatgatggactacacacaccggaatcctgctggcctggacgagaaccaggccaagggatccctgcacgacagtggcgtggaatacgaagctcattcagacgacaagtgcgagccgaagtactttgtgttcaacagcaggactgcctatgcaatccctattctcgttttcgcctttgtgtgccacccagaggtgctgcccatctacagcgagctaaaggacagatcccgcagaaaaatgcagacggtgtctaacatctctatcacaggaatgcttgttatgtacctgttggccgctctgttcggttacctgactttttacggtgaggtggaggatgagctgcttcacgcctactcgaaggtctacaccctggacatcccacttctcatggtcaggttggcagtgctagtggccgtcacactgacggtgccaattgtgctcttccccatccggactagtgtcataaccctgctgttcccgaagcggcctttctcgtggattcggcatttcctgattgctgccgtgttgatcgctttgaataatgtcctggtgatactggtcccaactatcaagtacatctttggatttatcggcgcttcgagtgctaccatgctgatatttattctaccagcagttttttacctgaagctggtgaagaaagagacatttcggagtcctcagaaggttggcgctctaatatttcttgtcgtgggaatctttttcatgatcggctctatggccctgatcatcatcgactggatctacgatccccctaattccaaacaccattag

SEQ ID NO: 241519 - DNA, 780 bp, synthetic construct
  misc_feature 1..780: note = Description of Artificial Sequence: Synthetic coding sequence
  source 1..780: mol_type = other DNA
atggacccaatggagctgaggaatgtcaatatcgaacccgacgacgagagtagtagtggtgagtccgcgcctgacagttacattggaataggtaacagcgagaaagccgctatgagtagtcaatttgcaaatgaggacaccgagagtcagaagttcctaactaatggtttcctggggaagaagaagcttgccgattacgccgatgagcaccaccccggaacgactagctttggcatgtcctccttcaatctttcaaacgcgataatgggctcagggatccttgggctgtcatacgccatggcgaacacggggattatcctgtttatcatcatgctactggccgtcgctattctaagtttgtactccgtgcatctactgctgaagacagccaaggaagggggatccctaatttacgaaaaacttggagaaaaggcatttggatggcccggaaagattggcgcattcgtgagcataacaatgcagaacataggagccatgtcctcttacctcttcatcattaagtatgaactgcccgaggtcatccgggctttcatgggcttagaagaaaacaccggtgagtggtacctgaacggaaactacctgatcatttttgtgtccgtcggaataattttgcccctgtctctgctaaaaaatctgggatacctcggatacacctcaggcttttccttaacatgcatggtattcttcgtaagcgtgatgatctacaagaaaatcagtttcttccttcagatcttcatcatactgaagctctttttttag

SEQ ID NO: 241520 - DNA, 1644 bp, synthetic construct
  misc_feature 1..1644: note = Description of Artificial Sequence: Synthetic coding sequence
  source 1..1644: mol_type = other DNA
atggaccccatggagctgcggaatgtgaacatcgagccagacgacgagtctagttctggagagtcagcccctgactcctacatcggcatcgggaacagtgagaaggccgcaatgagctcgcagttcgcgaacgaagatactgagtcacagaaattcctaacaaacggatttctaggcaagaagaagctggctgattatgctgatgagcatcaccccggtacaacttccttcgggatgtcatcattcaatcttagtaacgcgattatgggctctggcatactgggtctgtcatatgctatggccaacactggcatcattctgtttatcataatgcttttagccgttgccatccttagtctgtattcggtccacctcttactgaaaaccgccaaggagggaggcagcctgatttatgagaaactgggtgaaaaggcttttggctggcccggaaagattggggcatttgtctccattacaatgcagaacatcggagctatgagctcttacttgtttattattaagtacgagctgcccgaagtgattagagccttcatgggtttggaagagaataccggcgagtggtacctgaacggcaattatctgatcattttcgtgtccgtgggcatcattctgccactctcgctgcttaagaatcttggatacctcggatatacaagcggcttctcattgacatgcatggtgttctttgtttcggtggtgatctataaaaagttccagatcccctgtcctctcccagtcctggatcactccgtgggcaacctgtcttttaacaacaccctccccatgcatgtcgtaatgttgccaaataactcagagtcttcagacgtcaattttatgatggactatactcacagaaacccagccggtttggatgagaaccaggccaaaggtagcttgcatgattccggcgtcgaatacgaagcgcacagtgacgacaagtgtgagccaaagtactttgtatttaattcccgaactgcgtacgccattcctattcttgtgtttgccttcgtctgtcaccccgaggtcctgccaatttattctgagctgaaggaccggagccgccgtaagatgcagaccgtcagcaatatctctatcaccggaatgctggtgatgtacttgcttgctgctctgtttggttatctgacattttacggggaggtggaggacgaactgctccacgcgtatagcaaagtttacacccttgatatcccactgttaatggtgagactcgctgttctggtggctgtgacactgactgtcccaattgtgttgttcccgatcaggacgtcagtgattactcttctgtttcccaaaaggccgttttcttggatccgtcattttctgatcgctgctgttttaatcgcactaaacaatgttctcgtaatactggtccctacaattaagtatatcttcggttttatcggagcaagtagcgccacaatgctgattttcatactccccgctgtcttttatctcaaactggtaaaaaaagagacattccgaagccctcagaaggtgggcgcactgatcttcttggtggtaggaattttctttatgatcggcagcatggcactaataattatagactggatttatgatccacccaactctaagcaccactag

SEQ ID NO: 241521 - DNA, 579 bp, synthetic construct
  misc_feature 1..579: note = Description of Artificial Sequence: Synthetic coding sequence
  source 1..579: mol_type = other DNA
atggacccaatggagttgaggaacgtgaatattgagccagatgacgagagtagctccggcgaatccgctcctgacagctacattggcattggtaacagcgaaaaggctgccatgtcatcccagttcgctaatgaggataccgagagccagaaattcctcaccaatgggtttctgggcaaaaaaaaacttgcagactacgcggacgagcaccaccccggaaccacttctttcggaatgtcatcatttaacctgagcaatgcaatcatggggtccggaatcttgggtttaagctatgccatggccaacaccggcatcatactcttcataatcatgctcctggccgttgccattctatccctgtactcagtgcacctgctgttgaaaactgctaaggaggggggttcgttgatttatgagaagctcggggagaaagcattcggctggcccggaaagatcggcgcatttgtctccattaccatgcaaaacattggagctatgtcctcttacctgttcattattaaatacgaactgcctgaggtgattagagctttcatgggactcgaagagaacaccgggtag

SEQ ID NO: 241522 - DNA, 660 bp, synthetic construct
  misc_feature 1..660: note = Description of Artificial Sequence: Synthetic coding sequence
  source 1..660: mol_type = other DNA
atggatcccatggaactgaggaatgtcaatatcgagcccgacgatgaatcatcttcgggcgaatcagcgcctgactcctacattggcattggcaattcagagaaggctgctatgagcagccagtttgctaacgaggatactgaaagccagaagttcttgactaacggattcttggggaagaagaagctggctgactacgctgatgagcatcatccaggaactacatcctttggaatgtccagttttaacctctccaatgccatcatgggatctggcattcttggactgtcctacgccatggctaacactggcataattttgttcatcatcatgctcttggccgtcgcgatcctgtcgctgtacagtgtgcatttgttgctgaagacagccaaggaagggggatcactcatctatgagaagctgggagaaaaggcctttggctggcctggtaagatcggcgcatttgtgagtataacaatgcaaaatattggagccatgtctagttatttgtttattataaagtacgagctgcccgaggtcattagggcttttatgggtctggaagagaacaccggtgagtggtacctgaatgggaattacctcattatctttgtcagtgtgggtatcatcttgccactgtcgctcctcaaaaatctgtag

SEQ ID NO: 241523 - DNA, 1419 bp, synthetic construct
  misc_feature 1..1419: note = Description of Artificial Sequence: Synthetic coding sequence
  source 1..1419: mol_type = other DNA
atggaactccaggaccccaaaatgaacggagccctgccatctgatgccgtcggataccgccaggagcgggaaggctttttgccctcccgaggcccagccccagggtctaagcccgttcagttcatggactttgaagggaaaacatccttcggaatgtccgtctttaatctgtccaatgcaataatgggaagcggtatcctcgggctcgcatatgctatggcacacaccggtgttatttttttcctagctctgcttttgtgtatcgctctcctctccagctactccatccatcttctgctgacgtgtgctggtatcgcgggaataagagcttatgagcagttgggacaacgcgcattcggacctgccggaaaggtggtcgttgcgactgtgatctgcttacacaacgtgggggcaatgtcttcttacttattcatcatcaagtcggagctgccactggtgatcggaaccttcctgtatatggatccggagggcgattggtttctgaagggcaacctcctgattattatcgtgagcgtcctgatcatcctacccctggccctgatgaagcacctggggtatttaggctatacctcgggcctcagcttgacatgtatgctgtttttcctcgtttcagtcatctacaaaaagttccaactgggctgtgccattggccataacgaaactgcaatggaatcagaagctctggttggcctcccctcacaagggctgaattccagctgcgaggcacagatgttcactgttgattctcagatgtcatatacagttccgattatggcttttgcttttgtgtgccaccccgaggtgctacccatctataccgaactgtgccgacccagcaagcgtcgtatgcaggccgtagccaacgtgtccattggtgccatgttttgtatgtatggcctgacagcaactttcgggtatctgacattctattctagcgtcaaggcagagatgctccacatgtattctcaaaaagatcccctgatcttatgtgtccgcttggctgtgctactcgccgtcaccttaacagtgcctgtggtgctgttcccgattaggagggccctccagcaactccttttcccaggcaaggctttctcatggcctcggcacgtggccatcgcactcattctgctcgtgttagtcaatgttttagttatatgcgtgcccaccattcgcgatatttttggagtgattggtagcacctccgccccaagccttatattcattctgccgtcgattttctacttacgtatagtcccttctgaggtcgaacctttcctcagttggcctaagatccaggctctgtgcttcggagtgctcggggtcctgttcatggctgtgtccctagggttcatgtttgccaattgggctactggtcagtctcggatgagtggacattag

SEQ ID NO: 241524 - DNA, 1266 bp, synthetic construct
  misc_feature 1..1266: note = Description of Artificial Sequence: Synthetic coding sequence
  source 1..1266: mol_type = other DNA
atgtccgtgttcaacctgtccaacgctattatgggatccggtattcttgggctagcctacgcaatggcacatacgggagtcatattctttttagccctgctgttatgtatcgcgctactcagctcctattctattcatctgctacttacatgtgccggaatcgcaggcattagggcctacgaacagcttggccagagagcattcggcccagcaggtaaggtggtggtggccaccgtcatttgcctgcacaacgttggagccatgtcttcatatctctttattatcaagtcggagctgccactggtgatcggcacgtttttatacatggatcctgagggagactggttccttaaaggaaatctgctcatcataattgtctctgtactgattattctgccattggcgttgatgaagcatctgggttacttgggctacacatctggattgtcgttgacatgtatgctcttcttcctggtcagcgttatctataagaagttccagctgggctgtgccatcgggcataatgagaccgccatggagtcagaggcactggtcgggcttccttcacaggggctcaactcatcttgcgaggcccagatgtttacagtcgacagtcagatgtcctatactgtacccatcatggccttcgcattcgtttgtcacccagaggtcctgcctatctacaccgagctctgtagacccagcaagcgacggatgcaggcggtggctaacgtgagtataggcgcaatgttctgtatgtacggtttgacggccacttttggctatctcactttctattcctcagttaaggccgaaatgcttcacatgtactcccaaaaggatcctttaattctgtgcgtgcgacttgcagtgttgctggctgtcacattgaccgtccccgtcgtgctgtttcccatccgcagggccctgcagcagctcttgttccccggaaaggcttttagctggcctcgacacgtggccatcgccctcatcctcctcgttctggtcaatgtactggtgatatgcgtaccaacgatccgcgacatattcggagttatcggatctaccagcgccccttctctgatctttatactaccttcgattttctaccttcggatcgtaccatcagaggtggaaccattcttgtcatggccgaagatccaggcgttgtgctttggcgtactgggcgtgctgtttatggctgtaagcttggggttcatgttcgctaattgggccacaggccagagccgaatgtcagggcactag

SEQ ID NO: 241525 - DNA, 1419 bp, synthetic construct
  misc_feature 1..1419: note = Description of Artificial Sequence: Synthetic coding sequence
  source 1..1419: mol_type = other DNA
atggagctccaggatcctaaaatgaatggagccctaccgtccgatgctgtgggctataggcaggagcgagagggatttttaccctctcggggacccgctcctggtagcaaacctgtgcagttcatggactttgagggcaaaacatcatttggcatgtcagtattcaacctcagtaatgctatcatgggctctgggatcctcgggctggcttacgccatggcgcacacaggggtcattttctttctggccttgcttctttgcatcgctttgctctcctcttacagtatacacctcctccttacttgtgccggtatagcagggataagagcgtacgagcaactgggtcagagggcttttgggccagccggaaaggttgtggttgccaccgtgatttgcctgcacaacgtaggagcgatgtcttcttatctgttcataattaagagtgagctgcctctggtaatcggcacatttttgtatatggacccagagggcgattggttcttgaaaggcaaccttctgataattatagtgtctgtgctgatcattctgcctctggctctcatgaaacatttgggatatctgggttacacctcaggcttgtcattaacttgcatgctcttctttctggtctctgttatttataaaaagtttcagcttggatgtgcaattgggcataacgaaactgctatggaaagtgaggccttggttggtctgccatctcagggactcaattcatcttgcgaggcacagatgtttaccgtggactcacagatgtcctatacggtcccaatcatggccttcgcgttcgtgtgtcatcccgaggtgctgcccatctataccgaactgtgcaggcctagcaaacggagaatgcaggcggtggcaaacgtttccattggtgccatgttttgcatgtacggccttacagctacattcggatacctaactttttacagttctgtgaaagccgagatgctccacatgtacagccaaaaggacccgctaatcctatgcgtgaggttggccgtgctgttggctgtgacattaaccgtacccgtggttctatttccaattcgcagagccctacaacagcttttgttcccaggcaaggccttttcatggccgaggcacgtggccatcgctctgatcctgctggtcttggtgaacgtcctggtgatctgtgtgccaaccattcgcgacatttttggggttattggctccacatcagccccaagtctcatatttatattaccttccatcttctaccttcgcattgttccaagtgaggtcgagccatttctaagttggccaaaaatccaggcactatgtttcggcgtgttgggagtactttttatggcagtttctttaggctttatgtttgccaactgggccacaggccagtcacgcatgtcgggacattag

SEQ ID NO: 241526 - DNA, 660 bp, synthetic construct
  misc_feature 1..660: note = Description of Artificial Sequence: Synthetic coding sequence
  source 1..660: mol_type = other DNA
atggagctccaagatccgaagatgaacggagcactgcctagtgacgcagtgggctataggcaggagcgggagggtttcctcccctcccgtggccctgctcctggttctaaaccagtgcagttcatggatttcgaaggtaaaactagctttggtatgtcagtattcaatctttctaacgccattatgggatctggtatccttgggctcgcctacgccatggctcatactggcgttatcttctttcttgcactgctgctctgtatcgcactgctgagctcatattcgatacatctgctgttaacgtgtgccggtattgccggaattcgcgcttatgagcaactcggtcagcgcgcatttggccctgcaggaaaggtcgtggtggcaactgtcatctgtctgcataatgttggggctatgtcaagctacctattcatcattaagtctgagcttccactggtaattggcacttttttatacatggatccagagggcgactggtttttaaagggtaatttactaatcataatcgtcagcgtgttgattatcctccccctcgctttgatgaaacatttgggttatctcggttacacctcggggctgtcacttacttgcatgctctttttccttgtgtctgtgatttataagaaatttcaattatag

SEQ ID NO: 241527 - DNA, 576 bp, synthetic construct
  misc_feature 1..576: note = Description of Artificial Sequence: Synthetic coding sequence
  source 1..576: mol_type = other DNA
atggaactgcaggatccaaagatgaatggggcactaccgagtgacgccgtgggatatcggcaagagagagaaggctttctcccttctaggggaccagccccaggatccaaacccgtgcagttcatggacttcgaagggaaaacaagtttcggcatgagtgtgttcaacctctctaacgcaatcatggggtccggcattcttggcttggcatacgctatggctcatacgggagttattttctttttggctctgctgctgtgcattgcccttttatccagctactccatccacctgctcttgacgtgcgctggcatcgctgggataagggcgtacgagcagctgggccagagagcgttcggtcctgcaggaaaagttgttgtggccaccgtgatctgcctgcacaacgtaggcgctatgagttcttacctgtttattatcaaaagcgaacttccactagtcattgggacatttttatatatggatcctgaaggcgactggtttcttaagggaaacctactgattatcattgtgagcgtgctgataattctaccgctcgccctgatgaaacacctctag

SEQ ID NO: 241528 - DNA, 495 bp, synthetic construct
  misc_feature 1..495: note = Description of Artificial Sequence: Synthetic coding sequence
  source 1..495: mol_type = other DNA
atggaactccaggacccaaagatgaacggggcacttccgtctgacgccgttgggtacagacaggagcgtgaggggtttctgccaagccgaggccctgctcccggatcaaagcctgtccagtttatggatttcgagggcaagacttcatttggcatgagcgtgtttaacctgagcaatgctatcatggggagcggaatcctgggtttggcatacgcaatggctcatacaggcgtgatcttttttctggccctgttgttgtgcatagctctgctgtcctcttactctatccatttgctgttgacctgcgccggaattgcgggaattcgagcatacgagcagctcggccagagggcgttcggaccagctgggaaggtggtggtggcaacagtgatctgcttacacaacgtgggggcaatgagctcctatctttttattattaaaagtgaactgccgcttgtcattggcacctttctgtacatggacccagagggatag

SEQ ID NO: 241529 - DNA, 840 bp, synthetic construct
  misc_feature 1..840: note = Description of Artificial Sequence: Synthetic coding sequence
  source 1..840: mol_type = other DNA
atggagctccaagatccaaaaatgaacggtgccctgcccagtgatgctgttgggtatagacaggaaagggaaggcttcctcccttctcggggtcctgccccaggaagcaaacctgttcagtttatggactttgagggaaagacttcttttgggatgtccgtgtttaatctctccaatgccatcatgggctcaggcatcctgggactggcatatgctatggctcataccggagtaattttcttcttggccctcctactctgcattgcccttcttagcagttattctattcacctgctgctgacatgtgctggtattgcgggaatccgcgcatacgaacaactagggcaacgcgcttttggcccagccggtaaggtcgtggtggcgactgtcatttgcttacacaatgtcggcgctatgagctcctatctgttcattataaagagcgagctgccactagtaattgggaccttcctttatatggaccctgagggcgactggttcctgaaggggaatctcctcatcataattgtgtccgtgctcatcatcctgccactggccctgatgaagcacctcgggtatctcggttacacgagcggtctgagtctcacctgcatgctgttctttctggtgagcgtcatatacaagaagtttcagctcgggtgtgcaattggacataatgagaccgcgatggagtccgaggcgttggtgggcctgccctctcaggggttaaactcatcgtgtgaggcacagatgttcacagttgacagtcagatgtcctatacggtgcccataatggccttcgcctttgtgtgccatcccgaagttctcccaatttactag

SEQ ID NO: 241530 - DNA, 819 bp, synthetic construct
  misc_feature 1..819: note = Description of Artificial Sequence: Synthetic coding sequence
  source 1..819: mol_type = other DNA
atggaactccaggatcccaagatgaatggcgctctcccatcggatgcggtgggataccgtcaagaacgtgaaggttttctgccctcacgcggacctgcaccaggttccaaacctgtgcagttcatggacttcgaaggtaagactagcttcggaatgtctgtttttaatctgtccaatgcgatcatgggcagtgggattttaggtctggcttacgccatggcccatacgggtgtgatcttctttctggccctcctgctatgcatagccttgctgagctcctactctatacatctgctgctgacctgcgccggtatcgcgggtattcgggcttatgaacagctgggccaacgcgcttttgggcctgctggaaaggtggtcgtcgctacagtgatctgcctacacaatgtgggagctatgtcatcatacctgttcattattaaaagcgaattaccactggtgattgggacttttctctacatggatcctgaaggcgactggttcctgaagggtaatctcctgattataatagtgtctgtgttaatcattctcccgttagctttaatgaaacatttaggctatctgggatatacatctggcctttcactgacatgtatgctttttttcctggtttctgttatctataagaaattccagctcgggtgtgcaatcggacacaacgagactgctatggaatcggaagccctagtggggctgccttcacaaggtctgaactcaagttgcgaggcacaaatgttcacagtggatagtcagatgtcatataccgttccaatcatggcatttgcctttgtgtgccactag

SEQ ID NO: 241531 - DNA, 1422 bp, synthetic construct
  misc_feature 1..1422: note = Description of Artificial Sequence: Synthetic coding sequence
  source 1..1422: mol_type = other DNA
atggccacacaagcgaagcggcctcgagtggccggacctgtggatggcggagacctggacccagtggcctgtttcctgtcctggtgccgaagggttggattggaactgagtcctaaagtctctgagcgggctggcggtcgaaggacccgcggaggcgcacgggctgccctgacttctcctcctgcccaggttgccgtatcccgacagggaaccgttgctggatatggcatggtggctcgagagtcggtccaggcaggggagctccttttcgtggtgcctcgggcagcccttctgtctcaacacacatgcagcataggcggtctccttgaacgagaacgggtggcactccaaagccagtccggttgggttccactgctgcttgccctcttgcatgaactacaggcaccagccagcagatggcggccttattttgccctctggcctgaactgggacgtttggaacaccctatgttctggcccgaggaggaacgccgatgtctcttacaagggactggcgtccccgaggcagtggagaaagatcttgctaatattcgctctgagtaccagagtattgtgctgcctttcatggaagcgcatccagacctattctcattacgggttcggtcactggagttatatcatcagctggtcgcgctggtcatggcctattcatttcaggaacccctcgaggaagaagaagacgagaaagagcctaactctcccgttatggtacctgcagccgacatcttgaaccacttggcgaatcacaacgccaaccttgaatacagcgccaactgccttcgtatggtcgcaacccagccgatacctaaaggacatgaaatatttaacacctacgggcagatggccaactggcagctcatacacatgtatggcttcgttgagccctacccggataatactgatgacacagccgatattcagatggtgactgtccgggaggccgcattgcaaggtaccaagaccgaagccgaaaggcacctggtgtatgagaggtgggatttcctgtgcaagctggaaatggttggagaagaaggggcattcgtgattggaagggaggaggtgttgacagaggaggaactgacgactactctgaaggtgctgtgtatgcccgctgaagagttcagagaacttaaagaccaggatggaggaggggacgacaaacgagaggaggggagcctcaccattacaaatatccccaaactgaaggcatcttggagacagctcctgcagaactcagttcttctcaccctgcagacctacgcgacagatctcaagacagatcagggactcctgagcaacaaggaggtctacgccaagctctcgtggcgggagcagcaggctctgcaggtccggtatggacagaaaatgatcctacaccaactcttggagctgacatcctag

SEQ ID NO: 241532 - DNA, 975 bp, synthetic construct
  misc_feature 1..975: note = Description of Artificial Sequence: Synthetic coding sequence
  source 1..975: mol_type = other DNA
atgggaccatggggtgagccagagctacttgtctggagacccgaagccgtagccagtgaacctcctgtcccagttgggttggaggttaaactgggcgcactggtcttgttgcttgtgcttactcttctgtgctccctcgtcccgatttgcgtgttgaggaggccaggggcaaaccacgagggttccgctagtcgtcagaaggctctctctctggtaagctgtttcgccggaggcgttttcctggcaacgtgcctgttagatttgctaccagattacctcgcagccatcgatgaagctctggccgcactgcatgtcacattgcaattccctctacaggaatttattcttgccatgggcttttttttggtcctggtgatggagcagatcactctggcatacaaggagcagagtgggccatctccgcttgaagagacgagggccctgctgggcacagtgaacggcggaccccagcactggcatgacggcccaggggtaccccaggcttctggcgctcccgcaactccttcagcactcagggcttgtgtcctcgttttctctctggccctgcattcagtgtttgagggactggcagtgggacttcagagagatcgagccagggcaatggaactgtgtctggcactgttactgcataagggtatcctggcagtgagcctgagtctcagactgctgcagtctcatctccgagcacaggtcgtagctggttgtggaatcctgttcagctgtatgacccccttgggtatagggctgggggcagccttggccgaatctgccggtcccctgcaccagttagcccaatccgtgctggagggcatggcagcaggcaccttcctctatatcacctttctcgaaatcctgccccaggaattggcatcatccgagcagcgtattctaaaagttatcctgctgttggctgggtttgcgctgcttacaggcctgctctttatccagatctag

SEQ ID NO: 241533 - DNA, 975 bp, synthetic construct
  misc_feature 1..975: note = Description of Artificial Sequence: Synthetic coding sequence
  source 1..975: mol_type = other DNA
atgggcccatggggcgagccagagcttctcgtgtggcggccagaggccgtggccagcgaaccccctgtacccgttgggctggaggtcaagcttggtgccctggtgctgctcctggttctcacgctactttgtagtctggtccccatctgcgtgctgaggaggccaggagctaaccatgaaggctccgcatcccgccaaaaagcactcagcctggtgtcttgtttcgcagggggagtgtttctggccacctgtctcctagacctacttccagattatctggcagccatcgacgaagctctggcagcactgcatgtgacgctgcagttccccctgcaagagttcattttagccatgggtttttttctggtccttgtgatggaacaaataacactggcatataaagagcagagcggaccttctccactagaggagacccgggctcttctggggacagtgaacggcggaccacagcattggcacgatggccctggcgtgccccaagccagcggtgctccggcaacacctagtgctctgagagcctgcgttctggtcttctcgttagccctccattccgtgtttgaggggctggcagtcggcctacagagagatcgcgctagagcaatggagctgtgcctggcacttttgctgcacaaagggattcttgctgtgtcactgagtttacgcctccttcagtctcatctgcgagctcaagtggtcgccggatgcggtatactgttttcgtgtatgacacctctcggtatcggcctgggagcggctctcgcggagtccgccggaccccttcatcaactagcccagtccgttctggagggcatggccgcaggaactttcctgtatattacattcttagagattttgccccaagagctggccagttccgaacaacggattttgaaagtgatactccttttggcgggtttcgctctcctgaccggattactttttattcagatctag

SEQ ID NO: 241534 - DNA, 975 bp, synthetic construct
  misc_feature 1..975: note = Description of Artificial Sequence: Synthetic coding sequence
  source 1..975: mol_type = other DNA
atgggcccttggggagagccagagctgttggtgtggaggccagaggctgtggccagcgagccccctgtaccggttggacttgaggtcaagttgggagctctggtactgttgctggtattgacactgctgtgctccttggttccaatctgcgtgctgaggcgtccaggtgcgaaccacgaaggcagtgcctccagacagaaggccctgtccttggtgtcctgtttcgctggtggggtctttttggctacctgtctgctagacttgctcccggattatctggctgcaattgatgaggcgctggctgctctgcatgtgaccctgcagtttcccctgcaggagttcatcctcgccatgggctttttcctcgtgctggttatggagcagatcactttggcgtacaaggagcagtccggccctagcccactggaagaaacaagggcacttctggggacagtcaacggaggacctcagcactggcatgacggacccggtgtgcctcaggcatccggcgctcccgctacaccctctgcactgcgggcttgcgtgctagtgttctctctcgcgctccatagcgtgttcgagggtctcgctgtggggctgcaacgagatagagcacgtgcaatggagctgtgtctggctctgctcctccataaagggatcctagccgtgtctctctccctcaggctgttgcagtcgcaccttagagcacaggtcgttgctggctgcgggattctgttctcttgtatgacaccgcttgggattggcttgggtgcggctctggcggagtccgctggccctttgcatcagctcgcccagagcgtgttagagggaatggccgctgggaccttcctgtatatcacttttctggagatcttgcctcaagagctagcttccagcgagcagaggattctgaaggtaatcttgctcctggccggttttgccttgctgactggactgcttttcatccagatatag

SEQ ID NO: 241535 - DNA, 975 bp, synthetic construct
  misc_feature 1..975: note = Description of Artificial Sequence: Synthetic coding sequence
  source 1..975: mol_type = other DNA
atggggccatggggcgaacctgagctcctggtatggagacctgaggctgtggctagcgaacccccagtgcccgtagggctcgaagttaagttaggagcattggtgctgctgctggtacttactctgctctgctccctcgtaccaatttgtgtgctccgccgaccgggagccaatcacgagggcagtgcttcgcgccagaaagcgctatcactggtgagctgttttgcgggaggagtctttctggccacctgtcttctggatttactgccggactacctggctgcaatagatgaggctttggctgcgctgcatgtgaccctgcagttcccgctccaagaattcatccttgcgatgggatttttcctggtgctcgttatggagcaaatcactttggcttacaaagaacagtctgggccatcaccattagaggaaactagagctttgctggggacggtgaacgggggaccacagcattggcacgatggacccggtgtcccccaagcatcaggggctccggcaaccccttctgctcttcgcgcttgcgtgctcgtcttcagtctcgcactgcatagcgtgttcgagggcctcgctgttggactgcaacgagatcgggctcgcgcaatggagctgtgtttagctctgttactccataaggggattttggccgtgagccttagcttaaggttactgcagagccacctcagggctcaggtcgtggctggctgcgggatcttattttcttgcatgactcccctgggaattggactgggcgcagctctggctgagagtgctggtccactccaccagttggctcaaagtgtattggagggcatggctgccggaacctttctttacatcaccttcctggagatcttgccccaggagcttgcctcttcagaacagagaatcctgaaggtaatcctgctgcttgccggatttgctttgctcacaggcttactctttatccaaatctag

SEQ ID NO: 241536 - DNA, 723 bp, synthetic construct
  misc_feature 1..723: note = Description of Artificial Sequence: Synthetic coding sequence
  source 1..723: mol_type = other DNA
atggggccatggggagagcctgagttactagtctggcggcctgaagctgttgcgtccgagccaccggtcccagttggactcgaggtgaagctgggtgccctggtgttgctgctggtgctcacccttctctgcagtttagtgcctatctgcgtgctgcggaggcctggcgcaaaccacgaaggttccgcatcacggcaaaaggctctgtcactagtatcttgcttcgctgggggagtatttctagcaacgtgtcttcttgacctactgccagactacctggcagccatcgacgaagcactagccgcacttcacgtgactctgcaattccccctccaagagtttattctggccatgggattttttctggtactggtgatggaacagattacccttgcatacaaggaacagtcaggaccctccccactggaggaaacccgggcactgctgggtaccgtcaatggaggccctcagcactggcacgatgggccaggtgtgcctcaggcctctggggcacccgctactccctccgcccttagggcctgcgtgttggttttctcgctcgccctgcactccgttttcgaaggcctggcggtgggcctgcagagggaccgggcacgtgccatggagctgtgtctggcactgctcttacacaagggcattctcgccgtaagcctatctctgcggcttctgcaatctcaccttagggcccaagtggtggcttag

SEQ ID NO: 241537 - DNA, 621 bp, synthetic construct
  misc_feature 1..621: note = Description of Artificial Sequence: Synthetic coding sequence
  source 1..621: mol_type = other DNA
atgggaccctggggtgaacctgaattactcgtgtggaggccggaggccgtagcatctgagccccctgtccccgttgggctggaagtaaaactcggggctctggtgctgctgctggttttgacattactctgctccctcgtcccaatttgtgtgctgcgaagacctggagcgaaccatgaagggtccgctagtcggcagaaagctctgagtttggtctcgtgcttcgctggaggtgtgtttctggcgacctgcctgctcgatctgcttcctgattatctggccgcaattgacgaggcattggccgctctgcacgtcaccctccagttcccacttcaggagttcattcttgcgatgggcttctttctggtactcgttatggaacaaatcacactggcatacaaggagcagtctggaccaagcccccttgaggagacgagagctctgctaggcacagtcaacgggggaccccagcattggcatgatggaccgggagtgcctcaggcatccggggctcctgccacacccagtgctctgcgagcctgcgtcctggtgtttagcctggccctgcactcggtgttcgagggattggccgtcggtctgcagcgtgatcgggcacggtag

SEQ ID NO: 241538 - DNA, 966 bp, synthetic construct
  misc_feature 1..966: note = Description of Artificial Sequence: Synthetic coding sequence
  source 1..966: mol_type = other DNA
atgggcccatggggggagcctgaactgttggtctggcggcctgaggcagttgccagcgaacccccagttccggttggtctggaggtgaaactgggcgctctggtcctgctactggtcttgactttactgtgttctctcgtgccgatctgcgtattgaggcggcctggcgcaaaccacgaaggatctgcctcaagacagaaggctttgtcccttgtcagctgcttcgccggtggagtatttttggccacttgtttgctggacctgctgcccgactacctcgccgctatcgacgaagcgctagctgctctccatgtgacacttcagttccccctgcaagagtttatcctggcgatgggtttttttctcgttctcgtaatggaacaaataactctggcctacaaggagcagtccggcccttcaccccttgaggagacacgggcactgctgggaacagtgaacggaggaccccagcactggcatgacggccctggggtaccgcaagcctctggagcaccggctacaccttccgcactgagagcctgcgtcctggtgttctccttggcactgcattccgtcttcgaaggcctcgcagtcggccttcagcgagatagggcaagggcaatggaactgtgtctggccctgctcctacacaaaggaattctcgctgtcagtctgtctttacgcctattacagtcccatctccgggcacaggttgtcgctggatgtggaatcctgttttcctgcatgacaccccttggtataggattgggtgctgcactggccgagtctgcaggaccactgcatcagctggcacagtccgtcttggagggcatggcggcaggcactttcctgtacataacttttctagagatcctgcctcaggagctcgcttcatccgagcagcgcatcctcaaggtcattttgctcctggccggatttgcactcttaactggattgcttttttag

SEQ ID NO: 241539 - DNA, 669 bp, synthetic construct
  misc_feature 1..669: note = Description of Artificial Sequence: Synthetic coding sequence
  source 1..669: mol_type = other DNA
atgaaagcgcagctgcagttccccctacaggagtttattctggccatgggcttcttcttggtcctggtgatggaacagataacgcttgcctataaagagcagtccggaccaagccccctggaggaaaccagggcgctgcttggcaccgtgaatggaggcccacaacactggcacgatggccctggagtgccgcaggcttctggagctccggcaacaccgagcgcactgagagcatgcgtccttgtttttagtctggcactgcactccgtgttcgagggcttggctgtcgggcttcagagagacagagcaagggcgatggagctttgccttgcactactcctccacaagggcatattggccgtcagcctctctttaaggctgcttcaatctcacctgcgggctcaagtggtggctgggtgtggtatacttttctcgtgcatgacacccctgggcattggccttggggcagcccttgcagaatccgccggtccgctccatcaactggcacagagcgtgctagaaggcatggcagcaggaacgtttctctacattacctttctggaaattctgccacaggagctggccagcagtgagcaacgcatcctgaaggttatccttctcctggctggctttgccttactcactgggctgcttttcatccaaatatag

SEQ ID NO: 241540 - DNA, 942 bp, synthetic construct
  misc_feature 1..942: note = Description of Artificial Sequence: Synthetic coding sequence
  source 1..942: mol_type = other DNA
atggggccatggggcgaacccgagctactggtgtggcgtcccgaggccgtcgctagcgagcctcccgtgccagtcggccttgtcctgacactcctgtgctctctcgtgcccatctgtgtcctgcgacgtccaggagctaatcacgagggatctgctagccggcagaaagccctgagcctcgtttcatgcttcgccggtggcgtcttccttgctacctgcttgcttgacctcttgccagattacctggctgctatcgatgaggcactcgccgcattgcatgtcacgttacaattcccattacaagagtttatcctagctatgggcttctttcttgtactggtcatggagcagataacactggcctacaaggaacagtccggacccagcccgctggaggagactcgtgcgctgctcggtactgtcaacggcggtccgcaacactggcatgatggtcctggtgtaccacaggcatctggcgcacctgcaaccccctcggctttacgggcttgtgtcctcgtgttctctctggcgctgcatagtgtgtttgaaggtctcgccgtgggcctgcaacgagatagagcaagagccatggaactctgtctggctctcctcttacacaaggggattctcgcggtgagcctcagcctgcgactactccagtctcacctgcgggcacaggtagtggcaggatgcggcatcttattttcttgtatgactcccttagggataggcctgggagccgcactcgccgagagcgccggaccactccaccagctggcccaatccgtattggaaggaatggcagccggaaccttcctgtacatcacctttctggagatcctgccgcaggaactcgcaagctcagaacagaggattttgaaagtcatattactattggcgggttttgcgctcctcactgggcttctgttcattcaaatctag

SEQ ID NO: 241541 - DNA, 1095 bp, synthetic construct
  misc_feature 1..1095: note = Description of Artificial Sequence: Synthetic coding sequence
  source 1..1095: mol_type = other DNA
atgccaggttgtccttgtcctggttgtggtatggctggcccaagattgctgtttctcacagcactggctttggagcttctcgagagggctggtggcagccagcctgcactcaggagccgcggaacggcaacagcctgcagactcgacaacaaggagtccgaatcttggggtgcactgctgtcaggcgagcgtctggacacttggatctgcagtctgttggggtcactcatggtggggctgtccggcgtgttccctctcctggttatacctttggagatggggacaatgctcagaagtgaagccggagcctggcgactgaagcagcttctgagcttcgccttggggggactgttggggaatgtcttccttcacctgcttccagaggcttgggcatacacatgttctgcctctcccggaggcgaaggacagtccctccagcagcaacagcagcttgggctctgggtgatcgccggaattctaacttttttggcactcgaaaagatgttcttggatagtaaagaggaagggacctcacaggcacctaacaaggaccccaccgctgcagctgcagctctaaacggtggccactgtctcgctcagcccgctgcagaacccggactgggggcagtagttcgctccattaaagtgtccgggtacttgaatctcctagctaacactattgataacttcacccatggcctggctgtagctgcctccttcctggtctcaaaaaagattggcctcttgactaccatggccatcctgttgcatgaaatcccccacgaggtcggagacttcgcaattctgttgagagccggatttgatagatggtcagctgccaagctgcagctgtcaacagccttggggggtctcctgggggctggcttcgcaatctgtacccagagcccgaaaggagtggaagagactgctgcctgggtgctaccatttacctcaggtggcttcctatatattgcactggttaatgttcttcccgatctccttgaggaggaggacccctggcggtccctccagcagttattgcttctgtgtgctggcattgttgtcatggtcctgttttccttattcgtggactag

SEQ ID NO: 241542 - DNA, 1116 bp, synthetic construct
  misc_feature 1..1116: note = Description of Artificial Sequence: Synthetic coding sequence
  source 1..1116: mol_type = other DNA
atgccaggctgtccttgtcccggttgcggtatggccggtcctagactactctttctaactgccctggccctagagctcctggagcgggcaggcggttcacaacccgctctacggtcaagggggaccgccacagcttgcaggcttgataataaggagagcgaatcgtggggagcacttctgagcggcgaacgtttggatacatggatttgctcattgctgggtagcttaatggtgggactgagtggggtcttcccactgctcgtgattcctctcgagatgggcaccatgctgagatctgaggccggtgcctggcggttaaaacagctcttatccttcgccctggggggtctattgggaaatgtattcttacacctacttcccgaggcgtgggcctacacatgtagcgcaagtccaggcggtgaaggccagtctctccaacagcaacagcagctgggtttgtgggtgatcgcgggaattctcacctttctcgcgctggaaaaaatgttcctcgattccaaagaagagggaaccagccaggcgccaaacaaagatccgaccgctgccgctgccgcattaaacggtgggcattgccttgctcagccagctgccgaacctgggctgggggctgtggtccgcagcatcaaggtgagcggctacctgaacctgctggccaacactatcgataattttactcacggcctggctgtggccgcaagtttcctggtgagtaagaagattgggcttcttacaactatggcgatcttactgcacgaaataccccacgaagtaggggattttgccatacttctgagagccggatttgacaggtggagcgccgctaagctccagctctctactgccttggggggactgctcggggcaggctttgcgatttgcacccaatcaccaaaaggtgtagtaggatgtagtccagcagcagaagaaactgccgcatgggtactgccttttaccagtggcggttttttatatattgcacttgtcaatgtgcttccggacctcctggaagaggaggatccctggcggtccttgcagcagctgctcttattatgcgctgggatagttgtcatggttttgttttccctctttgtggattag

SEQ ID NO: 241543 - DNA, 930 bp, synthetic construct
  misc_feature 1..930: note = Description of Artificial Sequence: Synthetic coding sequence
  source 1..930: mol_type = other DNA
atggagcaactgctgggtataaagttgggttgccttttcgcgctcctagcgctgacccttggatgtggacttacacccatttgcttcaagtggttccagatcgacgcagctaggggccatcaccggttagttctgaggctgttgggctgtataagcgcaggggtgtttctcggtgccggttttatgcacatgacggcggaagctctcgaggagattgaatcccagatccagaagtttatggtccagaacagatccgcttctgaacgtaatagctcgggggacgccgatagcgctcatatggagtatccctatggtgagctaatcattagtttgggattcttcttcgtcttcttcctggagagcttggctttgcaatgttgcccgggagctgcgggaggtagcacagtgcaggatgaagaatgggggggagcacacatttttgagcttcattctcacggacacctcccttccccctcaaaggggcctctgcgggcactcgtactgcttttgagtctgagctttcattcagtgttcgagggactggctgtcggcctccagcctaccgtggccgctacagtacagttgtgtctggccgtgctcgcacataagggcttggtggtgttcggggtgggaatgcgcctcgtgcaccttgggacatctagtaggtgggctgtcttttcaattctgctgctggcccttatgtctcctctgggacttgcagtcggattggccgtgaccggcggagattccgaagggggtagaggccttgctcaggccgtgctagaaggcgtggctgcgggtacattcctctacgtgactttcctcgaaattctccctagagagctcgccagtccagaggctcccttagctaaatggtcctgcgtcgcagctgggtttgcatttatggcgttcattgcactgtgggcctag

SEQ ID NO: 241544 - DNA, 945 bp, synthetic construct
  misc_feature 1..945: note = Description of Artificial Sequence: Synthetic coding sequence
  source 1..945: mol_type = other DNA
atggtgaaattgctggtcgctaaaatcttgtgcatggttggggtgttcttcttcatgctccttggaagcctgcttcccgtgaagatcattgagaccgatttcgagaaggcgcatcggtccaagaagatcctgagtctgtgcaacacattcggtggtggcgtattcctggccacttgtttcaacgctttattgcccgctgtgagagaaaagctgcaaaaggtcctgagcctcggacacatcagcaccgattaccccctggcggagactattctcctgctcggatttttcatgaccgtgtttttagagcagctgatcctcacttttagaaaagaaaaacccagcttcatcgacctcgagacttttaacgccggatcggacgtcgggtccgacagtgaatacgagagccccttcatgggcggagcaagaggccatgccctgtacgtggagccacatgggcacgggccaagcttgagtgttcagggcctgtctagggcctcccctgttagactgctctctttggctttcgcactgtccgcccactctgtttttgagggcctcgccctcgggctccaggaggaaggcgagaaagtggtcagcctttttgtgggagtcgcagtgcatgagactctggtggctgtggccttaggcatctcaatggcgaggtcggctatgcctctgcgggatgctgccaagttagccgtcacagtgagcgcaatgattcctctgggcatcggcctggggttgggcattgagagtgcccaaggtgtccccggatctgttgccagcgtgcttctgcagggtcttgcagggggaacgtttctcttcatcacttttctggagattctggctaaggagctggaggaaaagtcagatcgcctgctcaaagtgttgttcctggtcttaggctacacagtactagctgggatggtcttcctgaagtggtag

SEQ ID NO: 241545 - DNA, 318 bp, synthetic construct
  misc_feature 1..318: note = Description of Artificial Sequence: Synthetic coding sequence
  source 1..318: mol_type = other DNA
atggtgaagctgctcgtggcgaaaatcctgtgcatggttggagtgttctttttcatgttgctgggctcgctgctgcctgtgaagattatcgagacagatttcgagaaagcacatcggtctaagaagatcctgtccctctgtaatacttttgggggaggggtgtttctggccacttgttttaatgcgcttcttccagcagtccgggagaaagtccgcgcaccgtgggctctcgccgctgctttggggacgctgtggccgagagattccgacgctttctcaactctaatgccctcaagcgtgaaagctctgatgttgtag

SEQ ID NO: 241546 - DNA, 972 bp, synthetic construct
  misc_feature 1..972: note = Description of Artificial Sequence: Synthetic coding sequence
  source 1..972: mol_type = other DNA
atggtaaaattgctggttgctaagatcttgtgtatggtgggggtcttcttcttcatgctactgggtagcctgctgcctgtcaaaatcatcgagacagacttcgagaaagcacacaggtctaaaaagatccttagcctctgcaacaccttcgggggtggcgtttttctcgcaacatgttttaatgccctgctgccagctgtaagagaaaagctgcagaaggttctgagcctggggcatatatctaccgactatccattggccgaaaccatcctccttctgggcttctttatgacagtattcttggagcagttaatcctcacatttcgaaaagagaagccttctttcattgaccttgaaacattcaacgcaggcagcgacgtgggttcagattcggagtacgagagcccctttatgggtggcgctcgaggacacgccttgtatgtcgaaccccacggacacgggccatctctgagtgtccaggggttgtcccgtgccagcccagtgagactactgagcctggcctttgccctctcggcgcacagcgtctttgagggactggctttaggcctgcaggaggagggagagaaggtcgtgagcctttttgtcggcgtggctgtgcatgagacactggtggccgtggcacttggaatttctatggctcggagcgcgatgcccctgcgcgatgccgcaaagctggcagtcaccgtgtcagcaatgatccctttgggtatcggactggggctgggaatcgaatctgcacagggggtacctggcagcgttgcttcagtcttgctccaagggctggctggtgggacctttctttttatcacgtttctggagatccttgcaaaagaattagaggagaaatctgataggttgcttaaggtgctcttcctggtcctgggctataccgtactggctggaatggtgtttctgaaatggatctctccacctgaacccagggtgtcttag

SEQ ID NO: 241547 - DNA, 1869 bp, synthetic construct
  misc_feature 1..1869: note = Description of Artificial Sequence: Synthetic coding sequence
  source 1..1869: mol_type = other DNA
atggtcgatgtggtcggccttgagagggagacaggaccgagaggctcgccgtggcccggtctgccacttccatccctggtgggcccagcccctcttctgacttgtctgtgccctcagtgtctgtctgtggaggatgcactggggctgggagagcctgaagggtcaggcctccccccaggcccagtactggaggccagatacgtggctcgcttgagcgcagctgccgtcctttatctatcaaatccagaaggtacatgtgaggatgcccgtgcaggattgtgggcctctcacgccgatcacctgctcgccctcctcgaatcacctaaagctctaacccctggcctgagctggctcttgcagagaatgcaagccagggctgctggacagacgcccaaaaccgcctgcgtggatataccacagctactggaggaggccgtaggtgcaggcgcaccaggatccgcgggaggagtgctcgctgcgctgctggatcacgtgaggagtgggagctgctttcacgcacttccaagtccacagtactttgtggacttcgtctttcagcaacattcttccgaggttccaatgactctagccgaactgtccgctctgatgcagcggctgggcgtaggacgggaggcacacagcgaccattcccatcgacaccgtggagctagctcctgggatcctgttcccctgatcagctcttccaatagtagctctgtgtgggatactgtttgcctatcagctcgcgatgtcatggcagcctatggactttcagagcaagccggtgttacaccagaggcttgggcacagctgagccctgctctgctgcagcagcagctctccggggcatgtacgtctcagtcacgccctcccgttcaagaccagctgtctcagtccgagcggtatctctacgggtccctcgccaccctgctgatttgtctttgcgccgttttcggattactgttgttaacgtgtacaggctgtcgcggtgtgacacactatatcctccagactttccttagtctggcggtcggcgcacttactggagacgctgtgctgcatttgacgcccaaggttttgggactgcacacccattccgaggaggggctgagcccacagccaacctggcggctgctggcaatgctggcgggattgtatgccttcttcctgtttgaaaacctgtttaatcttctgttaccccgagatccggaagacctcgaagatggtccctgtggacattcttcccactcacacggcggacactcccatggcgtgtctctacagctggctcccagcgagctccggcaacctaaacccccacatgaggggagtcgagcagacctggttgccgaggaatctccagaattactgaaccctgagcctaggagattgtctcccgagcttaggctactgccctacatgattacgctgggcgacgctgtccataatttcgcagatggcttagctgtcggggcagccttcgcttcttcgtggaagaccggcctagccactagcctggctgtgttttgccacgaactaccccacgagcttggagacttcgctgcgttgctgcatgccggtctgagtgttagacaggccctgctgcttaacctggcttccgcactaactgcgttcgccggactgtatgtggccctggccgtgggggtttccgaggaaagcgaagcttggattctcgccgtcgccaccgggttatttctgtatgtggctctatgtgatatgctgcctgccatgttaaaggtgagggacccccgaccttggctcttgtttttactccataatgtggggctgttgggcggttggacagtcctccttctgctgtctctctacgaggatgatatcaccttctag

SEQ ID NO: 241548 - DNA, 1944 bp, synthetic construct
  misc_feature 1..1944: note = Description of Artificial Sequence: Synthetic coding sequence
  source 1..1944: mol_type = other DNA
atggctagtttggtgtcactcgagctggggcttctgttggctgtgctggtagtcacagctacggccagcccacctgcgggtttgctgtcactactcaccagcggacagggggctctggaccaagaggctctgggtggcctccttaacaccctcgccgaccgcgtgcactgcgctaacggcccatgtggtaagtgtttgtccgtggaggatgcactaggtctgggagaacctgaaggctccggtcttccaccgggaccagtactggaggctaggtacgttgcccgattgagtgctgctgccgtgctttacctgagcaatcctgaaggcacatgtgaagatgccagggccggactatgggcatcacacgctgatcatctacttgccttgctggagtcacctaaagcccttaccccgggactgtcatggctactgcaacggatgcaggcgagagccgctggtcaaactcctaagactgcgtgtgttgacataccccagctgctggaggaagccgtgggggctggcgcaccaggcagcgccggaggggttctcgccgctctgctggaccacgtcagatctggatcctgctttcacgccctcccttctccacagtatttcgtggatttcgtattccagcagcactcctccgaggtaccgatgacgttagctgaactgtctgccctgatgcaacggttaggtgttggccgtgaagcccattccgatcacagtcatcgccacaggggcgctagttcatgggatcccgttccacttatctcctccagtaacagtagcagcgtctgggacaccgtgtgcctatcagccagagacgttatggccgcttacggattgtctgagcaggctggtgttacgcctgaggcctgggctcaactctctccagctttactgcaacagcagttgtctggggcatgcaccagccaatccagacccccagtgcaagatcagctgtctcagagcgagcgttatctctatggctccctggcgacactgctcatttgcctgtgtgcagtctttggactattacttttaacatgcacgggctgtcggggtgtgacacactacattttacaaacgttcttgtctctggccgttggagcgctgaccggtgacgctgttctacaccttactccgaaggttctggggcttcacacacatagcgaagaaggcctttccccacaacccacatggaggttgttggccatgcttgcaggtctctatgcttttttcctgtttgagaatttgttcaatctgctgttacctcgggatcccgaagatctggaggatggcccatgtggccactcctctcatagccacgggggtcactctcatggggtcagcctgcagttggctccctcagagcttcgacagcccaagcccccacatgaaggcagccgcgctgatttggtcgcggaggaatcccccgagctgcttaacccagagccccgacggctcagtcccgaactgcgcctgctgccctacatgataacactgggcgacgctgtccacaactttgccgatggcctggccgtgggagctgcctttgcctcatcctggaagactggcctcgcgacgagtctggcagtgttctgccatgaactcccgcatgagttgggagattttgccgctctgttgcatgccggactgtccgtgaggcaggctctgctgctcaacctggcaagtgcactgacagctttcgcaggtttgtacgttgccctagccgttggcgtgtcggaagagtccgaggcctggatcctagccgttgccacaggcctttttctttacgtggctttgtgtgatatgctccctgcaatgctgaaagttagagatccacgtccatggctgctgttcctgctgcacaacgtggggctgctgggaggctggactgttctccttctgctgtctttgtacgaagacgatatcacgttttag

SEQ ID NO: 241549 - DNA, 1410 bp, synthetic construct
  misc_feature 1..1410: note = Description of Artificial Sequence: Synthetic coding sequence
  source 1..1410: mol_type = other DNA
atggctcggggacttggggctccccactgggtggctgtgggcctgctgacatgggcgacccttggcctgctggtggcgggacttgggggtcacgacgatcttcatgatgacttgcaggaggacttccacggccacagtcacaggcattcccatgaagactttcatcacggtcattcccacgcacatggacatggacatacccacgaatcgatctggcacggccatactcacgaccacgatcatgggcacagtcacgaggaccttcaccacgggcattcccacgggtactcacatgagagtttgtaccatcgcggacacgggcatgaccacgagcacagtcacggcggatacggagagagcggagccccagggatcaagcaggatctcgacgccgtaacactgtgggcatacgccctcggcgctacggtgctaatatcagccgcacccttttttgtgctcttcttaattccggttgagtcaaacagtccaaggcatagatcgctgttgcaaatcctgttgtcctttgcaagcggcggactgcttggagacgccttcctgcacctaattcctcacgccctggagcctcatagccatcatactttagaacagcctggccatgggcactcacattccggccagggtcccatattgagtgtaggactttgggttctttctggtatcgtggcttttcttgtggtggagaagtttgtgagacatgtcaaaggcggacatggccactcccatgggcatggtcatgcccactcccatacacggggtagccatggtcacggcagacaggaacgcagtactaaagagaagcagagctctgaggaggaggagaaagagacgcggggagtccaaaagagacgcggaggctccaccgttccgaaggatggccctgtcagaccacaaaacgccgaggaggagaagcgaggactggatcttcgggtcagcggatacttgaacctagccgcagacctcgcacataatttcactgacggcttggccatcggcgctagtttccgcggaggcagaggattgggaatcctcacaaccatgaccgtgcttctacacgaggttccccatgaagtgggcgattttgccatccttgtgcagagtgggtgctccaagaagcaggcgatgcggctgcaactgctcacggccgtgggagctctggccggtaccgcttgtgctctcttaactgagggaggcgctgtggggtcggaaatcgcaggcggagccggacccggttgggttctcccctttacggctggcggatttatatatgtggcaactgtgagcgtgctgccagaactgctccgggaagcatcccctttgcagtcccttctggaagtcttggggttgcttggcggagtgatcatgatggtgcttatcgctcatcttgagtag

SEQ ID NO: 241550 - DNA, 1410 bp, synthetic construct
  misc_feature 1..1410: note = Description of Artificial Sequence: Synthetic coding sequence
  source 1..1410: mol_type = other DNA
atggctcgaggactgggagcaccacactgggtcgccgtcggtttattaacctgggccacgcttggattactggtggcaggtttgggcggtcacgacgaccttcacgacgatcttcaagaagatttccacggccacagccaccggcattctcacgaggattttcaccatggccactcacatgctcatggacatggacacacgcacgaaagtatctggcatggccatacgcacgatcacgaccacgggcatagtcatgaggacctgcaccacggtcactctcacggatactcacatgagtctctgtaccacaggggccatggccacgaccatgagcactcacatgggggatatggggagtctggagcgcctggaattaaacaggatttagacgctgtgacgctgtgggcatacgcgctgggagcgacagtgctgattagcgccgcacccttttttgtgctcttcttgattcccgtcgagtccaacagtcccagacatcggagtctattacagattctcctaagcttcgccagcggcggattactcggagacgcatttctgcacctgatccctcatgccctcgagccccacagccaccatactctggagcagccgggacacggtcacagccattcaggccagggtcccatcctcagcgtggggctgtgggtgcttagcggaattgtcgcctttctggttgtggagaaatttgtccgccatgtaaaaggcggacacggtcatagccacggccacggtcacgctcattcgcacacccggggaagtcacggccatggcaggcaagaacggtcaaccaaagaaaagcagagcagcgaagaggaagagaaggaaacaagaggcgtccagaagagacgaggcggaagtaccgtgcccaaagatggcccagtgagacctcagaatgctgaggaggagaaaagaggactcgacctccgggtcagcggctacctcaacctggccgcagacttggcccacaattttactgacggcttggcgatcggcgcatccttcagaggaggaagagggctgggcattctgaccaccatgacagtcctgctccacgaagtgccacatgaagtcggtgacttcgctatcctggtccaatccggttgctctaagaaacaggctatgaggcttcagcttctcacagcggtcggcgcacttgccggaaccgcatgcgccctgctgacagaggggggtgctgtggggtcagagatcgctggaggcgctggtcccggatgggttttaccctttaccgccggtggctttatttacgttgcgaccgtgagtgttctccctgaattgctcagggaggcttcgccactgcagtccctgttagaagtattaggccttttgggcggagttatcatgatggttctgattgcccatctggaatag

SEQ ID NO: 241551 - DNA, 1410 bp, synthetic construct
  misc_feature 1..1410: note = Description of Artificial Sequence: Synthetic coding sequence
  source 1..1410: mol_type = other DNA
atggctcgcggtcttggtgcccctcactgggtggccgtgggcttacttacctgggccaccctggggttgcttgtagcaggattgggcggacatgatgatctgcatgacgatctccaggaggattttcacggccactcccatcgtcattctcacgaagattttcaccatggtcattcccatgcccacggccacggacatactcatgagagcatttggcacggccacacgcatgatcatgaccatgggcactcgcacgaggatttgcatcatgggcattcacatggttatagccacgaatccctctatcataggggccacggccacgatcatgaacactctcacggcggatacggcgagtctggagctcctggcattaagcaggatctggacgccgtgactctgtgggcttatgccttgggagcgacggtgctcatctcagctgccccattttttgtgctattcttaattcctgtggagtctaatagtcccagacatcgctcactgttacagatcttacttagctttgcctctggcggattgctgggcgatgctttcctgcatctcatcccgcacgcattagaaccccactcccatcatacactggagcagcccggacatggccactctcacagtggccagggccctattctgtcagtggggctatgggtgctttcagggatagttgctttcttagttgtcgagaaattcgtgagacacgttaagggcggacacggacactcccatggacatgggcacgcacactcacataccaggggttcgcatggtcatggacgccaggaaaggtccacaaaagaaaagcagtccagcgaagaagaggaaaaagagacaaggggcgtgcagaaacgaagaggcggatccaccgtacctaaagatgggccagtgcgccctcagaacgctgaagaggagaaacggggtctggacttgcgggtgtccggctatctcaatctggctgccgacctagcccataatttcaccgacggccttgctatcggcgcatcctttcgaggcggtcgtggtctcggcatcctgacaaccatgactgtcctcctccacgaagtgccacacgaggtgggggacttcgcgatactcgttcaatcaggctgctctaagaaacaggcgatgcggctgcaattactgaccgctgtcggggcactggccggtacagcctgtgccttactcacagaagggggagctgtcggctccgagatcgccggtggcgctggcccaggatgggtgctcccatttaccgctggtggcttcatttatgtggccacagtgtccgtgcttccagagctgctgcgggaggcatcccctctgcaatcgctgctcgaggttcttggtctgcttgggggagtgattatgatggttttaattgcccaccttgagtag

SEQ ID NO: 241552 - DNA, 1410 bp, synthetic construct
  misc_feature 1..1410: note = Description of Artificial Sequence: Synthetic coding sequence
  source 1..1410: mol_type = other DNA
atggccaggggcctcggtgcacctcactgggtggctgtaggactcctgacctgggccaccctcggcctgctcgtcgccggactgggcggacatgatgatcttcatgacgaccttcaagaggactttcacggccactcacaccggcatagccatgaggatttccaccacggtcacagtcatgcccacgggcacgggcacacacatgagagcatctggcatggccacactcacgatcacgaccacggacatagtcacgaggatctgcatcacggccatagccatggatacagtcacgaatccctgtaccatcgcggtcacggtcacgaccacgagcactctcacggcggatatggtgagtccggggctccagggatcaaacaggatctagacgcagtgactttgtgggcttatgccctgggagctacagtgctgattagtgcagcccctttttttgtactcttcctgatccctgtggaatcaaactcacctaggcaccgttcactgctgcagattctcctgtcctttgcatccgggggactccttggtgacgcctttctgcacctgatcccacacgccctggagccccactcacatcacacattggaacaacccggacacgggcactcacatagcggacagggccctatcctgagtgtgggcctctgggtattatccgggatcgtcgcctttctggtcgtcgagaagtttgtacggcacgtcaaagggggtcacggccattcacatggacatggtcacgctcattctcacacccgcggatcacacggacacggaagacaagagcggagcactaaggaaaagcaatcatccgaagaggaggaaaaagaaacgcgcggagtgcagaaaagacgaggcggatccacagtacccaaagacggacccgtgcgcccacagaacgcagaggaggagaagagaggcctggacctgagggtcagtggctacctaaaccttgctgctgatctcgcacacaattttacagacgggttggctatcggcgctagctttcgcggtggacgcggacttgggattctcaccacaatgacagtcctgctccacgaggttcctcatgaagttggggattttgccatcctggtgcagtctggttgttcaaaaaagcaggccatgaggctgcagctccttaccgctgttggcgcactggctggaacagcatgcgccctgttgactgaaggcggagccgtggggtctgagatcgccggaggcgcaggacctggttgggtccttcctttcacagccggagggttcatatatgtggccacagtctcagtgctcccagagctactgagagaagcttcgcctctacagtctctgctcgaggtactgggtcttctcggaggggtaatcatgatggttctgatcgcgcacctggagtag

SEQ ID NO: 241553 - DNA, 663 bp, synthetic construct
  misc_feature 1..663: note = Description of Artificial Sequence: Synthetic coding sequence
  source 1..663: mol_type = other DNA
atggactcgtcgttgcctgaatgtcgccatattggcaaaggcatccgcgctaaagtcgagcggaactttctgttcagtcgggacctcaaggcaggacttcccagacctagtaagccaggaaaagaaaggatcccagagcctgcgctcggagccaccgtgctgatttctgcggcaccgtttttcgtgctgttcctgatccctgtagaatcgaactctccgagacacaggagcctgctccagatcctgctgagcttcgcctctggaggacttctgggtgatgcctttcttcatctcattccacacgctctggaaccccactctcaccataccttagaacagcctggccacggacacagccacagtggccaagggcctatcctgagcgtcggcctctgggttctttctgggatcgttgcttttttagttgtggaaaagtttgtaagacacgtaaaggggggacacggccactcccacggtcacggtcacgcacattctcacactcggggatcgcacggacacgggagacaggagcggtccactaaggaaaagcaatccagtgaagaggaagagaaagaaacccggggagtgcagaaacgcagaggaggctccaccgtccctaaggacggccctgttaggccgcagaacgcggaagaggagaagtag

SEQ ID NO: 241554 - DNA, 663 bp, synthetic construct
  misc_feature 1..663: note = Description of Artificial Sequence: Synthetic coding sequence
  source 1..663: mol_type = other DNA
atggatagcagtctgcccgaatgcaggcatatcggaaaaggtataagggcgaaggtagagcgcaacttcttgttctcccgcgacctgaaggccggtctgcctcggccatctaagccaggcaaggaacgtatcccagagcccgctctgggcgcaacagtgcttatctctgcagctcctttttttgttcttttccttattccagtggaatccaatagtccacgccaccggtccctcctgcagatcctgctgagctttgccagcggaggcttactcggcgacgcattcttgcacctgatcccacacgccttggaacctcactcccatcacacccttgagcaacctggccacggccactctcacagtggacagggccctattctcagtgtcggcctatgggtgttatccgggatcgtggcgttcctggtcgttgaaaaattcgtgcggcacgttaaaggaggtcatgggcactcccatggccacggccacgcacactcgcatacaagaggatcacatggacacggaaggcaggagcggtctacaaaagagaagcagagcagcgaggaggaggaaaaagagacccgaggggtccagaagcggagagggggatctacagtcccgaaggacggcccagtccggcctcagaacgcagaggaagaaaagtag

SEQ ID NO: 241555 - DNA, 1410 bp, synthetic construct
  misc_feature 1..1410: note = Description of Artificial Sequence: Synthetic coding sequence
  source 1..1410: mol_type = other DNA
atggcacggggactgggagcccctcactgggtcgccgtgggcctgctgacctgggcaactttggggctcctagtcgctggcctgggcggtcatgacgatctgcacgatgatctccaggaggacttccacggacattcacatcggcatagccacgaagacttccatcacggtcattcccacgcccatggccacgggcacacgcacgaaagcatttggcacggccacacccacgatcacgatcatggacactcgcatgaggacctgcaccatggacactctcacggctactcccatgagtctctgtaccacagaggacacggacatgaccacgagcattcccacggtggttatggcgaatctggcgctccaggaattaaacaggacctggacgccgttaccttgtgggcctatgctctgggcgcaacagtgctcatttccgctgccccattctttgtactgttcctcataccagtggagagcaattctcctcgacaccggtccctgctgcagattctgcttagcttcgcaagtggaggtctgctgggggacgcgtttcttcacttaattcctcatgccttagagcctcattctcaccacaccctcgaacaacctgggcacggccactcacacagcggccagggcccaatcctttctgtaggcctctgggtcctcagcggcatcgtggccttcttagtcgtggagaaatttgtccgccacgttaagggaggacacgggcactcacacgggcacggacacgcccattctcataccaggggtagtcatggccacgggcgacaagaacggtcaactaaagagaaacagtcttcagaggaggaagaaaaggaaactcgaggcgttcaaaaaagacggggaggaagcaccgtaccgaaggatgggccagtgaggccccagaatgccgaggaggagaagagaggtctggatctcagggtatcgggctacttaaacttggccgctgatctggcgcacaacttcacagatggactcgcaatcggagccagctttcgcggaggccgtgggctgggtattctgaccacgatgacagtgctgctacacgaagtgccccacgaggtgggagatttcgccattctggtccaaagtggctgctcgaaaaagcaagcgatgaggttacagctcttaacagctgtgggcgcactcgccggtactgcctgcgctcttctaactgaagggggtgcagtaggcagcgagatcgccggtggcgcagggccaggatgggttctgccctttactgccggtggtttcatctacgtggcaaccgtctccgtgttgcctgagctactacgagaggcttctcctctgcagtctttactagaggtgctcggcctccttggaggagtgatcatgatggttctaatagcacacctcgaatag

SEQ ID NO: 241556 - DNA, 1410 bp, synthetic construct
  misc_feature 1..1410: note = Description of Artificial Sequence: Synthetic coding sequence
  source 1..1410: mol_type = other DNA
atggccagggggcttggagctccacactgggtggctgtcggtctgctgacttgggccacactgggcctgcttgttgcagggctgggcggacacgatgacctgcacgacgatctgcaggaggactttcacggccattcccatcgccattcccacgaagattttcaccacggccacagtcatgcccacggacatgggcatacgcacgagtccatctggcacggacacacccacgaccatgaccacggccattcccacgaagatctgcatcatggccatagtcatggttacagccacgaatctctataccaccggggtcatgggcacgatcacgaacattcacacggcggatatggcgaaagtggtgctcccggtattaaacaggacctggacgctgtgactctctgggcctatgccctgggagcaaccgttctgataagcgcagccccattctttgtcctgttcttgatccccgtggagtcaaactcacctcggcaccgtagcctcttacagatcttgctgagcttcgcctcgggtggcctgctcggagacgctttcttacaccttataccccatgctctcgagcctcactcccaccacacactggagcagcccggacacggccactcccatagcggccagggccctatcctttctgtcggtctatgggtgttaagtggtatcgtggctttcctcgtcgtggaaaagttcgtccgacacgtcaaaggtggccatggacatagccatgggcatggccatgcgcactctcacactagaggttcccatggacacggacgccaggagcgcagtactaaggagaagcaaagctccgaggaagaagaaaaggagactcggggtgtgcaaaaacggcgaggcggatctacagtccccaaggatggcccagttaggcctcagaacgctgaggaagagaagaggggcttggatttgcgcgtgtctgggtacctgaatctcgcagcagatttggcacacaatttcaccgacgggcttgcaatcggagcgagtttccgcggagggagggggcttggcatcctgaccacaatgaccgtattactgcacgaagtgccccacgaagttggagattttgctatcctggtccagtctgggtgtagcaagaagcaggccatgcgacttcagctgctgaccgctgtcggcgctcttgctggtacagcgtgtgctctcctcactgagggaggagctgtcggcagcgaaatcgccggaggcgcaggaccagggtgggtgctaccatttaccgctgggggattcatttatgtggcaacggtgtctgtactgccagagctgctgcgagaggctagcccactccagtctttgctggaggtgctgggcttattaggcggtgtaattatgatggtgctgatcgctcaccttgaatag

SEQ ID NO: 241557 - DNA, 1410 bp, synthetic construct
  misc_feature 1..1410: note = Description of Artificial Sequence: Synthetic coding sequence
  source 1..1410: mol_type = other DNA
atggcgcgtggcttgggggcaccacattgggttgctgtcggactgctgacctgggctacgctgggtctgctggttgccggtctgggaggacacgacgaccttcatgacgatctccaagaagacttccatggacactctcaccgccactcccatgaagacttccaccatggccactcgcacgcgcatggccatggacacacgcatgagagtatctggcatgggcatacccacgatcacgaccatggacacagtcatgaagacctccaccacgggcacagccacggatactctcatgagagcctgtatcatcggggtcacgggcatgatcacgaacattctcacggaggatacggagaaagcggtgcccctggcattaagcaggacttagacgctgtgactctgtgggcctatgcgttgggagccacagtactcatctcagcagctcccttttttgtgctctttcttatacctgttgagtctaatagtcctcgacatcgcagcttgctacagatcctgctgtcatttgctagcggcggactcttaggcgatgccttcctgcaccttattccccacgccctcgagccccactctcaccacactctggagcagcctggtcacggccactcacatagcggtcaggggccaattctgagcgttgggctgtgggtcctcagcggaattgtggccttcctggtggtcgagaagttcgttagacacgtaaaaggcggacatggacacagccacggacacgggcatgcccactcacacaccaggggatctcacggtcacggcaggcaggagagatctaccaaagagaagcaaagttccgaggaggaagagaaggagacgcggggagtccagaaacgtaggggcggaagcaccgtgccaaaggatggcccagttagaccgcagaatgccgaagaggaaaagcgcggtctcgacctgcgagtgtctgggtatcttaatctggccgcagatctcgctcacaactttactgatggattggctatcggtgcatcctttcgcggaggtcggggactcggcatcctgacgaccatgacagtgctccttcacgaagtgccacacgaagtcggagactttgccatcctggtgcaatccggatgcagtaaaaagcaggccatgcgtctgcagctactaactgccgtcggcgcacttgccggtacggcttgcgctctactgaccgagggaggggctgtgggttccgagatagctggaggagcaggccctggttgggtgctaccatttaccgccggaggcttcatttatgttgcgactgtttcagtactgcctgagctcctgagagaagcaagtccgttgcagagcctattggaagtcctagggctgttgggcggtgtcataatgatggtgttgatagctcacttggagtag

SEQ ID NO: 241558 - DNA, 663 bp, synthetic construct
  misc_feature 1..663: note = Description of Artificial Sequence: Synthetic coding sequence
  source 1..663: mol_type = other DNA
atggactccagccttccagagtgtcgccatatcggcaagggaatccgcgcaaaggtcgaaaggaactttctgttttcccgagatctgaaggctggcctgccaagacctagcaagcccggaaaggagcggatccccgagcctgctttaggcgctaccgtcctgatctctgctgccccattcttcgtcctgttccttatccccgtcgagtctaattcccccaggcacaggtccctgctccaaatcttgttgtcatttgccagcggaggcctcctcggagacgcatttctgcacctgatcccccacgcactagagccacatagtcaccacacattggaacagccaggacatggacattcacacagcgggcaggggccaatactgagtgtgggattatgggtgttgtccggaatagtggcgttcctggttgtcgagaagtttgttcgtcacgtgaaggggggacatgggcacagccacggccatggccacgcccactctcatacccggggatcacatggacatggcagacaagagcgtagcacaaaggaaaagcagagtagcgaagaagaagaaaaggaaacgcgcggagtgcagaaaagacggggaggaagtacagtaccaaaggatggccctgtgagacctcagaacgctgaagaggaaaaatag

SEQ ID NO: 241559 - DNA, 663 bp, synthetic construct
  misc_feature 1..663: note = Description of Artificial Sequence: Synthetic coding sequence
  source 1..663: mol_type = other DNA
atggattcctcattgccagagtgccggcatattgggaaaggcattcgagcaaaagttgagcgtaatttcctgttctcgagggacctgaaagctggtctcccacgcccaagtaaacctggtaaggagagaattcctgagccagccctaggcgcaactgtcctgatcagtgcagcccctttcttcgttctctttctaattcccgttgagagtaactctcccaggcacaggtctctccttcagatcctgctcagttttgcttccggaggtctgttgggggacgctttcttacatttgataccccatgcgctggaaccccactctcaccataccctggagcaacctggtcacggccattctcattctggccagggtcctatcctgagcgtaggactgtgggtgctgagcggcatcgtggccttcctggttgtggaaaagttcgtccggcatgtgaagggcggtcatggtcactcacacggtcacgggcacgcccactcccatactaggggatcccatggtcacggacgccaggagcggagcacaaaagaaaagcagagcagcgaagaggaggagaaggaaaccagaggcgtgcagaaaagacgcggagggtccaccgtacctaaggatggacctgtaagaccccaaaacgccgaggaggagaaatag

SEQ ID NO: 241560 - DNA, 1410 bp, synthetic construct
  misc_feature 1..1410: note = Description of Artificial Sequence: Synthetic coding sequence
  source 1..1410: mol_type = other DNA
atggctcgagggctgggtgcgccacactgggtggcagttggtttgctcacgtgggcgactctgggcctgctcgttgccggattaggcggtcacgacgacctacacgacgacttacaagaagatttccacggccacagccatcggcattcccacgaagattttcaccatggtcacagtcatgcgcatggccacgggcatacccatgaatccatttggcacggccacacccatgatcacgatcacggacacagtcacgaagatctccaccacggtcattcccatggatactctcatgagtcactgtatcacaggggacatgggcacgatcacgagcatagccatggcggatacggcgaatctggagctcctggcatcaaacaagacctcgatgctgtcactttgtgggcttacgcgctgggagccaccgtgcttattagcgccgcaccctttttcgttctgttccttatccccgtggagtccaatagcccaaggcataggtcactgctccagatactgctgtctttcgcctctggaggactcctgggcgacgcattcttacacctaattccccatgcactggaaccccactctcatcacacgctcgagcagcctggccacggccactcccacagcgggcagggtcctatcttgtccgtgggactgtgggtgcttagtggcatcgttgctttcctcgtggtcgagaagttcgtgagacatgtaaagggcggtcatgggcatagtcatgggcacggacacgcacactcccatacaagaggatcgcatggacacggtcgacaagagagatccaccaaggagaagcagtcgtccgaggaggaggagaaggaaacccgtggggtccagaagcgcagggggggatcaaccgtacccaaagatgggcctgtgcggcctcagaatgccgaggaagaaaaaagaggactagacctgcgggtcagcgggtacctgaatctggccgctgatttggcacacaatttcacagacgggctcgccattggcgcaagtttccggggtgggagaggactgggcattctcacaactatgacagtgttgctacatgaagtgcctcacgaggtcggagacttcgctatcctcgttcaaagcggatgttctaaaaaacaggccatgaggctacagttactgaccgccgtcggggctctggcgggaaccgcatgtgctctcctgaccgagggaggtgctgtgggttccgagattgcaggaggtgctgggcctgggtgggtgctgccattcaccgcaggtgggttcatatacgttgcaacagtaagcgttttgcctgagctcctccgggaggccagtccgctgcagtctctgctggaggtgcttgggctactgggcggagtcatcatgatggtcctgattgctcacctcgagtag

SEQ ID NO: 241561 - DNA, 1410 bp, synthetic construct
  misc_feature 1..1410: note = Description of Artificial Sequence: Synthetic coding sequence
  source 1..1410: mol_type = other DNA
atggcacgcggtctgggcgcaccccattgggtggccgtaggactacttacctgggcaactcttggcctcctggtggcgggtctcggcggacacgacgatctccatgatgacctccaggaagattttcatgggcactcacatcggcactcccacgaagactttcatcacggtcactcccacgcccacgggcacggccacacacacgagtcaatctggcacggccatactcacgaccacgaccatgggcacagtcacgaggacttgcatcacgggcactcccacggctatagtcatgagagcctgtatcatcgtggccacggccatgaccatgagcattcccatggaggctacggggagtctggcgcacctggcataaagcaagacctggatgctgtgacactttgggcgtacgccctgggtgcaacagtcctgatttctgctgcgcctttctttgtattgttcctgataccagtcgaatctaacagccccagacacaggtccctcttacagattcttctgtcctttgcatccggtggcctgctaggcgacgcctttttacacttgatcccccacgcgctggagccacacagccatcatacgttggagcagcccggacacggtcacagtcactctggacagggccctatactttcagttggactgtgggtgctgtccggtatcgtggccttccttgttgtggagaagttcgtccgccacgtcaagggaggccacggccacagccatggccacggacacgcccatagccacacccgtggctctcatggccacgggcgacaagagaggtctactaaggagaagcagtccagtgaggaggaagaaaaggagactaggggggtgcaaaagagaagaggagggagcaccgtgcccaaagacggccctgtgcggccacaaaacgctgaagaggagaagcgtggtcttgatctgagggtgtccggctatttaaacctcgcagccgacttagctcataactttacggatggactggccataggcgcttcatttcgaggcggacggggtctgggaatactgacaacaatgaccgtcctcctgcatgaggtgccccacgaggtaggagattttgcaattctggtccaatctgggtgttctaagaaacaggccatgcggctgcagttgctcaccgctgtgggtgccctggcaggcactgcttgcgcactgctgaccgagggtggggctgtcgggagcgagatagctggtggggctggacccggatgggtgctaccatttaccgctggtggctttatatacgttgccaccgtgtccgtacttccagagctgctgagagaagcatccccactgcagagtctattagaagtcctgggacttcttggcggtgtaattatgatggtacttatcgcacaccttgaatag

SEQ ID NO: 241562 - DNA, 1410 bp, synthetic construct
  misc_feature 1..1410: note = Description of Artificial Sequence: Synthetic coding sequence
  source 1..1410: mol_type = other DNA
atggcgagaggtctgggcgcacctcattgggtggctgtaggcctgttgacttgggccacactggggcttttggtggcagggctgggcggtcacgacgacctgcacgacgaccttcaggaggacttccacggccactcccacagacactcacacgaagatttccatcatggccactctcacgcccacggccatggacacacccacgaatccatctggcatgggcacactcacgatcacgaccatgggcacagccacgaggacctgcaccatggacactcccacggttactctcacgagtcactttaccatcgcggacacggccacgatcatgagcacagtcacgggggatacggcgaaagcggggctcctggaatcaagcaggacctagacgcagtcaccctttgggcctacgccttaggagctactgtcctgatatcggccgcacctttctttgtgctgtttttaattcccgttgaatccaattccccaaggcataggtcattgctccagatcttattaagttttgccagcggtggattgctgggagatgcctttctgcatctcatccctcacgcgcttgaaccccatagtcaccatacactcgagcagcctggccatggccattctcacagtgggcaaggtcctatactgtctgtaggcttgtgggtactctccggtatcgttgccttcctcgttgtggagaaatttgtcaggcatgtgaaaggcggacatggacactcacatgggcacgggcacgcccactcccacactcggggttctcacggacatggcagacaggagcgctctaccaaggaaaaacagtcctccgaagaagaagaaaaagaaaccaggggcgtacagaagcgtcgaggcggatcgaccgttcccaaagacgggccagtgcggcctcagaatgcagaggaggagaagaggggactcgacctgcgggtgagtggttacttaaacttggctgcagaccttgcccataacttcacagacgggctcgctattggggctagcttcagagggggacggggtctgggtatcctgacaacgatgaccgtgctgcttcacgaggtgccccacgaggtcggtgacttcgcaatcctcgtgcagtccggatgtagcaaaaaacaagcgatgcgccttcagctgctcaccgccgtgggggctttggccggaacagcttgcgcactgctcaccgagggcggtgcagtgggatctgagatcgccggtggggctggccctggatgggtgctgccctttactgcaggaggattcatctatgtcgcgactgtttctgttctcccagagttgctgagggaggccagccccttacaatctctgctagaagtacttggattgctgggcggtgtgatcatgatggtactcatagctcacttggaatag

SEQ ID NO: 241563 - DNA, 1410 bp, synthetic construct
  misc_feature 1..1410: note = Description of Artificial Sequence: Synthetic coding sequence
  source 1..1410: mol_type = other DNA
atggcacgcggattgggcgctcctcattgggttgctgtcggtctgctaacgtgggcaactctgggattattggttgccggattggggggacatgacgacctgcatgacgaccttcaggaagattttcacggccacagccatcggcacagtcacgaagattttcaccacgggcactctcacgcccacggccatggtcacacacatgaaagcatctggcatgggcatactcatgatcacgaccatgggcactcccacgaagacctgcatcacggccattcacatgggtattcccacgaatctctataccacagaggacatggacatgatcatgagcactcccatgggggatatggggagagcggggcacctgggattaaacaggacctggatgctgtgacactttgggcctatgccctgggggcaaccgtgctgatcagcgcagccccattcttcgtcctctttctaatccctgttgagagcaatagtccacgccatcgttctctgttgcagatcctcctgtctttcgcatcaggcggtctgcttggcgatgcgtttctgcacctaattccccatgccctcgagcctcacagccatcatacactggagcagcctggccacggacactctcattccggccagggaccgatcctgtcagtagggctgtgggtgttgtccggtatcgtcgccttcttggtagttgagaagttcgtgcgccatgtgaagggtggccatggccattctcatgggcatggccatgcacacagccacaccagggggagccatggccatgggagacaggaacggagtacaaaggagaaacagtccagcgaggaggaagagaaagagactcgcggagttcagaagagacggggaggatcaacagttcctaaggatggcccagtgcgtccccagaacgccgaagaggaaaagcgcggtctggacctgagggtcagcggataccttaaccttgcagctgacctggcccacaatttcactgatggtctggccattggagcgtcttttagagggggaagagggctggggatcctgacaactatgaccgtcctgctgcacgaggtcccacacgaggtcggggactttgccattcttgtgcaaagcgggtgctccaagaagcaggctatgcgtctgcagctcctgaccgccgttggagcactggctggtacagcctgcgcactccttactgagggaggagcagtcgggagcgaaatcgccggtggggctggacccggatgggtgctgccctttactgccggaggatttatctacgtggctaccgtaagtgtattaccagagctactccgtgaggcttccccattgcagtccctcttagaggtgctgggtctccttgggggagtaattatgatggtcctgatcgcacacttggaatag

SEQ ID NO: 241564 - DNA, 663 bp, synthetic construct
  misc_feature 1..663: note = Description of Artificial Sequence: Synthetic coding sequence
  source 1..663: mol_type = other DNA
atggatagctctttaccggagtgtcggcatatcgggaagggcataagggccaaggtagagcgaaattttcttttcagtcgtgatctcaaagcaggcctgccacgaccttctaagccaggcaaggaacggatccccgagccagccctgggagccaccgtcttgataagcgccgctccttttttcgttctctttctcattccagtagaatcgaatagtcccaggcaccgctctctgctgcaaatcttgcttagctttgcaagtggcggtctgctcggcgatgccttcctgcatctgatcccacatgcacttgagccacatagccaccacaccctggaacagccgggacatgggcattcccacagtggtcaggggcctatcctttcagtgggcctctgggttctgtctggtattgtggcctttctagttgttgaaaagttcgtcagacatgtgaagggtggccacggacactctcatggccacggacacgctcactctcacactaggggttctcatggccacggaaggcaagaacgcagtaccaaagagaaacaaagcagcgaagaagaggagaaggagactcgcggagtgcaaaagcggagaggcggttcaactgtaccaaaggatggtccagtgcggcctcagaacgctgaggaggagaagtag

SEQ ID NO: 241565 - DNA, 1125 bp, synthetic construct
  misc_feature 1..1125: note = Description of Artificial Sequence: Synthetic coding sequence
  source 1..1125: mol_type = other DNA
atggcaagaggattgggcgcaccccattgggttgcggtgggcctgttgacatgggccacgcttggtctcctggtcgccggacttgggggacacgacgatctgcacgacgacttgcaagaggatttccacggtcactctcacagcgcagatctttcatcgtccattttctgcccactcccctatccaagaggcgtggagctgagccctgccagtctcagcacttcggatctcgcgcagttctgttttagatgggccccaggcagatgttttctgcacctgatcccacacgcgcttgagccccattcccaccacacacttgagcagccgggtcacgggcactctcacagcggccagggacccatccttagtgtgggtttgtgggtgctgagtgggatcgtggcattcctagtggtcgagaagttcgtgcgccacgtgaagggaggccacgggcactcacacggccatgggcacgcccactcgcacacgagaggtagtcacggacacggaaggcaggagagaagcactaaggagaagcaatcctccgaggaagaagaaaaggagacaaggggtgtccagaaaagaagaggagggagtacagtaccaaaggacggacccgtgaggcctcagaacgcagaagaggagaaacgaggcctcgatctgagagtgagcgggtacctaaacctggccgctgacctggcccacaacttcaccgacggattagctattggagccagcttccggggtggcagaggtctgggcatcctgactacaatgacagtgctgttgcacgaggtgcctcatgaggttggcgattttgcaatcttagtgcagtccgggtgtagcaagaaacaagctatgaggctgcagctgcttaccgccgtgggggctctggccggaactgcttgcgccctgctcacagaggggggtgctgtcggatcggaaattgccggaggcgctggaccaggatgggttctgccctttactgccggagggtttatctacgttgccacagtttcggtccttccagagttgttgagggaagcaagtcccctgcaatccctgctggaagttttagggctgttgggtggtgtcatcatgatggttctcatagcccacttggagtag

SEQ ID NO: 241566 - DNA, 1353 bp, synthetic construct
  misc_feature 1..1353: note = Description of Artificial Sequence: Synthetic coding sequence
  source 1..1353: mol_type = other DNA
atggcacggggacttggtgcaccccattgggtggctgtgggtctcctcacgtgggctactctgggcttgctagtggcgggactcggcggacacgacgatctccatgacgatctgcaagaggactttcacggccacggacatacccatgaaagcatatggcatgggcacacacacgaccatgaccacggtcatagccacgaagatctgcaccacggacattcccacggctactcccatgagtctttgtatcacagaggccatggtcacgatcacgagcattcacatggcggttatggcgaaagcggggctccgggaatcaagcaagacctagacgccgtcaccctctgggcatatgccttgggggctaccgtactgatcagcgcagccccattcttcgttctgttcctaattccagtagagagtaacagtccaaggcataggagcttgctgcagattttactgtccttcgcgtccggaggtctccttggtgatgcattcttgcatttaatcccacacgctctcgaaccacacagccatcacacactcgaacagcctggacacggacactctcattcagggcagggcccaatactgagcgtgggactgtgggtgctatcaggcattgtcgccttcctcgttgtcgagaagtttgttcggcacgtaaagggcggtcacggtcatagtcatgggcatggacatgcccactcacacacaagaggatcgcacggacatggcagacaggaaagatcaactaaggagaagcagagcagcgaggaggaagagaaggaaacacgaggggtgcaaaaaaggaggggtggctccactgtacctaaagatggcccagtaagaccccagaatgccgaggaggagaaaagaggccttgatctgcgggtgtccggctatctcaatttggccgcagacttggcacacaacttcaccgatggacttgcgataggagccagcttccggggaggtaggggcttggggatattgaccaccatgactgtgctgctccacgaggttccccatgaggtgggtgacttcgctatcctggtgcagtctggttgcagtaagaagcaagcgatgcgcttgcaactgcttacagcagtaggtgccctggctgggaccgcctgcgcgctcctgaccgaaggcggagctgtcggatccgagatcgcaggcggtgcgggtcctgggtgggtattgcccttcactgccggtggatttatttatgtagctaccgtatccgtgctgcccgagctgctgagagaggccagtccactgcagtcattactcgaggtgctgggcttgctgggtggcgtcatcatgatggtgctgattgcccacttagaatag

SEQ ID NO: 241567 - DNA, 663 bp, synthetic construct
  misc_feature 1..663: note = Description of Artificial Sequence: Synthetic coding sequence
  source 1..663: mol_type = other DNA
atggacagctcactccccgagtgtcggcacatcggcaagggcatacgggctaaggtggagcgcaattttcttttctctcgggatctcaaggcaggcctcccaaggccatccaagcctggcaaggagagaattccagagcctgcgctgggggctacagtacttattagtgccgctccttttttcgtgttgttcctaatcccagtcgaaagtaactctccacgccaccgaagcttgctccagattttgctaagcttcgcctccgggggtctgctgggagatgcattcctgcatttgataccacacgcactggagccacactctcaccacactctggagcagcccggtcatggtcatagtcattcgggacaggggccaatcttatcagtgggcttgtgggtactgtccggcattgtagcttttctagttgttgagaaatttgttaggcatgtcaaaggcggtcatgggcacagccatggccatgggcacgctcattctcatactagagggagtcatggacacggtcggcaggaacgaagcactaaagaaaagcagtcaagcgaagaggaggagaaggaaaccaggggggtccagaagcgacgaggcggaagtactgtgcccaaagacggccctgtgcgccctcagaatgcagaggaggaaaaatag

SEQ ID NO: 241568 - DNA, 1410 bp, synthetic construct
  misc_feature 1..1410: note = Description of Artificial Sequence: Synthetic coding sequence
  source 1..1410: mol_type = other DNA
atggcacgcggactgggcgcacctcactgggtggccgtcggcttgttgacttgggccactctgggtctgctggtcgccggactggggggtcacgacgaccttcacgacgacctgcaagaagactttcacggacatagtcataggcactctcatgaggatttccaccatggtcattcccatgctcatggccacggtcatacccatgaaagcatctggcacgggcacacccacgaccacgaccacggacacagtcacgaagatttgcaccatggtcacagtcacggatatagtcacgagtccctgtatcacaggggccatgggcacgatcacgagcactcccatggtgggtacggggagagcggggctcctggaattaaacaggatctggacgccgtgactctctgggcctatgcactaggcgctaccgtcctgatctcagcagccccttttttcgttctctttctgatcccggtcgagtccaactcacccaggcatcggtccttgctgcagattttactgtcctttgcctccgggggactgctgggcgatgcttttctacatttgatccctcacgccctggaacctcactcacatcacactctggaacagccagggcacggacactcacacagcggccagggaccgatacttagcgtggggctctgggtcctgtcggggatcgtagcctttctggtagttgaaaaattcgtccgtcatgtcaagggcggacacggccatagccacgggcacggacatgctcactcacacacgaggggaagtcacggtcacggtaggcaagagcggtccacaaaagaaaaacagagttccgaggaggaagagaaagagactagaggtgttcagaaacggagaggcggttcaactgtgccaaaagatggtcctgttcgaccacagaacgccgaggaagagaaacgcggtctggacttaagagtcagtgggtatctcaacctcgccgctgatttggcccataatttcacagatggtctcgcaattggcgctagtttcagaggcggtagaggattggggatccttaccacaatgacggtcctcttgcatgaggtgccacacgaggtaggcgacttcgctatcttggtacagtctgggtgtagcaaaaaacaggccatgcgcctgcagctcctcacagccgtcggtgcgctcgcagggaccgcctgcgccctattaacggaaggcggtgcagtgggctcagagattgccggaggcgcagggccaggatgggtgttgccatttacggctggagggtttatctatgtagccactgtgtcggtgctgccggagctgctgcgtgaagcttcgcctctacagtctctgctggaagttctgggcctgttggggggtgtaataatgatggttctaatcgcccaccttgaatag

SEQ ID NO: 241569 - DNA, 1125 bp, synthetic construct
  misc_feature 1..1125: note = Description of Artificial Sequence: Synthetic coding sequence
  source 1..1125: mol_type = other DNA
atggcgagaggcctgggcgctcctcactgggttgccgtcggactgctcacttgggctaccctgggcttgttagttgccggactgggaggtcatgatgatctgcatgacgacctacaggaggatttccacgggcactcacatagtgccgatcttagcagcagtatcttttgtcctctgccttacccaaggggggtagagctgtcccctgctagcttatccacctccgaccttgcgcagttttgctttcgctgggccccaggtagatgttttctgcacctgatccctcatgcactggaaccccactcccaccacactctggaacaacctggccacggccactcacacagcgggcagggcccaattctctcggtgggcctttgggttctgtcagggatcgtagcgttcctggtcgttgaaaaattcgttcgtcacgtcaaggggggacacggtcactctcacgggcatggccacgcccactcccacacgaggggctcccatggacatgggcgtcaggaaaggtcaacaaaagaaaagcaatcttctgaagaggaggagaaagagaccagaggagtgcaaaagcggagagggggtagtaccgttcccaaggacggtcccgtaaggcctcagaacgccgaggaggagaagagaggcctggacctaagggtgtctggttatctgaacctggctgctgatctggcacacaattttaccgacggactggcaatcggcgcttcatttcgcggaggtcggggtctcggcatcttgaccaccatgactgtgctgctgcatgaggtgccacacgaggtgggggacttcgcgatactcgtccagagtggctgctccaaaaagcaggccatgcgcttacagctgcttactgcagtgggagcccttgccggtaccgcttgcgctttactaacagagggtggggctgtggggtcagagatagcaggaggagcgggaccaggatgggtgctccccttcaccgccggaggctttatctacgttgcgactgttagtgtgctgcctgaacttcttcgcgaagcctctcctctgcagagtctgctggaggtgctaggattgcttgggggagttatcatgatggtgctgattgcccaccttgaatag

SEQ ID NO: 241570 - DNA, 1353 bp, synthetic construct
  misc_feature 1..1353: note = Description of Artificial Sequence: Synthetic coding sequence
  source 1..1353: mol_type = other DNA
atggcaaggggacttggcgctccacactgggtggctgttgggctgctcacatgggccaccctgggactgctcgtggcgggactgggcggacacgacgacctgcatgatgacttgcaggaagatttccatggacatgggcatacccatgagtccatctggcacggtcatacccacgaccatgatcatggccattcccatgaggatctccatcacggccatagtcacggctacagtcatgagagcctgtaccacaggggccacgggcacgatcacgaacattcccacggaggatacggcgagtcaggggctcctggaatcaagcaggacctagacgcagtgacattatgggcctatgcactcggggcaactgttctgatctcagccgctcctttcttcgtcctcttcctgatcccagtggaaagcaactctcctcgacacagaagcttgctgcaaattctgctttccttcgcttccggcggattattaggggatgcctttcttcacctcatccctcacgcattggagcctcactcccatcatacactggagcaacccggtcatggccattctcattctgggcaggggccaattttgagcgtcggcctgtgggtgctcagcgggattgtggcatttctggtggttgagaagtttgtcaggcacgtgaaggggggacatggccattcacacggtcacggacacgctcacagccatacccgagggtcgcacggccatgggagacaggaaagatcaactaaagaaaagcagtcctccgaggaagaagagaaagagacgagaggtgtgcagaagcgcaggggaggttcgaccgtacccaaggacggacctgtcagacctcagaacgccgaggaagagaagcggggactcgatctcagagtcagcggttatctcaacctggctgccgacctcgctcacaatttcactgatggcctggctatcggggcttccttcagagggggtaggggactgggcatcctcactactatgaccgtgctgctacatgaggtgccacatgaggtgggagactttgctatcctcgtgcagagcgggtgctccaagaagcaagctatgaggctgcagctactgactgctgttggtgctctcgcaggaaccgcttgcgcgttactgaccgaggggggagccgtaggcagtgagattgcaggcggtgcgggaccaggctgggttcttccttttactgctggcggttttatctacgttgccaccgtgtccgtgctccccgagttactgcgcgaagcctccccactacagagtcttctagaggttttgggtttgctgggaggcgtgatcatgatggttctaattgcacacctggagtag

SEQ ID NO: 241571 - DNA, 1125 bp, synthetic construct
  misc_feature 1..1125: note = Description of Artificial Sequence: Synthetic coding sequence
  source 1..1125: mol_type = other DNA
atggcacggggactgggtgcccctcactgggtggcagtcgggctgttgacatgggccacactgggtctcttggtcgccggactcgggggacatgacgatctgcacgatgacctgcaggaagacttccatggtcactcacacagtgccgacttaagtagtagtattttctgcccactgccatacccacgcggagtcgagcttagcccagcctccctttccacgtctgacttggcgcagttctgcttcagatgggccccaggtaggtgcttcctgcaccttatcccccacgctctggagcctcactctcaccatacactggagcagccaggtcacggacactcacactccggtcaggggcctatattgtccgtgggactttgggtgttgtccggaatcgttgcatttctggtcgtagagaagtttgtgagacatgtgaaaggcggacacggccattctcatggacatggccacgcccactctcacacccgtggctcgcacgggcatggaaggcaggagagatctactaaagaaaaacaatcctcagaagaagaagagaaggaaacacgaggtgtgcaaaagaggcgaggcggaagtaccgtccctaaagatggcccagtgcggcctcagaacgcggaagaagaaaagcgaggcttggacctgagagtgtccggatacctcaacctggcggcagatctcgcacacaacttcactgatggactagccataggtgcctcattccggggtggaaggggcctcggcatcttgaccacaatgaccgtgctgctgcacgaggtacctcacgaggtcggagactttgcaattctggtacagtctgggtgctccaaaaaacaggccatgcggcttcaacttctcaccgccgtgggcgctctagcaggcacggcttgtgctctcttgaccgaggggggtgcggtaggaagcgaaatcgccggtggcgctggcccaggatgggtactccctttcacggctgggggatttatctatgtggccactgtgagtgttctcccagagctgctacgtgaagcatctcccctgcagagccttctggaggttcttggattactcggcggtgttattatgatggtactcatcgcgcacctggagtag

SEQ ID NO: 241572 - DNA, 1125 bp, synthetic construct
  misc_feature 1..1125: note = Description of Artificial Sequence: Synthetic coding sequence
  source 1..1125: mol_type = other DNA
atggctcgtggactgggcgctccacactgggtggccgtaggattgctcacttgggcaacactcggactccttgtggctggtttaggaggtcacgatgacctgcatgatgatctccaggaggactttcatggacactctcattcggctgacctgagtagctccatcttctgccctctgccttatcccaggggcgtcgaactctcccccgcatcactgtccacatctgacctggcccagttttgttttagatgggccccaggtcgatgcttcttgcatctcatcccacatgctctagaaccgcacagtcatcacaccctcgaacagccaggacatggccactcgcactcaggccagggacccatcctaagtgtcggattgtgggtgctctctgggatcgtggcattcctggtggtggaaaaatttgtacggcacgtcaagggcggacacggacattcgcatgggcatggacacgcccactctcacacccggggtagtcacggccacggacgccaagaaaggtctacgaaagaaaaacagagtagcgaggaggaggaaaaagaaacccggggagttcagaagcgccgagggggttccacagtgccgaaagacggacccgtgcggcctcagaatgcagaggaagagaaacggggactggatttgcgagtgagcggttatctgaacttggccgctgatttggctcacaattttacagatggtctcgccattggagccagcttcaggggtggtaggggtctgggtattctcaccactatgaccgtattgctccatgaggtcccacacgaggtaggcgactttgcaatcctcgtacagagcggatgtagtaaaaagcaagcaatgagattgcagcttctgactgcggtgggcgcattagctggcacagcctgtgcactgcttaccgaggggggagctgtaggaagcgaaattgcagggggtgccggacctggttgggttctgccattcaccgccggtggattcatctatgtggctacagtatccgtactgccagagctgctgcgcgaggcctcccctctccagagtttgctagaggtcttgggcctgttgggcggagtgatcatgatggtgctgatagcccacctcgagtag

SEQ ID NO: 241573 - DNA, 1353 bp, synthetic construct
  misc_feature 1..1353: note = Description of Artificial Sequence: Synthetic coding sequence
  source 1..1353: mol_type = other DNA
atggcgaggggacttggcgctccccactgggtagctgtggggcttttaacttgggctactttgggtcttcttgtggccggactggggggacacgatgatctacacgatgatcttcaggaagactttcacgggcacgggcacacacatgagtctatatggcatggtcacacccatgaccacgatcatggacatagccatgaggaccttcaccatggccacagccatggctactcccatgaatctctgtatcataggggccatggacatgatcacgagcactctcatgggggttatggcgaaagcggggctcccggtattaagcaggacctggacgctgttactctgtgggcctatgccctgggcgctaccgtattgatatctgctgccccattctttgtgctgtttctgattcccgttgagtccaacagtccacgccatcgatccctgctgcagatcctcttgtcctttgctagtggcggactccttggagacgcctttttgcacttgattccacacgcgttggaacctcacagccaccacactcttgaacagcccggtcacggccactctcactctggccaggggccaatcctcagtgtgggtctgtgggtcctaagcgggatcgttgcttttctagtcgttgagaaattcgtccgacacgtcaaaggagggcacggtcatagtcatgggcacgggcatgctcactcccacactaggggaagccacggccatgggcgacaagagcggtccacaaaggaaaaacagagctcggaagaggaggagaaggagacgcgcggagttcaaaaacgcagagggggttccaccgtgccaaaagacggtcccgtcaggccgcaaaacgccgaggaagagaagaggggactggacttgagggtgtctgggtatttaaacctggctgctgacctcgcacataactttactgatggcttagccatcggcgcttcctttcgaggtggtaggggtctcgggattcttacaacgatgaccgtcctcctgcatgaggtgccccacgaggtgggagatttcgccatcctggtgcaatcaggatgctctaagaaacaagcgatgcgacttcaacttctcacggccgtcggtgccctggcgggtacggcgtgtgctctgctcaccgagggcggtgccgtcgggtcagagattgccggaggcgctggcccaggttgggtcctcccttttacagcaggtggattcatttacgtcgccaccgtcagtgtattgccagagttactgcgcgaagcttctcccttacagtcactgctggaggtgttgggtctcttgggcggagtgatcatgatggtactgatcgcccatctggagtag

SEQ ID NO: 241574 - DNA, 1353 bp, synthetic construct
  misc_feature 1..1353: note = Description of Artificial Sequence: Synthetic coding sequence
  source 1..1353: mol_type = other DNA
atggctcgtggtctcggggctccacactgggtggccgtcggtctcttgacatgggccacattgggcctgcttgtggccggtcttgggggtcacgatgacctgcatgatgatctccaggaagactttcatggccatggtcatactcacgagtccatctggcacggccacacacacgaccatgaccacgggcacagccacgaagacctccaccacggccactctcatggatactcccacgaatcactgtatcatcggggtcatggtcatgaccacgaacacagtcacgggggttacggggagtccggggctcctggcattaagcaagatctcgatgccgtgactctttgggcatacgcgctgggtgctacagtactcatttcagccgctcccttctttgtcctgtttttaattcctgtggaaagcaacagtcctaggcataggagcctcctgcaaatcctgctgtctttcgccagcggagggctcctgggcgatgccttcctccatctgatccctcacgccctcgagccccactcgcatcatacactcgaacagccgggacacggccattcccattctggtcaggggccaatcctgtctgtgggcttgtgggtactgtccggcatcgttgctttcttagttgtagaaaagtttgtgcggcacgtgaagggtgggcatggacatagccatggccacggccatgcccacagccatacaagaggcagtcacggccacgggagacaagaacggtccaccaaggagaagcagtcttcggaagaggaagagaaggaaactagaggcgtgcagaaaagaagaggcggatccactgtgcctaaagacggaccagttcggccacagaacgctgaagaagaaaagcgtgggctggatctgcgggtcagtgggtatctgaaccttgccgcagacctggcgcacaacttcaccgacgggcttgcaatcggcgcttcatttcggggagggagggggctagggattctgaccacgatgaccgtgttgttacatgaagtgccacacgaagtgggcgattttgcaattctggtacagtctgggtgctctaagaagcaggcaatgcgtctgcagctcttgactgcagtcggtgccctcgccggaaccgcctgcgctcttctgactgaaggaggagccgttggctcggagatcgcgggaggcgcaggtccagggtgggttttaccattcacagccggaggctttatctatgtggcaacggtgtcagtcctcccagaacttctacgggaagctagccctctgcagtctctgcttgaagtcttaggcctgttgggcggagttataatgatggtgctgatagcccacctagagtag

SEQ ID NO: 241575 - DNA, 1125 bp, synthetic construct
  misc_feature 1..1125: note = Description of Artificial Sequence: Synthetic coding sequence
  source 1..1125: mol_type = other DNA
atggccaggggcctgggcgcaccccattgggtcgctgtcggactgctgacttgggccacactcggactcctggtagctggcttaggtggccatgacgacctgcatgatgatctgcaggaagatttccacggccattcacattctgcagacttatcctcttccatattttgccctctcccttaccctagaggcgtcgaactatcccctgcttctctgagtacgtcagacctcgcccaattctgcttccgatgggcccctgggcgatgtttcttgcatctgattccccatgccctcgagccacactctcatcacactctggagcaaccgggtcacggtcattctcatagcggacaggggccaattctgtccgtcggcctctgggtcttgtccggaattgttgccttcctcgttgtggaaaaattcgtgagacatgtcaaagggggacacggacattcccatgggcacggacacgcccactctcatacaagagggtctcatggccatgggcgacaggagagaagcactaaggagaaacagagcagcgaagaggaagaaaaggaaacacgcggtgtccaaaagagacgcggagggagtaccgtacccaaagatggaccagtacgaccccagaacgctgaggaagagaagagaggcctggacctcagagtgtctgggtacctcaatctggctgcagacctggcgcataattttacagacggcctggctatcggagccagctttcgtggcggacgtggcctgggcatactcacaactatgacagttttgttacacgaggttccacatgaggtaggcgactttgccattttggtccagtctgggtgctctaaaaagcaggcgatgcgactgcagctcctcacagcagtcggggcactggccggtaccgcctgtgcgctgctgaccgaggggggtgccgtcgggagcgagatcgctggcggagccggtccgggatgggttctgcccttcaccgctggtggatttatatacgtggctacagtgtctgttctgcccgagcttctcagagaggcttccccactgcagagtctgctggaagttctgggacttttgggaggcgtcattatgatggtgttgatagcccacctggagtag

SEQ ID NO: 241576 - DNA, 1353 bp, synthetic construct
  misc_feature 1..1353: note = Description of Artificial Sequence: Synthetic coding sequence
  source 1..1353: mol_type = other DNA
atggcccgaggtctaggggctcctcactgggtggccgtgggactgttgacctgggccacacttggactgctggtcgccggactgggcggacacgatgacctacacgacgacctccaagaggacttccatggacacgggcatactcacgagagcatttggcatggacacacccacgaccatgaccacggtcatagtcacgaggacctgcaccacggacactctcatggctactctcacgaatccctgtaccatcggggtcatggccatgatcacgagcattctcatgggggatatggcgagtccggagcacctggtattaagcaggatttagacgccgtgactttatgggcctatgctttaggcgctaccgtgttgatcagtgctgctccgttctttgtgctgttcctcattcccgtggagtctaactctcccagacataggtccctgctgcagatactactgagctttgcatcaggaggactgcttggcgatgccttcctccatctgatcccccatgctctcgaaccacattctcatcacactctggagcagccaggacatggccactcacactccggccaaggcccaatactgtcagtgggtctgtgggtgctctctggcatcgttgccttcctggtcgttgagaaatttgtgagacacgttaagggtgggcacggtcatagccatggtcacggtcacgctcacagccacactaggggatcacacggtcatggacgtcaagagagaagcaccaaggagaaacaaagctctgaggaagaggagaaggagactagaggagtccaaaagaggcggggagggagcacagttcctaaggatgggccagtgaggcctcagaatgcagaggaggaaaagcgtggcctggacctgagggttagcggctacctgaatctcgccgctgacctcgcgcacaactttacagacggactggcaatcggcgcttcttttcgcggtggccgtgggttggggatactgaccaccatgaccgtgttgctacacgaggtgccacatgaggtcggggacttcgcaattctagtccaatctgggtgttccaagaaacaggctatgcgactgcagcttttgacagccgtgggagcgttggctgggaccgcctgcgccctcctgacggaaggcggtgccgtcggttcagagattgcaggtggtgcaggcccagggtgggtcctcccctttaccgctggcggattcatctacgtggccactgtgtcagtgctccccgagctgctgcgagaggctagtccactgcaatcgcttctggaggtgctgggtttgctgggcggagtgatcatgatggtcttgatcgcacacctggagtag

SEQ ID NO: 241577 - DNA, 1353 bp, synthetic construct
  misc_feature 1..1353: note = Description of Artificial Sequence: Synthetic coding sequence
  source 1..1353: mol_type = other DNA
atggctcgcggactaggtgctcctcattgggtggccgtgggtctccttacttgggctactcttggcctgctggtcgccggtctggggggacacgacgatctccacgatgacctgcaagaggacttccatgggcatgggcatactcatgaaagcatctggcatgggcatacccacgaccacgaccacggacactctcacgaagatctgcatcatggccatagtcatgggtattctcatgaatctttgtaccatcggggtcacggccatgaccatgagcactcccacgggggatacggcgaaagcggtgccccaggcattaaacaggatctggatgccgtcacgctgtgggcatacgccctcggcgctaccgtgcttatttctgctgctccgtttttcgttctgtttctcattccggtcgaaagcaattctcctaggcatcggtctcttcttcaaatcctgttgtccttcgctagcggcggtttgctgggagatgccttcctccaccttataccacatgctctggagccccactcccatcataccctcgagcagcccggtcacggacacagccattcaggtcagggacccatactgtccgtgggcctgtgggtgctctcaggcatagtggcatttctggttgtcgaaaaatttgtcagacatgttaagggtgggcacggtcactcacacggccatggccacgcgcacagtcacactcgcggaagtcatggccacgggaggcaggaaagatccacgaaagagaagcagtcgtctgaggaagaggagaaagaaacaagaggagtccagaaacggagaggcggttctaccgtgcctaaagatggcccagtccggcctcagaatgccgaagaggaaaaaagaggcctggatttgagagtgtctggatacctgaacctggcagcggatctggcccacaatttcactgacgggctggctataggcgctagctttaggggaggacggggactgggcattctgacaactatgacagttttgcttcacgaagtcccccacgaagtgggcgactttgcaattctcgttcagagcgggtgcagcaagaaacaggccatgagactgcagcttctgacggctgtgggagccctggcaggcacagcatgtgcccttctcaccgaggggggagctgtgggatctgagattgccggaggagctggcccaggctgggtgctccccttcaccgcaggtggattcatttacgttgccaccgtctctgtcctccccgaactgctgcgcgaggcgagtcccctgcagtcattactggaggtccttgggttattggggggagtgattatgatggtgctcattgcacacctggagtag

SEQ ID NO: 241578 - DNA, 1125 bp, synthetic construct
  misc_feature 1..1125: note = Description of Artificial Sequence: Synthetic coding sequence
  source 1..1125: mol_type = other DNA
atggcccgtggactgggggcacctcattgggtcgccgtcggcctactcacatgggccacacttggacttctggtcgcaggactcggcggacatgatgacctgcatgatgacctgcaggaagactttcatggtcacagtcacagtgccgacctaagctcctctatcttctgcccactgccatatccacggggagtcgagctctcacccgcttccttgtcaacgtctgaccttgcccagttctgcttcaggtgggcacccggtagatgttttctccaccttattccgcacgccctagaaccgcatagtcaccacaccctggagcagcctggtcatgggcacagtcacagtggacaggggccaatccttagtgttggtctctgggtgctcagcggtattgtggcgtttctggttgtcgaaaagtttgtaagacatgttaaaggcggacatggccattcccatggacatggtcatgcccactcccatacgagaggctcccatggccatggccgtcaggagcgcagtacgaaagaaaagcagagtagcgaggaggaggaaaaggagacacggggagtacagaaacggcgaggcggatcaacagtgccgaaggatgggcctgtgcgtccccagaacgccgaagaagaaaagcgaggcctggacctgagggtcagtggttaccttaaccttgccgctgacctcgcacacaacttcaccgacggcctggcaattggcgctagctttcggggagggcgtggcctaggaatcctgaccacaatgaccgtcttgctacatgaggtccctcacgaagtcggcgactttgcgatccttgtgcaatcaggttgcagtaagaagcaagctatgagacttcagctactgaccgccgtcggcgctctcgccggaaccgcctgcgcactgctgaccgagggcggagcggtgggctctgagatcgctggcggagccggtcctggctgggtcctcccatttaccgcaggcggattcatttacgtcgccactgtctccgtcctgcctgagcttttgcgggaggcatctcccctgcagtccctcctggaagtgctgggactgctgggaggcgttatcatgatggtgctaatcgcccacctggagtag

SEQ ID NO: 241579 - DNA, 2391 bp, synthetic construct
  misc_feature 1..2391: note = Description of Artificial Sequence: Synthetic coding sequence
  source 1..2391: mol_type = other DNA
atgctagcccctctgcgtaacgccccaggacgggaaggtgcgactagtccatcccctcctaccgatgctactgggagcctgggcgagtgggatgtggatagaaatgtgaagaccgagggttgggtgtccaaagagcgcatatctaaactgcacaggctccgcatggctgacatcctgagccagtccgaaaccttggcaagccaggatctctctggtgactttaaaaagcctgcactcccggtgagcccagctgcccgaagcaaggctcctgcttcttcatccagtaatcccgaggaggttcaaaaagaaggaccaactgccctccaggatagtaattccggagaaccagatatcccaccccctcagcctgactgtggagatttcaggagtctgcaagaagagcagagtcgtcctcctacagccgtgagcagtccaggcggacccgctcgggctccaccctaccaggagcctccttgggggggtcctgcaactgccccttatagcttagagaccctaaagggtggcactatcttgggcacacggtccctcaaaggcacatcctattgtctctttggcagactcagtggttgtgatgtttgtctggaacatccctctgtgtcaagatatcacgctgtccttcagcatcgagctagtggaccagatggtgaatgtgattcaaatggaccgggtttttatctttatgatctgggtagtactcatggcacttttttaaacaagaccagaatcccaccgagaacgtattgtagggtgcacgtgggccacgtggtaagattcgggggatcaacccgcctgtttatcctgcagggaccagaggaggatagggaggcggaatccgagctcacagtgacgcagctgaaggagctgcgtaagcagcaacagattctactagagaaaaaaatgctgggagaggatagtgatgaggaggaggagatggatacgtcagagaggaagattaatgcgggatcccaggacgacgagatgggatgtacatggggcatgggggaggatgccgtagaggacgacgctgaggagaatcctatcgttctggagtttcagcaggaaagagaagccttctatattaaggatcccaagaaggccctgcaggggtttttcgaccgggagggcgaagagctggagtacgagttcgacgagcagggacactctacttggctgtgcagagtaagattgcccgtcgacgacagtacggggaaacagctggtggctgaggctatccactccgggaaaaagaaagaagccatgattcagtgtagtctcgaggcatgccgcattcttgacaccctgggactcctcaggcaggaggcagtgtctcgcaagcgtaaggcaaagaattgggaagacgaagatttctacgacagcgatgatgacacttttttggataggactggcctgatcgagaaaaagagactaaatcggatgaagaaagccggtaaaatagacgaaaagcctgaaactttcgagtctcttgtggctaagctaaatgacgccgagcgggaactgtctgagattagcgagcggctgaaggcttctagccaggtattgtccgagtctcctagccaggacagcctcgacgcattcatgtctgagatgaagtcagggagcactctggacggggtcagcagaaaaaaactccacctcaggacgtttgagctgagaaaagaacaacagaggttaaaaggccttatcaagattgttaaacccgctgagatacctgagctcaaaaaaactgagacccagaccaccggggctgaaaacaaagctaaaaaactaacactcccgttatttggggcaatgaagggaggctctaagttcaagttgaagaccggtaccgtcggcaagcttccacccaagaggcctgaattacctccaactcttatgcgaatgaaggatgaacctgaagtcgaggaagaggaggaagaagaggaagaagaggagaaagaaaaagaggagcatgagaaaaaaaagctggaggacggatctctgtcccgcccacaaccagaaatagagcccgaggcggctgtgcaggaaatgagacctcctacagaccttacccactttaaggagacccagacgcacgaaaatatgtcacagctgagtgaagaagagcagaacaaggattatcaggactgtagcaaaacaacaagcctgtgtgccggtcccagcgcttcgaagaacgagtatgagaaaagccgtggggagctcaaaaaaaagaagactcccggacctgggaaactgccccctactctgtctagcaaatatccggaagatgatcccgattattgtgtgtgggtcccccctgagggccaatctggggatggacgtacgcacctcaatgataaatacggttattag

SEQ ID NO: 241580 - DNA, 3699 bp, synthetic construct
  misc_feature 1..3699: note = Description of Artificial Sequence: Synthetic coding sequence
  source 1..3699: mol_type = other DNA
atggatttcttgctgcgacctcagcccgagcctgaatcactgggccctggtacccccggtttccctgagcaagaggaggacgaacttcatagaactctgggcgttgagcgttttgaagagatcttgcaggaagcgggtagccgcggaggggaagagcctggcaggagctacggagaagaagactttgagtaccatcgacagtcgtcacatcatattcaccatccactttccacacacctgccaccagacgccagacggaggaagaccccacaagggcctggaaggaagccacgaaggcggccaggagcatctcctaccggcgaaacaccaacaattgaagaaggtgaagaagacgaagatgaggcttcagaagctgagggggctagagctctgacgcagccaagcccagtatccactcccagctccgtgcagttttttctgcaggaggatgactcagccgatcggaaggcggaaaggactagtccctcctctcccgcaccactcccgcaccaggaagctactccacgggcttcaaagggtgcccaggccggtactcaggtcgaggaggccgaagcagaggccgtagccgtcgcctccggcacagccggtggggacgacggcggtgcatctggaaggcccttaccaaaggcccagcctggccaccgttcatacaaccttcaggaacgcaggcggattggcagcatgaccggcgcagagcaggctctcttgccgagggtccccacagatgagattgaagcacaaactcttgccactgccgatttggacctcatgaaaagccaccgatttgaggatgttcctggcgtcaggcggcatttagttcgcaagaatgccaaaggcagcacccagagtggacgggaaggcagagagcctgggcctacccctcgagctcggccacgagccccacacaaacctcacgaggtgttcgtagagcttaacgagctcctgcttgataagaaccaggagccgcagtggcgcgagactgccagatggattaaatttgaagaagatgttgaggaagaaaccgagaggtggggcaaaccccacgtcgcttcactgagcttccgctctttgcttgagttacggagaacactcgcccacggcgcagttctgttggatctggaccaacagacgctgccgggagtcgcgcaccaggtagtggaacagatggtgatttccgatcagatcaaagctgaagacagagctaatgttctcagggccttgctgctcaagcacagccacccatccgatgagaaggatttctcatttcctcgcaacatttctgctggatctctcgggtccctgctgggacaccaccacggccagggcgctgagtccgacccacatgtgacagaacctcttatgggcggagtcccagaaacccggctagaggtggagcgggaacgagagctccctcctccagccccacccgctggaataacgcgcagcaagtctaaacacgaattaaagctgctggagaaaattcccgagaacgcagaggctactgttgtgttagttggttgcgtggaatttctgagccgacctactatggctttcgttcgactgcgcgaagcggtggaacttgacgctgtcctggaagttcccgtgccagtgaggttccttttcctgctcctaggaccgtcatctgcaaacatggactatcacgaaattggacgatcaataagtactctcatgagcgataagcaattccacgaggccgcttatttggcggacgagcgcgaggatctgctaacggccattaatgcttttcttgactgtagtgtagtgctgccgccaagtgaggtgcaaggagaggagttgctgcgatctgtagcccactttcagcggcagatgctgaagaaacgggaagagcagggcaggttgctgcccaccggcgctggcctggagcctaaaagcgcccaagacaaggcgcttttacaaatggtggaagccgcaggggctgctgaggacgatcctctgagaagaacaggaagaccgtttggtggcctgatacgggatgtcagacgacgctacccccattatctgtctgactttcgggatgctcttgaccctcagtgtcttgcggctgtaatatttatttacttcgctgcgctgtctcccgcaattacttttggtggcctgctgggagaaaagactcaggacctaattggagtgtccgagctcattatgagcactgctcttcagggcgtcgttttctgcttgctgggggctcagcctctgctggtgatcggcttcagcggtccactgttggtattcgaggaagccttcttctccttttgtagctcaaatcatctagaatatttagtggggagagtgtggataggattttggctcgtcttcttagcgctgcttatggtggccctagaaggctctttcctggtgaggtttgtcagcaggtttacgcaggagatcttcgcatttctaatcagtctgatcttcatttacgaaacattctacaagctcgtcaagatattccaagaacaccccctacatggatgctccgcatccaacagttccgaagttgacgggggtgagaatatgacctgggccggagcaaggcctactctgggcccaggaaacaggtctctggcgggacagtccggccagggtaagcctagggggcagcccaacacagccctgctttccctggtacttatggccggaacattcttcattgcttttttcctgcggaagttcaaaaactctcggttttttcccggacgcattcggcgtgtcataggtgacttcggcgttcccattgcgattctcataatggttctggtggactatagtatcgaggatacatatacgcaaaaattgagtgtgccctcaggcttcagcgtgaccgcgccagagaagcggggttgggttatcaacccactgggtgaaaagtccccttttcccgtctggatgatggtagcttccctgctgccagctatcttagtctttattctcatctttatggaaacacaaataacaaccctcataatcagtaagaaagaacgaatgttgcaaaaagggtccgggttccatctggacctgttattaattgtggccatgggagggatttgcgccctcttcggcctgccctggcttgctgccgcaaccgttcggtcagtaacgcacgctaacgcactgacagtgatgtccaaagccgtagctcccggtgacaaacctaagattcaggaggtgaaagagcagcgcgtgactggcctcctggtggctcttctggtaggactttctatcgttattggggaccttctcagacaaattcccctggcagtgctgtttggcatcttcctgtatatgggtgtgacctctttgaatgggatccagttctacgagcgactgcacctgctgctaatgccaccaaagcatcatcccgatgtgacgtatgtgaagaaagtccgaaccctaaggatgcacctgttcaccgctctgcagctgctctgccttgctctcctatgggcggtcatgagcaccgccgcaagcctggccttcccgtttatcctcatcctgactgttcctctgaggatggttgtccttacaaggatctttactgatcgagagatgaaatgtcttgatgctaacgaagcagagcccgtgtttgacgaaagagaaggtgtggacgagtacaatgagatgcctatgccagtatag

SEQ ID NO: 241581 - DNA, 3684 bp, synthetic construct
  misc_feature 1..3684: note = Description of Artificial Sequence: Synthetic coding sequence
  source 1..3684: mol_type = other DNA
atgactcagccagagcccgaatccctgggaccaggtacgcccggattccctgaacaagaggaggacgagttgcaccgaacattgggggtggaaagatttgaggagattctgcaagaagcagggtccaggggcggtgaagagcctggcagatcttacggggaagaggatttcgaataccacagacagagctcccatcatatccatcatccactaagcacccacctaccgcctgacgcacggagacggaaaacgccgcaggggccagggcgtaagcctagaaggaggcccggtgcctccccaacaggagaaaccccaactattgaggaaggggaggaggatgaagatgaagccagcgaagcagagggcgctcgcgctcttacacaaccttcgcccgtgtccacaccttccagtgtgcagttttttctgcaggaggatgatagtgcggataggaaggccgagcggacatcccccagcagcccagcaccattgccacaccaagaagctaccccgagggcttctaagggagcgcaggcagggacgcaagtggaggaagcagaagcagaagccgttgccgtggcctcgggcactgccggaggggacgacggcggagcctcaggcaggccgttgccaaaggcacagcccggacacagaagctataacctgcaggaacgtcgcaggatcggttccatgactggtgccgaacaggcccttctgccacgcgtgcccaccgacgagatagaagcccagacactggccacggccgacctggatctgatgaagtcccacaggttcgaagatgtcccaggagtgagacggcatctggtgcgaaagaacgccaagggatctactcaatctggccgagaaggtagggagccaggccctaccccccgagcccgaccacgggcacctcacaaaccgcatgaggtgtttgtggaactcaatgagctcttattggacaaaaaccaagaaccgcagtggcgggaaaccgctcgctggattaagttcgaggaggatgttgaggaggaaaccgagaggtggggaaaaccccacgtcgctagccttagcttcagatctctcctggagctgagacggacgctggcacatggggctgtgctgctggatctggaccagcagactctcccaggtgtcgcgcatcaggtggtggagcaaatggtgatctccgatcaaattaaggccgaagaccgtgcaaacgtgctgagggctctgcttttgaaacattcccacccgtctgacgaaaaggactttagtttccctcgaaacatcagcgcaggttctctggggtccctgcttggccatcaccacgggcaaggcgcagagagcgacccccatgtcaccgaacctctcatggggggtgtacccgaaacccggctggaagtggagcgtgagcgggaactccctcccccagcccctcccgctggcatcaccaggagtaagagtaagcacgagcttaagcttcttgagaaaatccctgagaatgcggaggctaccgtcgtgctcgtcggctgtgtggagttcctgtcccggccaacaatggccttcgtgaggctgcgggaggccgttgagttggatgcggtgctggaagttcctgtgcccgtcaggttcctgttcctgctgctcggaccctccagcgcgaatatggattaccacgaaattgggagatccatctcaacccttatgtctgacaagcagttccacgaggctgcttaccttgctgatgaaagggaggaccttctcactgcgattaacgcatttctcgattgctctgtggtgctccccccttctgaggtgcagggcgaagagttacttcggtcggtagctcacttccaaagacagatgttgaaaaagcgcgaggagcagggccgactgctgcctactggcgctgggttagaaccaaagagtgcacaagacaaggccctactccaaatggttgaggctgcgggtgcggctgaggatgacccacttcgcaggactggcagaccattcggtggcctaatccgcgatgtccgtcggagatatccacactacctgtccgattttcgcgacgctctggatccccaatgtttggctgctgtaatctttatctactttgccgcactgagtccagctattacttttgggggattattaggtgagaagacgcaagacctgattggcgtgtctgagctgattatgagcacagccctccagggcgtggtcttctgccttctgggagcccagcctttactcgtcatcggattcagcggcccattgctggtttttgaagaggccttttttagcttttgctccagcaatcatctggaatatctggttgggagagtgtggatcggcttttggctggtgttcctggcccttctgatggtggcacttgagggatccttcttagtacggttcgtcagccggttcacccaagagatatttgctttcctgatctcccttatcttcatttacgagacgttctacaaattagtaaagatattccaagagcatccactgcacggatgctccgcaagcaactcgtcagaagtggatggaggcgagaacatgacctgggccggtgccagacctactctggggcctggcaatagaagcttggcaggccagtctggccaagggaaaccacggggacagcctaatactgctctgctttctctggtgcttatggccggaactttcttcatagcattttttctaaggaagttcaagaattcaaggttctttccagggagaatccgcagagtcatcggggacttcggcgtgcctatagccatccttataatggtactcgtggattattcaatcgaagatacctatacacaaaagctctccgtacccagtggcttttccgtaaccgcccctgaaaagcgcggatgggtgatcaatcctcttggcgagaaaagtccgttccccgtgtggatgatggtggctagcttacttcccgctattctggtgtttatactgatttttatggagacacaaattaccaccttgattatcagcaaaaaggaacgcatgctgcagaaaggctccggctttcatttggacctgctcctgatcgtcgcaatggggggtatctgtgccctcttcggattaccgtggttggccgcagccaccgtgagatccgtgacccacgcaaatgctctgactgtgatgagcaaggccgtcgctcctggtgacaaaccgaaaatccaagaagtaaaggaacagcgcgtaactggcttgttggtcgctctgctggtaggactgagtatcgtgatcggcgatctgcttaggcaaataccactagccgttctctttggcatctttctctatatgggggtgacatcacttaacggaatccagttctatgagaggttgcatttactacttatgccccctaaacatcatcccgatgtgacctacgtcaaaaaggtccgcacgcttcggatgcatttgttcacggccctccagcttctatgtcttgctctcttgtgggccgtaatgtctaccgcagcttctcttgcatttccctttatcttgatcttaaccgtaccactcagaatggtggtacttactcgcatctttaccgacagggagatgaagtgcctcgacgcaaatgaggccgagccagtgtttgatgagcgggagggggtggatgagtacaacgagatgccgatgccagtctag

SEQ ID NO: 241582 - DNA, 2406 bp, synthetic construct
  misc_feature 1..2406: note = Description of Artificial Sequence: Synthetic coding sequence
  source 1..2406: mol_type = other DNA
gtaatggaggtggtggaagcagagaaaatcgtcctgctaaccagcgctagatttcttttcctgttgctcgggccagccggtaaagcgcctcagtatcatgagatcggcagatccattgctaccttgatgactgacgagatctttcacgatgtcgcctacaaggctaaggaccgcaatgatttgctgtctggtattgacgaatttctcgaccaggttacagtgctgccacccggagagtgggacccatcaattcgaatcgaaccacctaagagtgtccctagtcaggaaaagcgcaagatccctgtgttccataatggaagcacacctacactgggagagactcctaaggaagccgcacaccacgcgggacccgaattgcagagaaccgggagactattcggcggactgatccttgacatcaagcgtaaagcgccatttttcttatctgacttcaaagacgctctttccctgcagtgcctagccagtatattgttcctgtattgtgcctgcatgtctccagtcattacatttggaggcctcctgggggaggcaacagagggcaggatttccgccattgagagtctgtttggcgcaagcctcaccggaatcgcgtacagcctcttcgccggacagcctctgactattcttggctctaccggaccagttctggttttcgagaagattctctataagttctgccgggattatcagctgtcatatctttcactgagaacaagtattgggctttggacctcctttctgtgcattgtcctcgttgcaaccgacgcctctagcttagtgtgttatataacccggtttacggaggaggcttttgccgctctaatatgtatcatctttatctatgaggcactggagaagttattcgatctgggagagacctacgctttcaatatgcacaacaacctggataagctcacctcgtactcttgcgtttgcaccgaaccaccaaatcccagcaatgaaacccttgcccagtggaagaaggacaacatcaccgcccacaatatctcatggagaaatcttaccgtttcggaatgtaagaagctgcgaggcgtattcctgggcagtgcctgcgggcaccacgggccttacattcccgacgtactgttttggtgcgtaatcctgttcttcactacattcttcttatcctcgtttcttaagcaattcaagacaaagcggtacttccccacgaaggtgagaagcaccatcagcgattttgccgtgttccttaccattgtcatcatggtaacaattgattatttggtaggagttcccagtcccaaacttcatgtgcccgagaagttcgagccaacacatcccgaaagagggtggatcatttcgccgttaggagataatccttggtggacccttctcatcgccgcaattccagccctgctgtgtacaatactgatcttcatggaccaacaaatcactgcggtaattattaaccgaaaggagcataaattgaagaaaggcgcaggttaccaccttgatctactgatggtgggggtgatgctcggtgtgtgcagcgtgatgggactcccatggtttgtggccgctacagtgctgtcaatcagtcacgtcaatagtcttaaggttgagtcggaatgctccgctcccggtgagcagcccaagtttcttgggattagggagcagagggtcacaggattgatgattttcatactgatggggctgtcagtcttcatgacctcggtgctgaaattcattcccatgcccgttctgtacggcgtctttctgtatatgggagtcagcagtctgaaggggatccagctgttcgaccggataaaactgtttgggatgccggctaagcaccagcctgacttaatctatcttcgctacgttcccttgtggaaagtgcatatcttcacagtcattcagctcacgtgcttagtactactttgggtaatcaaggttagcgcggctgcagtggttttccctatgatggtactggcgctggtgttcgttcgaaagctaatggacctttgttttaccaaacgagagctgtcctggctggatgacctaatgccagagtctaaaaaaaagaaggaggatgacaagaagaaaaaggagaaagaagaggccgaacgaatgcttcaggacgacgatgataccgtacacctgccattcgaaggtgggtcgctgttgcagatccccgtaaaggctctgaagtattcagttgatccctccatcgttaacatcagtgatgaaatggccaaaactgcacagtggaaggccttaagtatgaatactgaaaacgcaaaagttactagaagtaacatgtctcccgataagcctgtaagtgtgaaaatttcttttgaggatgaaccaagaaagaaatatgtggacgccgagacctcattatag

SEQ ID NO: 241583 - DNA, 2244 bp, synthetic construct
  misc_feature 1..2244: note = Description of Artificial Sequence: Synthetic coding sequence
  source 1..2244: mol_type = other DNA
atgccactcggcaggcagagccatagacatcaccgcactcacggccagaaacaccgtcgcagaggccgtggaaaaggcgctagccagggcgaagagggccttgaagctttagcgcacgacacgccaagccagcgagtccaattcatcctgggtaccgaggaagacgaagagcatgtgccccacgagctatttacagaactggatgagatctgcatgaaggagggtgaggatgccgagtggaaagaaacagccaggtggttaaaatttgaagaagacgtggaggatgggggtgaacgttggtccaagccttacgtcgccacattatccctgcactctctgttcgaactaaggagctgcctcatcaacgggaccgtgctgctagacatgcatgctaattccatagaagagatctcggatctgatcctggaccagcaggaattgtcctctgacctcaacgactctatgagagtaaaggtgcgagaggcgctgctcaagaagcatcaccatcaaaacgaaaagaaaagaaataacctgatacctattgtccgcagcttcgccgaggtggggaagaaacagtccgatccgcaccttatggataagcacggccagactgtgtccccacaatcagttcctacaaccaatttagaagtgaaaaacggtgtaaactgcgaacatagtccagttgacctatccaaagtcgatctgcatttcatgaaaaaaattccaactggcgctgaagcctccaacgtcttagtgggcgaagtggatattttagaccggccaatcgtggcctttgtgcgcctgtccccagccgtgctgctctccggcctcaccgaggtcccaatcccgacccgttttcttttcattctactgggcccagtcgggaaggggcagcagtatcatgaaattggaaggtcaatggcgaccattatgaccgacgaaatattccacgacgtcgcatacaaggcaaaggagagagacgacctgctggcgggaatcgacgagttcctggaccaggtgaccgtgctgccgcctggtgagtgggatccatctatccgcattgaaccaccgaaaaatgtaccatcacaagaaaagagaaagatgcctggagtacccaatggaaacgtgtgtcacatcgagcaggagccacacggtggtcattccggcccagagctccaacgtactgggaggctgttcgggggactagtcctggatatcaagagaaaggccccatggtattggagcgactatcgcgacgccctcagtctgcagtgcctggcatccttcctgtttctctactgtgcctgcatgagtccagtgatcacatttggcggattgttaggagaggcaactgaaggaaggattagtgcaatcgaaagcctctttggagcatccatgacggggattgcctacagtctttttgcaggccaggcattaacaatcctcggttctacagggcctgtgctggtgttcgagaagatcttgtttaagttctgtaaagattatgcactctcatacttatcactgagggcttgcatcggactttggacggctttcctttgcattgtgttggtggccacagacgcgagctctttggtttgctacatcactcgttttacagaagaagcattcgcttcccttatttgcatcatcttcatctatgaggccatagagaaattaatccacctagccgaaacttatccgatccatatgcactcccaactggaccacctgtccctttactactgtcgctgtacactgccagagaacccaaataatcataccctgcagtattggaaagatcacaatatcgtgacggctgaggtgcattgggccaacctgaccgttagtgagtgtcaggagatgcacggtgaatttatggggagtgcctgcggtcaccacggcccttacacccccgatgtactgttttggtcctgcatcctcttcttcacaacattcatactctccagcactctcaaaacgtttaagacaagcaggtactttccaacccggatggagagctgctcggtggcctggcttgagtgcggcggagtgattttggcccattgtaacctgcggctgctccctagttcttgggactatcgccacgcgcctccacagccggcaaacttctgtattttttccagggatggagtgtctccctgctggcctggctggtcccagagtcttgatttggtgatatgcttgccacgcccaccaaagatgctagggctacaagcgtag

SEQ ID NO: 241584 - DNA, 3135 bp, synthetic construct
  misc_feature 1..3135: note = Description of Artificial Sequence: Synthetic coding sequence
  source 1..3135: mol_type = other DNA
atgcctgccgctggcagcaacgagcccgacggcgttctgtcttatcagcgtccagatgaggaagccgttgtagaccagggaggaacatcaactattttaaacattcattacgagaaagaagagctagaagggcatcggacactgtatgtcggggtgcggatgcctctgggacgtcagagccatcggcaccataggactcatgggcaaaagcatcgaaggcgaggcagaggcaaaggggctagccagggcgaggagggcctggaagccctagcccacgacaccccctcacagagagtgcagtttattctgggtaccgaagaggacgaggaacacgtaccacacgaattgttcactgaactggatgagatatgtatgaaagagggagaagacgctgaatggaaggagacggcacgctggctgaagttcgaagaggatgttgaggatggcggagaacgttggtcgaagccatacgtggcgaccttgtccctccacagtttgttcgaactgagaagctgcctaatcaacggcacagttcttctggatatgcacgctaatagcattgaagagatttctgatcttatcctcgatcagcaggagctctctagcgacttaaacgactccatgcgggttaaggtgagggaggcactactcaagaagcatcatcaccagaacgagaagaagaggaacaatctaatcccaattgtaaggagtttcgctgaagtgggtaagaaacagtctgatccacacctgatggacaagcacggccagacagtctcaccccagagcgtgcccaccacgaatctagaagtaaagaatggcgtgaactgcgagcactcccctgtggacctgagcaaggttgatttgcacttcatgaaaaaaatcccgaccggtgccgaagcatccaacgtgctggttggtgaggttgatatccttgatcggcctatcgtggcattcgtgcgtttaagccctgcagtgctactcagtgggctgacagaagtaccaattcccactcgattcctgttcatattactaggaccggtgggcaaagggcagcagtaccacgaaatcggaagatcgatggccacaataatgaccgacgagatctttcacgacgtcgcttacaaagctaaagagagagacgatttgctcgctggaatcgacgagttcctggaccaagtcactgtgttacctcccggtgagtgggatccgagcatccgcattgaacccccaaagaacgttccttcccaggagaagcgcaaaatgcctggcgtccccaatggaaatgtctgccatatcgaacaggagccacacggcggacacagtggcccagagctgcagagaaccggcagactgtttggcggactggtgctggacatcaagcgaaaagcaccatggtactggtccgactatagggatgcactaagtctccagtgccttgcgagcttcctcttcctttattgtgcatgcatgtcacctgttatcacattcggcggactgcttggcgaagccacggaaggacgtataagtgcaatcgagtcacttttcggcgcatcgatgaccgggatcgcgtatagtttgttcgccggtcaggctctgacaattctcgggagtaccggacctgtcctggtattcgaaaagatcctcttcaagttttgcaaggattatgccctgagctatctgagcttacgcgcatgtatcggtctgtggactgccttcctgtgcatagtcctggtggccactgatgcaagttcgctggtctgctatattactagatttacagaggaagcgtttgccagcctgatttgtatcattttcatttacgaggctatcgaaaaactgatacatcttgccgagacttatccaatccacatgcactcacagctggaccatctgagcctctactattgtcgttgcaccctgcccgagaacccaaacaatcacactcttcagtactggaaggaccacaacattgtgactgccgaagttcactgggccaacctgaccgtgagcgagtgtcaggagatgcatggagagttcatgggaagcgcatgcggtcatcatggaccttataccccggatgtgctgttttggtcctgcatacttttctttaccaccttcattctatcctccactctgaaaaccttcaagaccagcagatattttcctaccagggtacgcagtatggtttccgatttcgcagtcttccttactatctttaccatggtcataattgacttcttaatcggcgtgccttctccgaagcttcaggtgccaagcgtgttcaagcccacaagggatgatcggggatggattattaatcctatcggtcccaacccctggtggaccgttattgcggctatcatacctgccctgctgtgcaccatcttaatctttatggaccagcagataaccgcagtgatcatcaaccgcaaggaacacaaactgaaaaaagggtgtgggtatcatttggacctgctgatggtcgcgataatgttgggagtgtgctcaattatgggcttaccctggttcgtggccgctactgttctgagtattactcatgttaactcgctgaaactggaatcagaatgcagtgcaccaggcgaacagccaaagttccttggcatacgggagcagagagtgactggtcttatgatctttgtcctcatggggtgtagtgtcttcatgacagcaatcctgaagttcattcctatgcccgtgttatatggagtcttcttatacatgggggtgtcctcactccaggggatccagttcttcgaccggctgaagctctttggaatgcctgccaaacatcaacccgatttcatttatctccggcatgtacctctccgcaaagtccatttgttcacccttattcagctgacctgcctggtcctgctctgggttatcaaagccagtcctgcggctattgtgtttccaatgatggtactggcactggtgtttgttaggaaggtaatggacctgtgtttctccaagcgggaactcagctggctcgacgacctaatgccagagtccaagaaaaagaagttagacgacgcgaagaaaaaggccaaagaggaggaagtcatcgttctcgcacccaccgtttacctcggcgcttcaaactacaggacctag

SEQ ID NO: 241585 - DNA, 2736 bp, synthetic construct
  misc_feature 1..2736: note = Description of Artificial Sequence: Synthetic coding sequence
  source 1..2736: mol_type = other DNA
atggaggagctgcaggatgactatgaggatatgatggaggagaacctggaacaggaggagtacgaggaccctgacatcccagaatctcagatggaggaacccgcagctcacgatacagaggctacagccacagactatcatacaacctctcacccgggaacgcataaggtgtacgtggagctacaggaactcgtgatggacgaaaagaatcaggagttgcggtggatggaagctgctcgctgggtccaactggaagagaacttgggagaaaatggggcttgggggaggcctcacctcagccacctgactttttggagtctgttggagctgcgccgagtgtttaccaaagggaccgttctgctggaccttcaggagacatcactggctggagtggccaatcagttgttggaccggtttatctttgaagatcagatcagacctcaggatagagaggagttgctccgtgctttgcttctgaagcattcccatgccggagaactagaggcccttgggggagtcaaacccgctgtcctgaccaggtccggcgatccatcacaaccgttgctgccccagcactcaagcttggagacccagctcttctgtgagcagggcgatggaggcacggagggtcactccccaagcgggatcttagagaaaattcccccagactcagaggcaaccctggtgttggttgggagggccgattttctggaacagccagtcctgggattcgtccggttacaggaagctgctgaactcgaggcagtggagctgccagtgcctataaggttcctctttgtgcttctcggaccggaagctccacacatcgactacacccaacttggaagggcagccgctacactgatgagcgaacgcgtgtttcggattgacgcctatatggcgcagtctagaggtgagttgttgcattccctcgagggattcctcgattgcagtttagtgctgcctcctactgatgcgccaagcgaacaggccctattaagtttggtgcctgttcagagggaactcctccgcaggagataccaaagcagtcctgccaaaccagattcttccttctacaagggcctggatttgaatggtgggccagatgacccccttcaacagactggccagttgttcgggggattagttcgagatatcagaagaagatatccctattatctctcagacatcaccgatgcgttctccccgcaggtcttggcagctgtcatttttatttatttcgctgccttgtctccagccatcaccttcggagggttgttgggggagaagacacgaaaccagatgggcgtctccgaattgctgatcagcaccgccgtgcagggaatcctgttcgcgctgctcggcgctcagccactactggtagttggcttcagcggtcctcttttggtgtttgaagaagcattcttctccttctgcgagaccaacggcctagaatatatcgtgggcagagtgtggatcgggttttggctgattctgctcgtagtgctcgtcgtggcgtttgaggggagtttcctggtacggttcatctcccgatatacccaggagattttctcttttcttataagcctgatcttcatctacgagaccttctccaaactgatcaagatcttccaggatcatcctcttcagaaaacctacaactacaatgtgttaatggtgccgaaacctcaggggcctctgccaaatacagcacttctgtccctggtgctaatggccggtacctttttctttgctatgatgcttcgaaaatttaagaatagtagctattttcccggaaagctaagaagagtgatcggtgacttcggagtccctatctctattttgatcatggtactcgtcgacttttttattcaggacacctacacacaaaaactttctgtgcctgacgggttcaaagttagcaactcttccgccaggggatgggtgatccatccactgggcctgagatcggagttccccatttggatgatgttcgctagcgctctcccggcactgctggtgtttatcctgatcttcctggagagccagatcaccacgctgatcgtttctaagccagagcggaagatggtaaaaggctctgggttccatttagacctcctcctcgtggttgggatgggcggtgtggcagccctgttcgggatgccctggctgagcgccactacagtacggagtgtcacgcatgcgaatgctttaactgtaatggggaaggcgagcacccctggagccgctgcccagatccaggaagttaaggagcagcgcatttccggattgctggtggccgtcctggtggggctcagcatcctgatggagcccatcctgtctcggatccccctcgcagtgctgtttggaatctttctgtacatgggcgttacatccctgtccggcatccagttattcgatcgcattctcctgttatttaaacccccaaagtatcaccctgatgtgccttatgtgaaaagggtaaagacctggagaatgcaccttttcacaggcatacagataatttgtctggctgtactatgggtagtcaaaagtacccctgcctcattggcgctgccctttgtattaatcttgactgttcctctgcggagggtgttactcccccttatctttaggaatgtggagctgcagtgccttgatgccgacgacgcaaaggccaccttcgatgaggaggagggcagagacgaatacgacgaggttgccatgcccgtgtag

SEQ ID NO: 241586 - DNA, 3480 bp, synthetic construct
  misc_feature 1..3480: note = Description of Artificial Sequence: Synthetic coding sequence
  source 1..3480: mol_type = other DNA
atgtcctcagctccacgtcggcctgccaagggtgctgattcattctgcactcctggcccaggccgaaagcccagaagacgcccaggggcatcgcccaccggtgaaacacctactatagaagaaggcgaggaggatgaagacgaggcatccgaggccgagggggctcgagctctgacgcaaccatcccctgtctcgacaccatcaagtgtccagttttttctgcaagaggacgactctgccgatcggaaagcagagagaacttctcctagcagtcctgctcccctcccacaccaggaggctacccccagggccagcaagggcgctcaggctggcactcaggtggaggaagccgaagctgaagccgttgccgtggccagcgggacagccggaggcgacgatggtggagcttcaggccgtccgcttcccaaagcgcaacctggccataggagctataaccttcaggagcgtcgtagaatcggttctatgacgggtgctgaacaggctttacttccccgagttcctaccgacgaaatcgaggcccagactcttgccactgcagacttagaccttatgaagtcacaccgttttgaagacgtgccaggtgttcgcagacatctcgttaggaaaaatgccaagggatctacacagagtgggcgtgaaggacgagaacccggaccaacgccccgagctcgcccaagggcaccacataaaccacacgaagtgttcgtggaacttaacgaactgctactggataaaaatcaggagcctcagtggagagagacagctcggtggattaagttcgaagaagatgtggaagaggaaacagagaggtgggggaaaccgcacgtggcctccctatcgttccgctcattactggagcttaggcggacgctcgcccatggggctgtcctcttagacctggatcagcagactctccctggcgtggctcatcaggtggtggaacagatggttatatcagatcagatcaaggctgaagatcgggctaacgtgcttcgcgctctgctacttaagcattctcacccttccgatgagaaggacttttccttcccgagaaacatttctgcaggctcacttggcagcctgcttggccaccatcacggccagggcgctgagtccgatcctcacgtgactgagcctctgatggggggtgttcccgagacccggctggaggtagagcgagagcgagagctcccaccgcctgcccctccagctggtattactcgcagtaagagcaaacatgagctgaaactactggagaaaattcctgagaatgccgaagcaactgtagtgctggtgggctgcgttgagttcctatcccgcccaaccatggcattcgtgaggctccgggaagcggtcgagttggacgccgtactcgaggttcccgttcctgtgcggttcctgttcctgctgctggggccttctagcgctaatatggattatcatgagattggtcgatctatcagtactttgatgtcagacaagcagttccacgaagctgcctatctcgcagacgaacgtgaagatctgttgactgccatcaatgcatttctagactgttccgtggttttgccccctagcgaggttcagggcgaggagctcctgcggtctgtcgcccactttcagcgacagatgctaaagaaacgcgaagaacagggacgccttctcccaaccggcgctggtttggaacctaagtccgcccaagataaagcactcctgcagatggtagaagcggctggagctgcagaagacgatcctctaagaagaaccgggcgacctttcgggggtctgatcagggatgtgagacggcgatacccacactatctgtcagactttagagatgcccttgatccacagtgcctagctgccgttattttcatctattttgccgcactgtcgcccgctatcaccttcggcggtttgttgggggagaagacccaggatctcataggcgtgagtgagttgatcatgtctaccgccctgcaaggagttgtgttctgccttctgggcgcacagcccctgctggtgatcggattctctgggcctctactcgtgtttgaggaggcatttttctcattctgtagtagcaatcatcttgaataccttgtgggacgtgtctggatcgggttctggcttgtgtttctggccctccttatggtcgctctggaaggcagcttcctcgtccgcttcgttagccggtttactcaggaaatcttcgcatttctgatcagtttaatttttatttatgagacattttacaaacttgtgaagatctttcaggaacaccctttgcatggctgttctgcctccaattcttcagaggtcgacggaggagaaaatatgacttgggcaggagcacggcctaccctaggtcctggcaacaggagcctcgcagggcaaagcggccagggcaagcctagaggccagcctaatacagctctattgtccctggtccttatggccggaacctttttcatcgccttttttttgcgcaagttcaagaactccaggttctttccaggcagaatacgaagagtgattggcgactttggggtacctatcgcaatcctgattatggtgctcgtggattatagcatagaggatacgtatacacagaaactgtcagtcccaagcggcttctccgtgacagcacctgagaaacgtgggtgggtcattaaccccttgggagagaagagtcccttccccgtatggatgatggtggcctccctccttcccgcaatcttggtgttcatccttatctttatggagacacagatcaccactcttataatctcaaaaaaggaacgcatgctgcaaaaagggtctgggtttcacctcgacctattgttgattgtcgctatgggcggtatttgcgctctgtttggactcccctggttggcggcagcgactgtcaggtcagtcacacacgccaatgccttgacagtgatgagcaaagccgttgcccctggagataagccgaagattcaagaggtgaaggagcagcgggtgaccgggttgttggtggcattgctggtcggattgtccatcgtgatcggcgacttactgagacaaattccactggccgtcttatttggtatcttcttatacatgggtgtgacaagcctaaatggaatacaattttacgagcgcctacaccttcttctgatgcccccaaagcatcatcccgatgtcacatacgttaagaaagtgagaacccttcggatgcacctcttcaccgccctgcagctgctttgcttggctctgctatgggccgtgatgtctaccgcagctagcctggcttttcctttcattctgatcctcaccgtacccctgcgcatggtagtcctgacgcgaatattcaccgaccgtgagatgaaatgcctggatgctaacgaggcagagcccgtcttcgatgaaagagagggggtggatgagtataatgaaatgcctatgcctgtgtag

SEQ ID NO: 241587 - DNA, 3726 bp, synthetic construct
  misc_feature 1..3726: note = Description of Artificial Sequence: Synthetic coding sequence
  source 1..3726: mol_type = other DNA
atgtcttctgcgcctcgcagacccgcaaaaggcgcagatagcttttgtacgcccgagcctgagtccttggggcctggcacaccaggtttccctgagcaggaagaggacgagctccacagaacacttggtgttgaacgatttgaggaaatactgcaggaggccggttcacgtggtggggaggagcctgggaggtcctacggagaggaagactttgaataccaccggcagagttcccaccacatccatcacccattgtcgactcacctcccaccagacgccaggagaagaaagactccacagggcccaggcagaaagccacgaagaagacctggcgctagtcctacaggtgagacgcccacaatcgaggaaggggaggaagacgaagacgaggctagcgaggctgaaggagcccgagccctgactcaaccaagtccagtcagcactcccagttccgtgcagttcttcttacaggaagacgactccgccgataggaaagcagaacgcactagtccaagctcccctgccccactccctcaccaggaggctacacctagggcttcaaaaggagcacaggccggtacccaggtggaagaggcggaagcggaagcagttgcagtggccagcggaaccgccggaggcgatgacgggggtgcctcgggacgaccccttcccaaagcccaaccaggccataggagctataacctgcaagagcggagacgtattggaagcatgacaggggctgaacaagccctgctgccgagagtccctacagatgaaattgaagcacagactttggccacagccgacctggacctgatgaaaagtcaccgtttcgaagatgtccctggagtgaggcggcaccttgtgaggaagaatgccaaagggtccacacagagcggaagagaggggcgagagcctggacccactcctcgtgctcggccaagggctccacataaacctcacgaagtcttcgtagagctgaacgaactgttgttggataaaaaccaggaaccccaatggcgtgagactgcacggtggatcaagtttgaagaggacgtggaagaggagacagagaggtggggaaagccgcacgtagccagtctttcattcaggagtctgcttgaactacgcagaacattagctcatggcgctgtgttgctagatctggaccaacagactctcccaggtgtggcccaccaggtggtggagcagatggtgatttctgatcagataaaagccgaagatcgggcaaatgtccttagagcactgcttctgaaacatagtcacccaagtgacgagaaggacttttcctttccgaggaacatctctgcgggatccttaggttctctgctggggcaccatcatggccaaggcgcagaatctgatccacacgtcaccgaacccctcatgggaggagtacctgaaacccggcttgaggtcgagagagagcgcgaactgccgcctccagcccctcccgctggtatcacaaggtccaagtccaagcacgaactgaagttactcgaaaaaatcccagagaacgctgaggcaaccgtagtgctggttggctgcgtggaattcctaagtagaccgaccatggcattcgtgcgtcttagagaggcagtggagctggatgctgtgctcgaagtgcctgtgcccgtgcggttcctgttcctcctactgggaccatccagcgctaatatggactaccacgaaatcggaagatctattagcactctgatgtctgacaaacagtttcacgaggcggcatatctggccgatgagcgcgaggatttgctcaccgctataaacgctttcttggactgcagcgtggttcttcctccatcagaggtccagggcgaagaattgttgaggagcgtcgcccattttcagcgccaaatgctgaaaaaaagagaggaacaggggaggctgctgcccaccggagccggtctggagcccaaatctgcgcaggacaaagcactgctgcaaatggtggaagcagccggagccgctgaagacgacccgctgcgacggactggacggcctttcggaggtctgatccgggacgtgcggagacggtacccccactatctgagcgactttagggacgcacttgacccacagtgtttagcagccgtcatctttatctacttcgccgcacttagcccagccattacattcggcggtctgctgggagagaagacccaggacctaatcggcgtgagcgagctaattatgtctacggccctccaaggcgtcgtattctgcctcttgggagcacagccactattggttattgggttttccggccctctgctggtcttcgaggaggcattctttagtttttgctctagcaaccacctggaatatctggtgggtcgggtgtggattggattctggttagtgttcctagctcttctgatggtagctctcgagggatcttttctagtacgttttgttagtcgcttcacccaggagatttttgccttcctgatctcactgatatttatctacgagacattctacaaattggtgaagatttttcaagagcaccccctgcacggctgcagtgcctccaactcctctgaggtcgatggaggggagaacatgacctgggcgggagctcggccaacgctgggaccgggtaatcgatccctagcagggcagtccgggcagggaaaacctagagggcaaccgaacacagctctgctgagcctagtgctgatggcgggtacattctttattgcttttttcctgcgtaagtttaagaatagccgcttctttcctgggcgtatccgccgtgtcattggggacttcggagtgcctattgccatcctcattatggtcctggttgattattccatcgaggacacctatacacagaagctgagcgtacccagtggcttcagtgtgactgcccctgaaaagagggggtgggtcataaatccactcggcgagaaatcccccttcccggtctggatgatggtggcctcattgctccccgcaatcctggtattcatactgattttcatggagactcagattaccacccttattatctcaaagaaggagcgtatgctgcaaaagggcagtgggttccacctggacctgctgttgatcgtcgccatggggggaatctgcgctcttttcggccttccctggctggctgctgccaccgtgcgatctgtgacccatgcaaacgccctcaccgtgatgagcaaggccgtcgcacctggcgataagccaaagatccaggaagtgaaggagcaacgggtgacaggcctcctggttgctctcctagtgggactctccatagtgatcggcgaccttctgcgccagatccccctggctgtattatttggtatcttcttgtacatgggggtgacctccctgaacggcattcaattctatgaacgtctccatctgttattgatgcctcctaagcaccaccctgacgtcacgtacgttaagaaggtgcggactttaagaatgcacctttttacagccctgcagctgttgtgcctcgcattattgtgggctgttatgtcgactgcagcaagcctggccttccccttcatcttgatactaaccgttcctctgcggatggtagtgttgacacggatttttaccgatagagaaatgaagtgcctagatgccaacgaggctgagcctgtgttcgacgaaagggaaggcgtcgatgaatataacgagatgcccatgcccgtgtag

SEQ ID NO: 241588 - DNA, 456 bp, synthetic construct
  misc_feature 1..456: note = Description of Artificial Sequence: Synthetic coding sequence
  source 1..456: mol_type = other DNA
atgtctagtgcgcctagaaggccagctaagggtgccgattctttttgtacacccgaacctgaaagcctgggcccaggaaccccaggctttccagagcaggaggaggatgagcttcatcgcactctgggcgtggaacggttcgaagagatcttgcaggaggccggatcacggggaggtgaagagccaggtcgctcttacggagaggaggacttcgagtaccatcggcagtcaagccaccacatccatcaccccctgagtacccatttgcctccagacgccagaaggaggaaaactccgcaagggccagggaggaaaccacggaggcgaccaggggctagtcccacaggcgaaacacccaccatcgaagagggagaggaggatgaggacgaggcttccgaggccgagggcgctagggccctaacacagccctctccggtaagcacccctagcagctag

SEQ ID NO: 241589 - DNA, 384 bp, synthetic construct
  misc_feature 1..384: note = Description of Artificial Sequence: Synthetic coding sequence
  source 1..384: mol_type = other DNA
atgagctccgccccacggcgaccagctaagggtgctgattcgttctgtacccccgagccagaaagcctgggtcccggaacgccagggtttcccgagcaggaggaagatgaactccaccgaactctgggcgtggagaggtttgaggaaattttgcaggaagccggatctcgtgggggagaggaacctggaaggtcctatggggaggaagacttcgaatatcatagacagtcaagccaccatattcaccacccactttcaacccacctgcctcccgacgcgagacggaggaagactccccaagggccaggacgcaaaccaagaaggagacctggagctagtcccacaggggagacgcctaccattgaggagggagaggaggactag

SEQ ID NO: 241590 - DNA, 438 bp, synthetic construct
  misc_feature 1..438: note = Description of Artificial Sequence: Synthetic coding sequence
  source 1..438: mol_type = other DNA
atgtctagtgcaccacgtaggcccgcaaagggcgcagatagcttttgcaccccagaacccgaatccttggggcctggaacaccaggcttccctgagcaggaggaggatgaactacacagaacgctgggtgtggaacggttcgaggagatattgcaagaagcaggctcccgcggaggcgaagaacccggtagaagctatggagaagaggactttgagtatcatagacagtcatctcaccatattcaccatccactgtcgacccacctgccacccgatgccaggaggaggaaaacacctcagggccctgggagaaagccacgcagaagaccaggcgcatctcccacaggtgaaacaccgaccattgaggagggcgaggaggatgaggacgaagccagcgaagctgaaggcgctcgggctcttacccagccaagtccatag

SEQ ID NO: 241591 - DNA, 3726 bp, synthetic construct
  misc_feature 1..3726: note = Description of Artificial Sequence: Synthetic coding sequence
  source 1..3726: mol_type = other DNA
atgagcagcgctcctaggcgcccagccaaaggggcagacagcttttgcactccagagcctgaaagtctggggcctggcactcccggttttccagagcaagaggaggacgagctgcatagaacacttggagttgagcgattcgaagaaattctccaggaagccggttccagaggtggggaagagccagggaggagctatggcgaagaggactttgagtatcaccgtcaatcctcacaccacatccatcaccccctctccactcatttgccccctgatgcacgacgccgtaaaacccctcaagggcctggccgtaagcctagacgcaggccaggggcatctccaaccggcgaaacccccactatcgaggagggcgaagaggacgaggatgaggcgagtgaggccgagggcgcacgtgccctgacacagccgtccccggtatctaccccctctagcgtgcagttcttcttgcaagaggatgactcagcggatcgaaaagccgaacgtacctcccccagctcccccgcaccacttcctcaccaggaggctacgccacgggcttcaaagggggcacaagccggaacccaagtggaggaagctgaggccgaagccgttgcagttgcctcgggcactgcaggtggcgacgacggaggggctagcgggagaccactgcctaaagcacaacccggtcacaggtcctataatctgcaggaacggcgacgcataggcagcatgactggcgctgagcaggcccttctgccccgagtgccaacagatgagatagaagcgcaaacccttgcaacagccgacctggacctaatgaaatcccatagattcgaggacgtgcctggagtgagacggcatctcgtccgaaaaaacgccaaggggagcacccagtcagggagggaaggccgagaaccaggccctacccctcgggctcgccctagggcccctcacaagccacacgaggtctttgtggagttaaatgagctgctgctcgataagaatcaggagcctcagtggagggagaccgctcgctggatcaagtttgaggaggacgtggaagaggaaaccgaacgttgggggaagcctcatgtggcatcactatcatttcgcagcttgttggagctgcggaggaccctggcacacggtgcagtgctgttggacctcgaccagcagacgcttcctggagttgctcatcaggtcgtagaacaaatggtcatttcagaccaaatcaaggcagaggatcgcgctaacgtgctccgagccctactgcttaaacattctcacccatctgacgagaaggacttctctttccccaggaatatcagcgcaggctcgctcggcagcttgctggggcatcaccacgggcagggagctgagtccgacccccatgtgacggagcctttgatgggcggagtacccgaaaccagactggaggtcgaaagggagcgcgagctgccgccacctgcccctcccgcaggtattactcggtcgaaatcaaaacacgagctgaaactgctggagaagatccctgagaatgcagaagccacggtggtcctcgtcgggtgcgttgaatttttgagccgacccaccatggcctttgttcgcttgcgagaagccgtcgagctcgatgcggtgttggaagttcccgttccagtccggttcctgttcctcctgctggggcctagttcagctaatatggactatcacgaaataggacgaagcatctctaccctcatgagcgataagcagtttcatgaagccgcttacttggccgatgagcgggaagatctcttgaccgccatcaatgcattcctggactgctccgtcgttttacccccatccgaggtgcaaggcgaggagctgcttagatcagtggcgcatttccaaagacagatgttaaaaaagagagaagagcagggtcgtttgctccccacaggcgctggtcttgaacctaagtctgcccaggacaaagctctgctgcagatggtggaggctgctggagcagctgaggacgatccacttagacggactggacgaccattcggcggactgattcgcgacgtgcgaaggcgctatccgcattacctgtctgattttcgggacgctttggacccccagtgtcttgccgcagtcatcttcatttactttgcagccttatcaccggcaattacattcggcggactgttaggggaaaagacacaggacctgattggtgtcagtgaattgattatgagtacggccctccagggcgtggtcttctgcctgctgggcgcacaacctctgcttgttatcggcttctctgggccacttctggtattcgaggaggcttttttctccttttgcagttctaaccacctcgagtacctggtcgggcgtgtttggatcggtttctggctcgtgttcctagctctgttgatggtcgccttggaaggcagttttctggttcggttcgtcagtagatttacacaagagatttttgctttccttatctcactgatttttatttacgagaccttttacaaattggtgaagatattccaggaacatccccttcacggctgcagtgcgagcaatagtagcgaagtggatggaggagaaaatatgacatgggcaggagccagacccaccctcgggcctggcaaccgaagtctggccggacaaagcggccagggtaaaccaaggggacagcctaatacagcccttttatcgttggtcctaatggccggaaccttttttatcgctttttttctacgcaagttcaaaaacagtaggtttttcccgggacgaattagaagggtcatcggggacttcggagtcccaatcgccatcttaatcatggtgctggtggactacagtattgaagatacctatacacagaagcttagtgtgcccagcgggttctcagtgactgctccagaaaaaagaggctgggtcatcaacccgttgggtgagaagagcccttttcctgtatggatgatggttgcaagcctgctccccgcaattctggtgtttattctgatcttcatggaaacacagataaccactttaattatttccaaaaaagagcggatgcttcagaagggcagtggattccacctggacctgcttctgatagtggccatggggggtatttgcgcgctgtttgggctgccctggctggcagcagccaccgtgagaagtgtcacccatgctaacgcccttactgtgatgagtaaagcagtcgccccaggggataaacccaaaatccaggaagtaaaagagcagcgcgtaactggattgctggttgcccttctcgtgggcttgtctattgtgattggtgatctcctgcgtcagatccctcttgccgtgctattcgggatctttttgtacatgggagtaacctctttaaacggaatacaattttacgaaaggttgcatctgctcctgatgcctccaaaacatcaccccgatgtcacatacgtgaaaaaggtcagaaccctccgcatgcatctgttcacggccttacagttgctgtgcctggccctgctgtgggctgttatgtccacggctgctagcctagcgtttccattcattttgatcctgaccgtcccactgaggatggtagtactgaccaggatatttacagaccgcgagatgaagtgcctggacgccaacgaggctgagcctgttttcgacgagcgagagggcgtcgacgagtataacgagatgccaatgccagtttag

SEQ ID NO: 241592 - DNA, 213 bp, synthetic construct
  misc_feature 1..213: note = Description of Artificial Sequence: Synthetic coding sequence
  source 1..213: mol_type = other DNA
atgtccagcgctcctcggcgacccgctaaaggcgctgacagcttttgtacgcctgaacctgagtcccttggacctggcaccccaggtttccctgagcaggaggaggatgagttgcatagaacgcttggcgtggaaagattcgaagagattctacaggaagccggttcacggggaggcgaagagcccggacggtcttacggagaggaggactag

SEQ ID NO: 241593 - DNA, 510 bp, synthetic construct
  misc_feature 1..510: note = Description of Artificial Sequence: Synthetic coding sequence
  source 1..510: mol_type = other DNA
atgtcctccgccccacgtcgccctgcgaagggagccgactctttctgcacacccgaacctgagagcctgggacccggaacgccaggcttccccgaacaggaagaagatgagttgcacagaacacttggagttgaaaggtttgaggagattttacaggaggccggtagccggggtggggaagagccaggaaggtcttatggcgaagaggatttcgagtaccacagacagtcttcccatcacattcaccaccctttgagcacacacttgccccctgatgcaaggcggcgaaagacacctcaaggacctggacggaaacctcgtcgtaggcccggagccagccccactggagaaacgcctacaattgaggaaggggaagaagatgaagacgaggcttccgaagcagaaggtgcccgagcactgacccagccctcaccagtatctacgccctccagcgtgcagttcttccttcaggaagacgacagtgcagatcggaaggcggaacggacgtag

SEQ ID NO: 241594 - DNA, 3240 bp, synthetic construct
  misc_feature 1..3240: note = Description of Artificial Sequence: Synthetic coding sequence
  source 1..3240: mol_type = other DNA
atggaagacgaggcagtgctagaccggggtgcctcttttctcaagcacgtgtgcgatgaagaggaagtggaggggcaccacacaatttatatcggagtccatgtgcccaagtcttatagacggaggaggagacataagcgcaaaactggacataaagagaaaaaggaaaaagagcggatatccgaaaactactctgacaagagtgatatcgagaatgccgacgagagcagtagtagtatcctgaaacctctcatttctccagcagccgagagaatccgctttatactgggagaggaggacgactctccagctcccccacagctgttcactgagttagacgaacttctggcggtagacgggcaggagatggagtggaaggagaccgcccgatggatcaagttcgaggaaaaagttgagcagggcggagagaggtggagtaaaccacacgtggctactctgagtctgcactcactgttcgaactacgcacctgtatggaaaaaggatccataatgcttgaccgcgaggcctccagcctcccccaactggttgaaatgatagtcgaccaccaaatcgagacaggtctgctgaagccagagttgaaggataaggtgacttatactctgctgaggaaacaccgtcaccagaccaaaaagagcaatctgcgaagcctggctgacatcgggaaaaccgttagctcagcctctaggatgtttaccaacccggataacgggagcccagcaatgactcatcgaaatctgacgtcatcttccctgaatgatatttcagataaacctgagaaggaccagctgaagaacaaatttatgaaaaagttacccagggacgctgaagcaagcaacgtcctcgtgggagaggtggactttctggatacgccgttcatagctttcgtgcgcctgcaacaggcagtgatgttaggcgctttgacggaggtgcctgttcctaccagattcctatttatcctccttggccctaaaggcaaggccaagtcctatcatgagatcggcagggcaatcgctactctgatgagcgacgaagtgtttcatgatattgcttacaaggctaaggatagacatgatttgattgccggtatagatgaattcctcgacgaggttattgtccttcctcccggagagtgggacccagccatacgaatagagccgcctaaatccctgccgtctagcgacaagagaaagaacatgtatagtggtggtgagaacgtgcaaatgaacggggacaccccccacgatggcggacatggcggaggcggacacggcgattgtgaggagcttcaaagaacaggtcgtttttgcgggggtctcattaaggatatcaaaagaaaggccccattttttgcatccgacttctacgacgcgctaaacattcaggcccttagtgccatactgttcatctatttagcgactgtaactaatgctataacgtttggcggtctgctgggcgatgctaccgataatatgcagggtgtcctcgagtcattcctgggaactgcggtcagcggcgctatattctgcctgtttgccggacaaccactcaccattctctcatctactggcccagtactggtcttcgagcgattgctgttcaacttttccaaagacaacaactttgactacctcgagttcaggctttggattggactgtggtccgcgtttttatgtctgatcctggtggccacggacgctagttttttggtgcagtatttcacaagattcacagaagaagggtttagcagtctgatatctttcatctttatctatgacgcctttaagaaaatgattaaactggcagattactaccccatcaacagtaatttcaaagtgggctacaacactctattctcttgcacttgtgtacctccagacccagccaatataagtatcagtaatgacacaactctagctcccgagtacctccccactatgtcatccaccgatatgtaccacaatacaacgtttgactgggccttcctaagcaagaaggagtgtagcaagtacggcggtaacctcgtggggaacaactgtaacttcgtgcccgacattacactgatgtctttcattctgttcctgggcacttacaccagtagcatggccctgaaaaagttcaaaacctcaccatactttcccactaccgctcggaagctcatttcagatttcgccataatcttatctattttgatattttgcgtgatagacgccctggtcggagtcgacactcccaaactcattgtcccaagcgagtttaaaccaacatctccgaatcgcggttggtttgtacctccctttggagaaaatccttggtgggtctgcctggccgcagccatcccagccctcctggttactatcctgatcttcatggatcagcaaatcacagcagtgatcgtcaaccgaaaggaacacaagcttaagaagggggcagggtaccatcttgacctcttttgggtggccatcctcatggtgatatgctccctgatggccctcccttggtatgtggccgcaactgtgattagcattgcccatatcgactctcttaaaatggaaactgagacctcagcgcctggcgagcagcccaagtttttgggcgttcgggaacagcgcgtgaccggcacactggtgttcatcctaactggtctctctgtgtttatggccccaattctgaagtttatccccatgcctgtactgtatggagtgttcttatatatgggcgtcgcatccctcaacggggttcagttcatggaccgtcttaaacttttgctcatgcctttaaagcaccagccggatttcatttatcttcgacacgtgccgctccgaagggttcatctctttacgttcctccaggtactgtgcctggctctgctgtggatcctgaaaagtaccgtggctgccatcatcttccccgtgatgattctagccttggtggctgttcggaagggcatggattatctgttttctcagcacgatctcagctttctagatgacgttatcccagagaaggataagaaaaaaaaggaggatgagaagaaaaaaaaaaagaagaaagggtctcttgactctgacaatgacgactcagactgcccatactctgaaaaagtcccgtcaattaaaatccccatggacattatggagcagcaaccattcctgagcgacagtaaaccatccgatcgagaacggtccccaacttttctggaaagacacacaagctgttag

SEQ ID NO: 241595 - DNA, 3108 bp, synthetic construct
  misc_feature 1..3108: note = Description of Artificial Sequence: Synthetic coding sequence
  source 1..3108: mol_type = other DNA
atgtcaactgagaacgtggagggtaagccgagtaacttgggagagaggggaagagcgcgttcatccaccttcttacgagtagtgcagcctatgtttaaccactctatttttacgagtgctgtaagtccagccgcagagaggatccgattcatccttggggaggaggacgattcccccgctccaccccaacttttcacagagctagatgagctcctggccgtagacggccaggaaatggaatggaaggaaacggccagatggataaaattcgaggagaaggtggagcaaggaggggaacggtggtccaagccacacgtcgccaccttaagcctacattcactgtttgagctccgaacctgcatggaaaaggggtctattatgttggacagagaagccagctctctgccccaactggttgagatgattgtggatcatcaaatcgaaacaggtctcctgaaacctgaactcaaagacaaagtgacatacacccttcttcggaagcaccgacatcagactaagaagtctaacctcaggtctctggccgatattggaaagacagtgtctagcgcatcacggatgttcactaatcccgacaacgggtccccggctatgacccaccgcaacctaactagcagctcgttaaacgacatatccgacaaacccgagaaggatcagttgaaaaataagtttatgaagaaactcccacgggatgctgaagcctccaatgtgctggtgggagaggtggattttctggacacgccgtttatagcatttgtgcggctgcaacaagccgttatgctgggagcactgaccgaggtgcctgtgcctactagattcctctttattctcctcggcccaaaggggaaggctaagtcctaccacgaaatcggccgagcaatcgcaacactgatgagcgatgaggtcttccacgatatagcttataaggccaaagacaggcacgatctgattgcaggcattgacgagttcctagacgaggtcatcgtgctccctccgggtgagtgggatccagctatccgcatcgaacctcctaagtccctgccatctagtgacaagcggaaaaatatgtactctggaggagagaatgtccagatgaacggcgacacgccccatgacggcggacacggcggtggaggacacggggactgcgaggagctccagcgcactgggagattctgcggcggtctcattaaagatattaaaaggaaagcccctttttttgcatccgacttctacgatgccctcaacatccaggcactatccgccattctgtttatctacctggccactgtgaccaacgcgatcacatttgggggactgcttggtgatgccactgacaatatgcagggtgtccttgaaagctttctcgggacagccgtgtccggcgcaattttctgtttgtttgccggacagccacttactatactgagttccaccggtcccgtgctcgtcttcgagcggctgctttttaacttttctaaggacaacaactttgattacctcgagttccgcttgtggatcgggttatggagcgccttcctgtgcttaatcctggtggccaccgatgcctctttcctggtccaatacttcaccaggtttacagaagagggcttttcatcacttatatcttttatttttatatacgatgctttcaagaagatgattaagctcgccgattattacccaattaacagtaatttcaaggtaggctacaacactctgttttcttgcacatgtgttcctcctgacccagccaatatctccatctccaatgatactactctagcaccagaatacctgcctaccatgagctccaccgacatgtatcataatacaacgttcgattgggcattcctgtcaaagaaagaatgctctaaatatggtggcaacttagtggggaataattgtaattttgtgcctgacatcacattgatgagttttatactgttcctgggaacatacaccagcagcatggccctcaaaaagttcaagacatcaccttattttcccaccaccgccagaaagctgatcagcgactttgccattattctgtccatcctgatcttttgtgtgatcgacgccttggtcggcgttgacacccctaagttaatcgtcccgagcgaattcaaaccaacgtcgcctaacagaggttggttcgttcctccttttggcgaaaatccttggtgggtttgccttgcagccgctataccagcgctgctggttacaattctgatatttatggaccagcagatcaccgctgtcattgtcaaccgaaaggagcataaactgaagaaaggtgctgggtatcacttagaccttttttgggttgccatcctgatggtgatttgttcacttatggcgttgccgtggtatgtcgccgctacagtgatcagtatcgcacacatcgatagtctaaagatggagaccgagacttctgcccctggggagcagccaaaatttctgggcgtccgggaacagcgtgtcacaggcacactggttttcattttaacaggattatctgttttcatggcgcctatcctgaaattcatccccatgccagtgttatacggagtgtttctgtatatgggcgtggcatccctcaacggtgtgcagtttatggacaggctgaagctgctacttatgcctctaaagcatcagcctgacttcatttacctcagacacgtgccactgcgtcgcgtgcacctgtttacatttttgcaggtgctgtgtctagccctgctgtggatcctcaagagtacggtagctgcgataattttccccgtcatgatcttagcactggtggccgtgcggaagggaatggattacttatttagtcaacacgatctgagtttcctggatgatgtgatacccgagaaagacaaaaagaaaaaagaggatgaaaagaagaaaaaaaagaagaaagggtctttagactccgataatgacgacagcgactgtccttactctgaaaaagtcccaagtatcaaaatccccatggatatcatggaacagcaaccatttttgtctgattccaagcccagtgatcgtgagagatcgcccaccttcttagaaagacataccagctgctag

SEQ ID NO: 241596 - DNA, 2988 bp, synthetic construct
  misc_feature 1..2988: note = Description of Artificial Sequence: Synthetic coding sequence
  source 1..2988: mol_type = other DNA
atggaagacgaagcagtgctggatagaggcgctagcttccttaagcatgtctgcgacgaggaggaggtggaaggacatcatactatttacatcggtgttcacgtgccaaagagctatagaagacgcaggcgacacaaaagaaagacagggcataaagaaaagaaggaaaaagagcgaattagcgagaattactcagataagagcgacatcgaaaacgccgatgagtcttcatcaagcatcctgaaacctctgatcagtcccgcagcagagaggattaggtttattctaggggaggaggacgactccccagcaccccctcagcttttcacagagctggatgagctcctggccgtcgatggacaagaaatggagtggaaagagacagcccgatggattaagtttgaggaaaaagtggagcagggcggtgagagatggtcgaaacctcatgtggctacactgtccctccactcgctgtttgaattgagaacatgtatggagaaaggatcgatcatgctggatagggaagcctcctccctgcctcaactggtggaaatgattgtggaccatcagatagagaccggcctcctcaaaccagaactgaaagacaaagttacctacaccctgctgaggaagcacaggcaccagacaaaaaagagtaatttacgatctctcgccgatattggcaagacagtcagtagcgcatcccgtatgttcacgaacccagataatggttctcctgcgatgacacataggaatctgacctcatcttctttgaacgatataagcgataaacctgagaaggatcagttgaagaacaaattcatgaaaaaactccctagggacgctgaagcctcgaatgtgcttgttggcgaggtcgacttcctggacactccctttatagcttttgtgcgtttacagcaggctgtgatgctgggagctctgactgaagtgcctgttccaacaaggttcctgtttatattactcggcccaaagggaaaggccaagtcatatcacgaaataggtcgcgcaatcgcaaccctgatgagtgacgaagttttccacgatatcgcatataaggcgaaggatcgacacgacctcatagcaggcatagacgagtttctagatgaggttattgttctcccccctggcgaatgggaccccgctattagaattgaacccccaaaaagtctccccagctccgacaaaagaaaaaacatgtactcaggaggtgagaacgtgcaaatgaatggagataccccccatgacgggggtcatggaggtggcggacatggtgattgtgaagagcttcagagaacaggtcggttctgcggcggactcattaaggacatcaagcgaaaggccccattttttgcaagcgacttctacgacgctctcaatatccaggcgctcagtgcaatcctgtttatctacctggccaccgtaaccaacgccataaccttcggtggactcctaggcgacgctaccgacaacatgcaaggggttttggaaagctttttggggacagccgtgtccggggctatcttttgcctgtttgcaggacagcccctgacaattcttagttctaccggaccagtgctggtctttgagcggctactctttaactttagtaaggacaataactttgactacttggaattccggctttggattggactttggtctgccttcctatgtctcattctcgtcgcaaccgatgcctcttttttggtgcaatactttacccgttttacagaggagggatttagctcccttatctccttcatattcatctacgacgcattcaaaaaaatgatcaaactggcggattactatccgatcaactctaatttcaaggttggctataatacactgttttcctgtacttgcgttccgcctgatcccgctaacatctctatttccaacgacacgactttagcacctgagtacctgccaactatgtcatcgaccgatatgtaccataatacgacctttgactgggctttcctttctaagaaagagtgcagcaagtacggaggaaacctggtcggcaacaattgcaatttcgtcccagatatcacactgatgagcttcatcttgttccttgggacctacacatctagcatggcactgaaaaaattcaagacatctccatattttcctaccaccgccagaaagctcatcagcgactttgcgatcatcttgtctattctgatcttctgtgttattgacgcactggtcggggtggatacacctaaacttatcgtgccgagcgagtttaagccaacctctcccaatagaggctggtttgtccctccctttggcgagaatccatggtgggtctgcctggcagccgctattcctgctctgctggtgacgatactgatcttcatggatcagcaaatcaccgcagtgattgttaatcgcaaggagcacaagttgaagttcatcccaatgcccgtactgtatggagtgttcctgtatatgggagtggctagtttaaacggcgtgcagttcatggataggttaaagcttctgcttatgccccttaaacaccagcccgacttcatctatctgaggcatgtgcccctgaggcgtgtgcacttgtttacatttcttcaagtgctgtgcctggcactcctgtggatcctgaagtcaaccgtagccgcaatcatttttcccgtaatgatcctggccctagttgccgtccgtaagggtatggattacctgttctctcagcacgacttatccttcctggacgatgtcataccggaaaaggataagaagaagaaagaggatgaaaaaaaaaaaaagaaaaagaagggctccctcgactccgataacgacgactctgactgcccgtacagcgagaaagtgccttccattaagattcctatggatattatggaacaacagccctttcttagcgatagtaaaccaagcgatcgagagcgaagcccaactttcttagagcgtcatacgagctgctag

SEQ ID NO: 241597 - DNA, 3285 bp, synthetic construct
  misc_feature 1..3285: note = Description of Artificial Sequence: Synthetic coding sequence
  source 1..3285: mol_type = other DNA
atggaggacgaagcagtgctcgatcgcggagcaagctttctcaagcatgtctgcgatgaggaagaggtcgagggtcaccatacaatctacattggggtgcacgtgcctaaaagctacaggcggagacgtagacataagcgcaaaacaggccacaaggagaaaaaggagaaggagagaataagcgagaattacagcgataaatccgatatcgagaatgctgacgaatcctcatcctctatcttgaagcctttgatcagcccagcagctgagcggatccgtttcatcctgggggaagaagacgattcaccagcaccccctcagcttttcaccgagctggacgagctccttgccgttgatggacaggagatggaatggaaggagacagccagatggatcaaattcgaggagaaagtcgaacaggggggtgagcgctggagtaaacctcacgtagccacccttagcctgcacagcttatttgagttgcggacctgtatggagaagggttcaatcatgctggaccgcgaggcatcctcactgccccagcttgtggagatgattgtcgatcatcagattgaaaccggattgcttaaacccgaactcaaagacaaggtgacatatacattgcttagaaagcatcggcaccagactaaaaagagtaacttgcgcagcctggcagatatcgggaagaccgttagttctgctagtcggatgtttactaatcctgacaatgggagccctgcgatgacccacaggaatctgacctcttcatcactgaacgacatcagtgataagccggaaaaagatcagcttaagaataagttcatgaagaaactgccgagagacgccgaggcgtccaatgtgctggttggcgaagtggattttctggataccccctttatcgcctttgtgaggctgcagcaagcagtgatgttgggggctttaaccgaggttcctgtgcctacccgcttcctttttattctacttggcccaaaaggcaaagccaagtcttatcacgaaatcgggcgtgcaatagcaactctgatgtccgatgaagtgttccatgacatcgcatataaggcgaaggaccgacacgatctgatcgctggcattgatgagtttctcgatgaagtgatcgtgcttcccccaggagagtgggacccggctatccgcattgagccacccaaaagcctacccagttcggataagaggaaaaatatgtattccggaggagagaatgtgcagatgaatggtgacaccccccatgatggcggacacggcggaggcggacatggtgattgcgaagaactgcaaaggactgggagattttgtggaggcctgattaaggacattaaaaggaaagcgcctttttttgcatccgatttttacgacgcactgaacatacaggcgctgagcgcaattctgtttatctacctagcgacagttactaatgcaattaccttcgggggtttgttgggggacgcgacagacaatatgcagggagttctagagagttttctgggcactgccgtgagcggtgctatcttctgtctctttgccggacagccactcacaattctcagctccacgggcccagtcctcgtgttcgagagactgctgttcaatttctccaaggataataacttcgactacttggagttccggctgtggataggattatggagtgcattcttgtgcttgattctcgtcgccactgacgcaagttttctggtgcagtacttcacccgcttcacagaagaaggcttttcttctctgatctcattcattttcatctatgatgcctttaaaaagatgattaagctcgcggactactaccccatcaacagtaacttcaaagtcggttacaataccctgttctcctgcacgtgcgtgcccccagacccagctaacatcagcatatctaatgataccacacttgcccctgaatatctgccgaccatgtcttcaactgatatgtatcacaatacaaccttcgactgggctttcctgtctaaaaaggagtgctcaaagtacgggggaaatctcgttggaaataattgtaatttcgtgcccgatatcaccctgatgtccttcatcctgtttctgggcacctatacttcgtcaatggctcttaagaaatttaaaacttctccctatttcccaacaacagcccgtaaactcatatctgattttgctatcattcttagtatcctgatcttttgtgttattgatgcactggtgggcgttgacacccccaagcttattgtcccttccgagttcaagccaacaagcccaaaccggggatggttcgttcccccattcggggagaacccatggtgggtttgtttggcagcagccattccagcgttgcttgttaccatattaatctttatggaccagcagataactgctgtgatcgtgaaccgcaaggagcacaagctgaagaagggcgcagggtaccaccttgacctgttctgggttgcgattctgatggtaatctgctcgctgatggccctgccttggtacgtagccgcaactgtcatctcaatcgcccatatcgactccctcaaaatggagactgagacatctgccccaggggagcaacccaagttcctcggggttagggagcagcgtgtgacaggtacactggtcttcatactcaccgggctgagcgtcttcatggcaccaattctcaagtttatcccgatgccagttttgtatggcgtgtttctgtacatgggggtagcatctctcaacggcgtgcagttcatggaccgcttgaagctgctgcttatgccattaaagcaccaacctgacttcatctatctgaggcacgttcccctgagacgcgtgcacctgtttaccttcctgcaggtgctgtgtctagcactcttgtggatcctgaagtctactgtggccgcaattatcttccctgttatgatcctggctctggtagctgtgagaaaggggatggattatctgttcagccagcatgatctgtctttcttggacgatgtgattcctgagaaagacaaaaagaagaaagaggatgaaaaaaaaaagaagaagaaaaaaggatccttggattccgataacgacgacgaaaaggaccatcagcatagtctgaatgccactcaccacgcagacaaaattccatttttgcagagtctaggaatgccatccccacccaggaccccagtcaaggtggtgccacagatccggattgagctcgaacctgaagacaatgactacttttggcgctcgaaggggaccgagaccacactgtag

SEQ ID NO: 241598 - DNA, 3123 bp, synthetic construct
  misc_feature 1..3123: note = Description of Artificial Sequence: Synthetic coding sequence
  source 1..3123: mol_type = other DNA
atgaaggtaaaagaggagaaggcgggagtgggtaagcttgatcacacgaatcaccggagacgattccccgatcagaaagaatgtccccctatacatattggcctgccagtgcccacatatccgcagaggaagacagatcaaaagggccacttgagcgggcttcagaaagttcattggggattgaggcccgatcaaccacaacaagaactaactgggccagggtccggggcttcgtcccaggactcatctatggatttgatctcccggactcgctcacctgcagctgagcagctgcaagacatactgggggaagaagatgaggcccctaaccctaccctgttcactgagatggatactttgcaacatgatggagaccagatggagtggaaagagagtgcgcgatggatcaagttcgaggagaaggttgaagagggaggcgagagatggagcaagccacatgtgtccaccttgagcctgcacagcttattcgagctgaggacatgcctgcagacgggcaccgtattgttagacctcgacagcggatccctcccccaaatcattgatgatgtgatcgagaagcagatcgaggatggcctgttgcgacccgaactgagagagcgcgttagctacgtgctgttgagacgccataggcatcagaccaagaagccaattcaccgcagcctggctgatattggtaagtctgtttcgactaccaaccggtcccccgctagaagccccggagccggtcctagtttacatcactctactgaggatctgcggatgagacagagcgccaactacggacgactctgtcacgctcagtcaaggagtatgaatgacatcagccttaccccaaataccgatcagcgtaaaaacaagttcatgaaaaagatccccaaggattcggaggctagtaacgtcctggtcggcgaggttgatttcttagaccagccttttatagcattcgtgaggctgattcagtcagctatgctgggtggtgttacagaagtgccagtaccaactcggtttttatttatcctgctcggaccctcggggagggccaaatcatataacgaaatcggtcgcgcaattgccaccctgatggttgacgatctgttttccgatgtggcatacaaagctcgcaaccgagaagatctcattgcaggcatcgacgaatttctggatgaagtgatcgtgctgcctcccggagaatgggacccaaatatcaggatcgagccacctaagaaggttcccagcgcagacaagagaaagtccgtgttcagcctggcggaactaggccaaatgaacggctccgtgggcggtggaggcggagcgcctgggggaggaaacggaggcggaggtggaggaggcagtggcggtggggctggtagtgggggagccggtggaacttcttctggagatgatggcgagatgccagctatgcatgagataggagaggagctgatctggacagggaggttcttcggaggattgtgtctcgacattaagcgtaagcttccttggttccctagcgatttttatgacgggtttcatatacagtctatttcggctatcctgtttatctacttaggatgcatcacaaatgctattacatttggaggcttgctgggcgacgccacagacaattatcaaggcgtcatggaaagctttctcgggacggcaatggccggaagtctgttctgcctgttctccggccagccattaatcatcctgagctcaactggccctattctgattttcgaaaagttgctgtttgatttttccaagggtaacggactggactacatggaatttcgcctttggatcggcctccactctgcagttcagtgtctgattctggtggccacagatgcatcatttataatcaaatacatcactcgctttactgaggaaggcttctccacattgatttcctttatcttcatttatgatgcaattaagaaaatgattggagctttcaaatattaccccatcaatatggatttcaagccaaatttcattacaacctataaatgcgagtgtgtcgccccagacaccgttaacactaccgtgttcaacgccagcgccccattagccccagatactaatgcaagtttgtacaacttactcaatctgacagcgctcgattggagtctgctcagcaagaaggaatgcctttcttatggaggccgtctgttgggcaactcctgtaagttcatcccagatttggccttgatgtcatttatcctgttttttggcacctacagcatgaccctgaccctgaagaagttcaaattcagtcggtatttcccaacaaaggtccgagctctcgtagcagacttttccatcgtcttttcgatcctcatgttttgtggcatcgatgcatgttttgggttggaaacgcccaagctgcacgttccatcagtgatcaaacccaccaggcctgatcgaggatggttcgttgctccttttggaaagaacccgtggtgggtgtaccccgcttcgattttgccagccctactcgtcactattctcatcttcatggatcaacaaatcaccgccgttattgtgaatcggaaggagaacaagcttaagaaagcagctgggtatcacctcgatttgttttgggtcgggatcctaatggccctatgttctttcatgggccttccatggtacgtggccgcaactgtgatcagtattgcacatattgacagcctgaaaatggagactgagacctccgccccaggggaacagccacaattccttggcgtgcgtgagcagagagttacaggaataattgtgttcatccttacaggtatcagtgtttttctagcacccatcctaaagatcctgggactgatcatcgtccggaggctgctggactttattttctcgcagcacgatcttgcctggatagataacattctgcccgagaaagaaaaaaaggagaccgataaaaagagaaagaggaagaaaggagcccatgaggactgcgacgaagaacctcagttccctccgccaagtgtgattaagattcctatggaatcagtccagtccgacccacagaatgggatccactgtatcgccagaaagcgatcatcatcctggtcatacagcctatag

SEQ ID NO: 241599 - DNA, 3414 bp, synthetic construct
  misc_feature 1..3414: note = Description of Artificial Sequence: Synthetic coding sequence
  source 1..3414: mol_type = other DNA
atgaaagtgaaagaggagaaggctggagtcggcaagttggatcataccaatcaccgcagaagattccccgatcagaaggaatgcccacctattcacatcgggctgcctgtgcccacttacccgcagcggaaaaccgatcagaaaggacacctgtcaggtctgcagaaggtgcattggggcctgaggcccgatcaaccgcaacaggagttaacagggcctggctcaggagcaagctcacaagacagctccatggacctcatctcaagaacaaggagcccagcagctgagcaactgcaggatatactcggcgaggaagacgaagcacctaatccgacactctttaccgaaatggataccttgcaacatgacggtgaccaaatggaatggaaagagtccgcaagatggatcaagtttgaggaaaaagttgaggagggcggagagcgctggtctaagcctcatgttagtaccctcagcttgcactcattgtttgaacttcgtacttgtctgcagaccggcaccgtactactagacctcgattccggaagcctcccacagataatcgacgatgttatcgaaaagcaaattgaggatggactcctgcggcctgagttacgggaaagagtgagctacgtgcttttgcgccgacacaggcaccagaccaagaaacccatccataggtccctggcggatatcgggaaatcggtgtctacaacgaatcggtcccccgcacgttcccctggggcaggccctagtctgcaccactctaccgaggatttaagaatgcggcagtctgccaattacgggcgtctgtgccatgcacagtcccgcagtatgaatgatattagcctgacccctaatacagaccagcgcaaaaacaagttcatgaaaaagatccctaaggactctgaggcttcaaacgtcctggtcggcgaggtggacttcctggaccagccttttattgcctttgtgagacttattcaatccgctatgctcggtggtgtgactgaggtgccggtgccaacccgtttcctgttcatcctgctgggaccctctgggagagctaagagctataacgaaatcggtcgcgctatcgccacccttatggttgatgaccttttcagtgacgttgcttacaaagccagaaatcgggaggacctgatcgctggaatcgatgagttcctggatgaagttattgtgctgccgccaggcgagtgggaccctaatataagaatcgagcccccaaaaaaagtgccctctgccgacaagagaaaaagtgtgttctccctggcagagttaggacaaatgaacggtagtgtcggagggggaggaggcgcacccggtggcggtaacggaggcggaggcggaggaggctccggtggcggagcagggtctggtggcgctgggggtacatcgtcaggtgacgatggggagatgccagctatgcacgaaatcggcgaggagttgatatggaccggacgctttttcgggggactctgtctcgacatcaaaagaaaactgccctggttccccagcgacttctatgacggattccacatccaatctatctccgctatcctgtttatatacttgggatgcattacaaacgcaattaccttcgggggtttgttgggcgatgcgactgataactatcagggtgtgatggagtcattcctcgggaccgccatggccggatccttattctgtctgttcagcggccaacccctgataattctgagtagtaccggacctatcctgattttcgaaaagctcctgtttgatttctcgaaaggcaacgggctcgattacatggagttcagactttggataggcctgcatagcgccgtgcagtgcctgattctagtagctacagatgcctctttcataattaagtacatcacacgctttaccgaagaaggattttcgacattgatcagcttcatcttcatttacgacgcaattaaaaagatgatcggggctttcaaatactacccgattaacatggacttcaaacccaatttcatcacaacttacaaatgcgagtgtgtagccccagatactgtgaataccaccgtgtttaacgcctctgcaccgctggccccagacaccaacgcttcactgtacaatctactgaatctgacggccctggattggtctctgctatctaagaaggagtgcctctcttatgggggtcgcttactcgggaatagctgtaagttcattcctgaccttgcactaatgagtttcatcctctttttcggcacctatagcatgacactgaccctcaagaagttcaaattctcgcgctacttccctaccaaggtgcgggcactggttgccgatttttccattgtgttctccatcctgatgttctgtggcatcgacgcctgcttcgggctggaaactccaaagctccacgtgccatccgtcattaagcccaccaggccggatcgcggatggttcgtggcccctttcggcaagaatccatggtgggtttatcctgcatctattctgcctgccctgctagtgaccattctcattttcatggatcagcagatcactgccgtcattgtaaaccgaaaagagaataagctgaaaaaagccgcagggtaccacctggacctcttctgggtcggaatcctcatggccctctgctctttcatgggcttaccctggtatgtggccgctacagtgatctcgatcgcccacatcgatagtctgaagatggagaccgagacctctgctccaggcgagcagcctcagttcctcggagtccgggagcagcgcgtgaccgggataatagtctttatccttaccggaatcagcgtgttcctcgctcctattctcaaatgtatccccttgccagtgttgtacggggtatttctctatatgggtgtagcctccctcaacggcatacagatgggaacggggggttcagagtttaagatccagaagaaattgacaccattttgggagagatgtaagctgtttctaatgccggcaaaacatcagcccgaccatgccttcctccggcatgtcccactgcgcaggatacatctttttactctggtgcaaatcctgtgccttgcagtgctgtggattctgaaatccacagtagccgctataatctttcccgtgatgatactgggcctcatcatcgtcaggcgcctcctggactttatcttctctcaacacgacctcgcatggatcgacaatatccttccagagaaagaaaaaaaggagacagataagaaaagaaagaggaagaagggggctcacgaggattgcgatgaagaaccacagttcccccctccttcagtcatcaagatccctatggagagcgtccagagcgacccgcaaaatggcatacactgcatcgcacggaagcgctcttcttcctggagctattccctgtag

SEQ ID NO: 241600 - DNA, 3060 bp, synthetic construct
  misc_feature 1..3060: note = Description of Artificial Sequence: Synthetic coding sequence
  source 1..3060: mol_type = other DNA
atgaaggtaaaagaggagaaagccggagtcggaaagctcgaccacactaaccatcgcaggcgatttccagatcagaaaggctcccccgctgctgaacaactgcaggatattctgggagaggaagacgaagcccctaatcccaccttgttcaccgagatggacactctgcagcatgatggagatcaaatggaatggaaagagtccgcacggtggattaaattcgaagaaaaagtggaagaaggaggtgagcggtggagcaagccacatgtgagcaccctgtcgctccattcactcttcgagcttagaacttgtctgcagacaggaaccgtcttactggacctggacagtggcagtctgccccagatcatcgatgatgttattgagaaacagatcgaggatggacttctgcgacctgagctccgagagagagtgtcctatgtgctcctgagacgccacaggcatcagactaagaaacctattcataggtctctcgccgatatcgggaagtccgtaagcaccaccaacaggtccccagcacggagccctggcgcaggcccttctctacaccactctaccgaggatttgaggatgcgacagtcagcaaattatggacgcctctgccacgcgcagtcgcggtctatgaacgacatcagccttacccctaacacggaccagaggaaaaacaaattcatgaaaaagatccctaaagacagcgaagctagcaacgtgctggtgggagaagtggattttttggatcagccttttatcgcgttcgtgaggcttattcaatcggccatgctgggtggggtcactgaagtccctgtgcctacgcgtttcctcttcatactgttagggccatccggtagggccaaaagttacaatgaaatcggacgggctatcgccacattgatggttgacgacctgttctccgatgtggcttataaggctaggaacagagaagatttaatcgccggtattgatgaatttctcgatgaggtgatagtgctgccgccaggcgaatgggaccccaatattcgtattgaacctcctaagaaagtaccaagtgctgacaagagaaaatcggttttctctctggcagagctcggccagatgaatggatccgttggcggtggagggggagcgccaggtggtggcaacggtggaggaggcggtggtggtagcggtggaggagccggatcaggcggagccggtggcacaagcagcggcgacgacggcgagatgccagcgatgcacgagatcggggaagagctgatatggaccggcaggtttttcggaggcctatgtctggatataaaacgcaaactcccatggtttccctccgatttctatgatggattccatattcagtctatttccgctatcctgttcatttatttgggctgcatcaccaacgccattacttttggcggtctgctgggcgacgcaacagacaactaccagggagttatggaatctttcttgggaaccgccatggccggaagcctgttttgccttttttctggtcagcctctcattattctctcctctaccggacccatccttatttttgaaaagctgctgttcgacttctctaaaggaaacggactagactatatggaattccgcttgtggattggactccattcagcagttcaatgcctcattctcgtggcgaccgacgccagttttattataaagtacatcactcgatttacagaagaaggtttttccaccctcatctcattcatcttcatctatgacgccatcaagaagatgatcggagcgttcaaatactaccccattaacatggactttaagccaaatttcatcactacctacaagtgtgagtgtgtggctcccgataccgtcaataccactgtatttaatgcgtctgctccgcttgccccagatactaatgcttcactctataatttactgaatcttactgccctcgattggtcacttttgagcaagaaagaatgtcttagctacgggggaaggctccttgggaactcttgtaaatttattcccgacctcgccctgatgagtttcattctttttttcggaacctacagcatgactcttacccttaaaaaattcaagtttagcagatatttccccaccaagcccacccggccagatcgaggctggtttgtcgcacccttcggaaagaatccttggtgggtgtacccagcctctatcctccctgcactgctagtaaccattctgatttttatggatcagcagataaccgctgtcattgtgaatcgcaaagaaaacaagctcaaaaaagccgctggctatcacctggacctgttctgggttggcattctcatggcactgtgttccttcatgggactgccttggtacgtggccgcaactgtaatctcaatcgcgcacatagacagcttgaaaatggagactgaaacctccgcacctggggagcagccacagttcctcggggtccgtgagcaaagggtcacagggatcatcgtatttattctaaccggcatttccgtgttcctagcgccaatccttaaatgtatccccctgccggtgctgtacggagtgttcctgtacatgggggttgcctctctaaacggaatccagttttgggagcgctgtaaattgttcctgatgcctgccaagcaccagccggaccacgcatttctgagacatgtgcctctaaggaggatccacctatttacgcttgtccagatattatgcctcgcggtactttggatcctcaagtcgaccgtggccgctatcatctttcctgtcatgatcctcgggttgattatcgtgagaagactactcgatttcattttcagtcagcatgacttggcatggatagacaacatcctacccgaaaaggagaaaaaagagacggataaaaagaggaaacgtaaaaagggagctcatgaagattgtgatgaggaaccccagtttccacccccaagcgtgattaaaatccctatggaatcggtgcaatcagacccccagaacgggattcattgtatagcaagaaaaagaagcagctcatggagctattcactctag

SEQ ID NO: 241601 - DNA, 3060 bp, synthetic construct
  misc_feature 1..3060: note = Description of Artificial Sequence: Synthetic coding sequence
  source 1..3060: mol_type = other DNA
atgaaggtgaaagaggagaaggccggtgtcggcaaactggaccacactaaccaccggagaagattccccgaccagaaaggctctcctgctgctgaacagttacaggacatccttggagaggaagatgaggctcctaaccccactctcttcactgaaatggacacgctccagcatgatggagatcaaatggaatggaaagaatctgcgcgatggattaaattcgaagagaaagttgaagaggggggagaaaggtggtctaagccgcacgtgagtactctcagcctacacagcctattcgagctgcgtacctgtctgcagaccgggactgtcttgctggatttggatagcggctcactgccacagatcatagatgatgtcattgagaagcagattgaagacggcttgttgcgcccagaattgcgcgagcgggttagttatgttctgcttcgacgccatcggcaccaaacaaagaagcccatacatagatctttagctgatatcggaaaaagcgtgagcaccaccaataggtcacccgcaaggtcaccgggtgccggtccatccctgcaccactctacagaagacctccggatgagacagagcgccaattacggcaggttgtgccatgcacagagccggagcatgaacgacatttccctaacacctaacacagatcagcgaaaaaataagttcatgaaaaagatccctaaggactccgaagcttcaaatgtgctggtgggtgaggtagacttcctcgatcaacctttcatcgcattcgtgcggctgatccagagcgcaatgctgggtggcgtgaccgaggtcccagtgcctacccggttcctgtttatattattgggaccaagtgggagagccaaatcttataacgagattgggcgagctatcgccactcttatggtggatgatctgttttcggacgtagcctataaagctcgtaatagagaagatctcatcgctggcatcgatgaattcctcgacgaagttatagtgctacctcccggtgagtgggaccctaacatccgcatcgagccacctaagaaagtgcctagtgccgataagcgaaagagcgtgttcagtctggcagaactggggcagatgaacggctctgtaggcggtggtgggggagcacctggtggaggtaacggcggagggggtggtgggggatcagggggaggcgcaggatcgggcggagctggcggaaccagctctggtgatgacggcgagatgccagcgatgcacgagatcggggaagaactgatctggactgggagattctttgggggactatgcctggatattaaaagaaagttaccctggtttccatcagatttttacgatggcttccacatccagagcatcagcgccattcttttcatctatctaggatgtatcacaaatgctattacctttggaggcctgctcggagatgccacggataactaccagggggttatggagagttttttaggcacggcaatggccggttcattattttgcctcttcagtgggcagcctctaattatcctgtctagtaccggacccattctcattttcgagaagctattgttcgatttttctaaaggcaatgggctggactacatggaattccgcctgtggatcgggctacattcggccgtgcagtgcctgattttggttgcaaccgatgcctcttttattattaagtatattacgaggttcactgaagagggctttagcacccttatctccttcattttcatctacgacgccattaaaaagatgatcggcgcatttaagtattaccccatcaacatggactttaaacctaactttatcactacttacaagtgcgagtgcgtggccccagacacagtgaacaccaccgttttcaacgcttccgcacctcttgcgcctgataccaatgcctctctctataacttgctgaatttaaccgccctggattggtctctactgtccaagaaagagtgtctgagttatgggggacgcctcctaggaaacagttgtaaatttatcccggatctggccttaatgtcctttattctgtttttcggaacttattcgatgaccctcactttgaagaagttcaagttttccagatattttccgacaaagcctactagacctgataggggatggtttgtcgcccctttcgggaagaacccctggtgggtgtaccccgcatccatcctgccagctttgttggtgaccatcctgatttttatggatcagcaaatcaccgctgtgatcgtaaatcggaaggaaaataagctgaagaaagcggcagggtatcatctcgacctgttttgggtcgggatcctaatggccctgtgtagctttatgggactaccgtggtatgtggcagctaccgtcatttccattgctcacattgattctctgaagatggaaaccgaaacctccgcccctggagaacagccccaatttctgggggtcagagaacagcgagtgactgggatcatagttttcattctaactggaatctctgtgttcttagctcccattctgaaatgtattcccttaccagttttgtatggggtttttttatatatgggcgtggcttcgctgaacggcattcagttctgggagcgttgcaaactctttcttatgcccgctaagcaccagcccgaccacgctttcctgaggcacgttccacttaggcgtatacatctctttactctggtgcaaatactgtgcttagccgtgttatggattctgaagtctacagtggccgcaatcattttccctgtgatgatactcgggttgatcattgttcggcgtctccttgatttcatcttcagtcaacacgacctagcatggatcgataacatattgccagaaaaagaaaagaaggaaaccgataaaaaaaggaagaggaagaaaggggcacacgaagactgtgacgaggagccgcagtttcctcctccctcagttattaaaatcccgatggaaagtgttcaaagcgatccacaaaacggaatacattgcatcgcaaggaagagaagtagcagctggagttattctttgtag

SEQ ID NO: 241602 - DNA, 3123 bp, synthetic construct
  misc_feature 1..3123: note = Description of Artificial Sequence: Synthetic coding sequence
  source 1..3123: mol_type = other DNA
atgaaggtaaaagaagagaaagccggtgtgggaaaacttgaccacacaaatcaccggagacgtttccctgatcagaaggagtgtcccccaatacacatcgggttaccagtacctacgtacccccagaggaagacagatcagaaggggcacctgtcaggcttacagaaagtccattgggggctgaggcccgatcagccccagcaggagcttaccggacctggatccggagcatcctcccaagactcatctatggatctgatatctcgtactaggtcacctgctgcagagcaactgcaggatattttaggtgaggaggacgaggcccctaatccgacactgttcaccgagatggacaccctgcaacacgacggcgaccagatggaatggaaggaatcagctaggtggattaagttcgaagagaaagtggaagaaggcggtgagcgttggtctaaacctcacgtgagcacactctcacttcactctttgtttgagctccgcacttgcctccagacagggactgtgttactggatttagatagtggcagtctgccacagattatcgacgacgtaattgagaagcagattgaagatgggctgcttcgtcccgagttgcgggagcgcgtatcctacgtactgctacgccgacatagacatcagaccaagaagcccattcatcgctctctcgctgacatcgggaagtctgtgagtaccactaaccggagtccagcgagatcacccggagccggtcctagcttacatcattcaacagaagacttgagaatgcggcagtccgcaaattacggtcgactctgccatgcccagagccggagcatgaacgacatttcattaacgcccaacactgaccagagaaagaacaagttcatgaaaaaaatcccgaaggattcggaagcctcgaatgttctcgtgggtgaggtggattttctggaccagcctttcatcgcattcgtcaggctcatccagtctgcaatgttggggggagtgacagaggtccctgtcccaacccggtttctgttcatcctgttggggccaagtggcagggcaaagtcatataatgaaatcggacgggcaatcgcaacgttgatggtggatgacctgttctctgacgtggcatacaaggctcggaatcgggaggacctcattgccggaattgacgagttcttggatgaagtcatcgtcctgcctccgggagaatgggatcccaacatccgcattgagcccccaaagaaggtgccctcggccgacaagaggaaaagcgtgttttctctcgccgaactcggccagatgaacggatctgtgggcggtggtggaggcgctcctggaggcggtaacggtggcggtggcggtggaggctcaggcggaggcgcagggagcgggggtgctggtggtactagctccggtgacgatggcgagatgccggcaatgcacgagatcggggaggagttgatttggactggaagatttttcgggggactttgcctcgatatcaagaggaaactaccttggttcccatccgacttctacgacggtttccacatccagtccatctccgcaatcctgttcatctacctgggctgcattaccaacgcaataaccttcgggggactcctgggcgacgccaccgacaactatcaaggggttatggaaagctttctgggtacagcaatggcaggctctctgttctgtctcttctccggtcagcccttgattatactgtcaagcactggacccattctgatttttgagaaacttctgtttgacttctctaagggtaatggcttagattacatggaattccgcttgtggattgggctccatagtgccgttcagtgcctgattttagtagctacagatgccagcttcatcatcaagtatatcactcgatttaccgaggagggcttttccacgctgatatccttcatatttatttatgatgcaattaaaaagatgatcggagccttcaaatattacccgatcaacatggatttcaagcccaactttatcactacttacaagtgcgagtgcgtagccccagacacggtgaacacaacggtcttcaatgcctccgctcctctggcacccgacacgaatgccagtttatataacttgctaaacctgacagctttggactggtcgcttttgtccaagaaagaatgtctatcctatggaggccgactattagggaattcctgcaagtttattcctgacctggccctgatgagctttattttgttctttggcacgtacagcatgaccctgactctcaagaagtttaaattcagccgatatttcccgactaaggttagggcactggtggcagatttttcgatcgtgtttagcatactaatgttctgcggcatcgatgcttgtttcggactggagacccccaagttgcatgtgccctccgtgattaagccaactcggcctgatagaggatggttcgttgcccctttcgggaaaaatccttggtgggtctacccagcatcgatactgcccgcactactggtcactatactgatcttcatggaccagcagataacagcagtgatcgtgaaccggaaagagaataagcttaagaaggctgccggttatcatctggacttgttctgggtggggattctcatggctctgtgcagttttatgggcctgccatggtatgtggccgcaaccgtgatttctatcgcacacatcgattccctcaagatggaaacggagacctccgctccgggagagcagccacaatttctgggagttcgggagcaacgcgtcaccggcatcatagtttttatcctgacggggatcagcgtttttctggctccaatccttaagatactgggacttatcatcgtgaggaggctcctcgatttcatcttctctcaacacgatttggcctggatcgacaacatcctcccagaaaaagagaaaaaagagacagataaaaagagaaagcggaagaagggcgcacacgaggattgtgacgaggagccacagtttccccctccttcagtcattaaaatacctatggagagcgtgcagtccgacccacaaaacggaatacactgcattgctcggaaaagatctagctcatggtcatactcattgtag

SEQ ID NO: 241603 - DNA, 3414 bp, synthetic construct
  misc_feature 1..3414: note = Description of Artificial Sequence: Synthetic coding sequence
  source 1..3414: mol_type = other DNA
atgaaagtgaaagaggagaaggctggggtaggcaagctagaccacacaaatcacaggcgtcggttcccggaccagaaggagtgtccccctatacatatcgggctgcctgtgccgacataccctcagcgcaagacagatcagaagggccacctgtcaggtctccagaaggtccattgggggctccgacctgaccaaccgcagcaggagttaacaggccctgggtccggcgcttcttctcaggactcctctatggatctaataagtcgaacccggtctcctgctgctgagcagctccaggacatcctgggcgaggaggatgaggctcctaacccgactctgtttaccgaaatggacactctccagcacgacggggaccagatggagtggaaagagtctgcccgttggattaaatttgaggagaaggtagaggagggtggagagcgctggtctaaaccacacgtgagtactctaagtttgcacagtctatttgagctgcgcacttgtttacagaccggcactgtactcctggatttagatagtggctcattgcctcaaatcatagatgacgtaattgagaagcagattgaggacggactgcttaggcccgagctgcgagaacgcgttagctatgtgctattgcgaaggcatcgccaccaaaccaagaagcccattcaccgctccctggccgacattgggaaaagcgtcagcactacgaacagatctcccgcaaggtcacccggtgcaggacccagcctgcaccatagcactgaagatctccgcatgagacaatcggctaattacggcagattgtgtcatgctcagagtcgatctatgaacgatatttcccttacacccaatacggatcaacgcaaaaataagttcatgaaaaagatacccaaggactctgaagcctccaacgttcttgtgggcgaggtcgactttctggaccaacctttcattgcattcgtgcgattgattcaatccgctatgctgggaggggtgaccgaagtgccagtccccacaagatttctgtttatcctcctcggaccctcaggaagagccaaaagttacaacgagattggtcgcgctatcgcgacactgatggtcgacgatctgtttagtgatgtggcatataaggccagaaaccgggaggacctgatcgcgggaatcgatgagttcctggatgaggtcatcgtactaccccctggagagtgggacccaaacatccgcattgagccgcctaagaaggttcccagcgcagacaaaaggaaaagtgtcttctccttagccgagctgggtcagatgaatggatcagtgggcggaggaggaggggctccgggaggcggaaacgggggaggcggtggagggggatccggaggaggagccggtagcggtggcgctggagggacctcctcaggcgacgacggcgaaatgcctgcgatgcacgaaattggagaggaacttatatggacaggtagattctttggaggtctgtgccttgacatcaaaaggaagctgccttggttcccatcagacttctatgacgggttccatatacagtccatttcggccattctgttcatctaccttggatgtatcacaaacgctattacctttggaggcctgctcggggatgccaccgacaattatcagggcgtcatggaatcctttctgggcaccgccatggcgggtagcctgttctgcctcttcagcggccagccactgatcatcttgtcatctactgggcctattctcatttttgagaaactgttattcgatttcagtaagggaaacgggcttgactacatggaatttcgactttggattggtctccacagcgccgttcagtgtctgattcttgtggctactgacgcatcgttcataatcaaatacataaccaggttcaccgaggaaggcttttcaactctcatatcatttatctttatctacgatgcgataaagaagatgataggcgctttcaaatactaccctattaacatggattttaaacctaactttatcaccacctataagtgcgagtgtgtggccccagatactgtgaacactactgttttcaatgccagcgcccctctcgccccagacactaatgccagcctctacaatttgctgaacctgactgcactggactggtcattgctgagtaaaaaagaatgtttatcatatggtggccgactgctgggtaattcttgtaagtttattccagacctggctctcatgagcttcattttgttcttcggcacctactcaatgaccctaactttgaaaaaatttaagttctcacgctatttccccacgaaggtcagggccctggtagcggacttttctattgtattctcaattctgatgttttgcggaatagatgcatgtttcggactcgagactcccaaactgcacgttccatctgtgatcaaacccacgaggccagacagaggctggttcgtggcaccctttggtaagaatccatggtgggtgtacccggcatcgattttgcccgcactgttagtgaccatccttatcttcatggatcagcagatcactgccgtgattgtgaacagaaaagagaacaaattgaaaaaagcagcaggctaccacctggacctgttctgggtgggaattctcatggctctgtgcagcttcatgggcctcccttggtacgttgcggctacggtaatttcaatcgctcatatagatagtctgaagatggagaccgagacatcggcaccaggggagcaaccacaatttctcggtgtacgagagcagagggttaccggtattatagtttttatactaactggtatctcagtgtttttagccccaatactgaaatgtatccccctgcccgtcctgtatggcgtgttcctctatatgggagtagcttctcttaacggaattcagatgggcactggtggctccgaattcaaaatccagaaaaagctcacacccttttgggagcgctgtaaattattcctaatgcccgcaaaacatcaacctgaccacgcgttcttgagacatgtgcctctccgtcgaatccatctattcacgctggtgcaaatcctgtgtttggccgtgttgtggatactgaaatctaccgtagctgcgataatttttcctgtgatgattctcgggcttattatcgtccggagactgcttgactttatcttcagccagcacgacctggcctggatcgacaatatcttaccggagaaagaaaagaaggaaaccgataagaaaaggaaaagaaagaagggagctcacgaggactgtgacgaggagcctcagttccccccacccagcgtcatcaaaatccccatggagagcgtacaatctgacccacaaaatggaatccactgtatcgccaggaagcgctcaagctcatggtcttatagtttgtag

SEQ ID NO: 241604 - DNA, 3366 bp, synthetic construct
  misc_feature 1..3366: note = Description of Artificial Sequence: Synthetic coding sequence
  source 1..3366: mol_type = other DNA
atgaaggtaaaagaagagaaggctggggtgggtaagctggaccacactaaccatcgaagacgctttcccgatcagaaggagtgcccgccaatacatattgggctccccgtgcccacttatcctcaacgcaaaaccgaccagaaaggacacctctctgggctgcagaaagtgcactggggattgagacctgatcagcctcagcaggagcttacgggtcccggatctggggcttcttcccaagactcatcaatggacctcatctcaagaactcggtcgcccgcagccgaacagttgcaggatattctgggggaagaggacgaagcacctaatcccactctgttcactgagatggacaccttgcagcatgacggcgaccagatggaatggaaagagtccgcacggtggatcaaattcgaggagaaagtggaagagggcggagaaagatggagtaaaccgcacgtcagtaccctgagtctgcactctctctttgaactcagaacttgcctgcagacaggaacagtgctgctggacctggactccggttcattgcctcagattatcgatgatgtgatcgagaagcagatcgaggacggacttctgcgcccagagctgagggaacgcgttagctacgtgctccttcgtcggcaccggcatcagacaaagaaaccaattcatcgcagcctggccgatatcggcaagagtgtgtcaacgaccaaccgatcacccgctcggtcgcctggcgctgggccatcacttcaccattccactgaggacctgagaatgagacagagcgctaactacggtaggctctgccacgcacaaagccggagcatgaatgatatcagtctcacaccaaataccgatcagaggaagaacaaatttatgaagaagatcccaaaagacagcgaggcctcaaatgtcttggtgggcgaagttgattttttggatcaaccctttatagcctttgtaaggcttatccagtctgccatgcttgggggagtgaccgaagtcccggtgccaacaagattcctgttcattctactggggccaagtggaagagccaaatcctacaacgaaatcggtcgggcaatcgcaacgctgatggtggatgaccttttctcagacgtcgcttataaagccaggaaccgggaagatttaatcgccggtatcgacgagtttttagacgaggttattgttttgccaccgggagaatgggaccccaacatacgaattgaaccgcctaagaaggtgccgtcagctgacaagagaaagtccgtgtttagtctggccgaattaggccagatgaatgggagcgtggggggtgggggaggggcacccggaggtggcaacggcggtgggggtggcggaggctccggtggtggggctgggagcggcggagccggaggtacctcatctggtgacgacggtgaaatgcctgccatgcacgagatcggggaggagctcatctggacagggcgattcttcgggggtctgtgcctagatatcaaacgaaaattgccatggtttccctcagatttctatgatggctttcatattcagagcatctccgctatcctattcatatatctgggctgcatcacaaacgccattacctttgggggactcctgggcgatgctacggataactatcaaggggttatggagtcgttcctcggtaccgccatggccggaagtctgttttgccttttcagtggccagccacttataatcttgtcgtccacagggcctatcctgattttcgagaaactgctgttcgactttagtaaaggaaacggcctggattatatggagtttcgcttatggattggattgcacagcgcagtgcagtgccttatcctcgtggcaaccgacgcaagctttatcattaagtacattacacggtttaccgaggaagggttcagcacattgatctcctttattttcatctacgatgcaatcaagaaaatgatcggagcgtttaaatattaccctattaacatggactttaagccaaacttcatcaccacttataagtgcgaatgcgtggcgccagataccgtcaataccacggtatttaacgcgagtgctcccctggcacctgacacaaatgcatccctgtataaccttctaaacctcacggccctagactggtccttactcagtaagaaggaatgcctgtcttatggaggccgactcctagggaattcttgcaagtttattcccgatctagcgctgatgtctttcatcctgttctttggtacctactcgatgaccctgacactgaagaagttcaagttttcgcgctacttcccaactaaggtgcgagcattagtagctgattttagcatagtgttctctatcttgatgttttgtggcatcgacgcctgcttcggcctagagacacctaagctgcatgtgccatctgtaataaaacctacaaggccagataggggatggttcgtcgcacctttcggaaagaacccttggtgggtataccctgcctctatcctgcctgcccttctggtgaccatcctcatctttatggaccagcagataacagccgtcatcgtgaacagaaaggagaataaactgaagaaagctgccggttaccatctggacctcttttgggtcggtatcttaatggctctctgttccttcatgggcctcccatggtacgtggctgccactgtgatatctatagcccacatcgattcgctcaaaatggagacagagacctcggcacccggagaacaaccgcagttcctcggggtccgggagcagcgggtgactggcattatagtgttcatcctgaccggcatcagtgtgttcttagccccaatattgaagtgtatcccgctgcccgtgctgtacggtgtcttcctgtatatgggcgtggcttcactgaacggaatccagttttgggaacgctgtaaattgtttctaatgccagccaagcatcagcccgaccacgcattcctccggcacgttcccctccgaagaatccatttgttcaccctggtccagattctgtgtttggccgtcctgtggatccttaagagcactgtcgcagcgatcatatttcctgtcatgatactgggactgattatcgtccgacggctgcttgacttcatcttctcacagcatgatttggcctggattgacaacatcttgcccgaaaaggagaagaaagaaaccgataagaagcggaagcgcaagaagggcgcacatgaagactgtgacgaggagccccagtttccacccccaagcgtaatcaagatccccatggaatccgtccagtccgacccccagaacggaattcattgtattgccaggaagcgatcctcaagctggtcatactctctttag

SEQ ID NO: 241605 - DNA, 2982 bp, synthetic construct
  misc_feature 1..2982: note = Description of Artificial Sequence: Synthetic coding sequence
  source 1..2982: mol_type = other DNA
atgaaggttaaagaggagaaagcaggagttggaaaactggatcacacaaatcatagacggaggtttcccgaccagaaggagtgccccccaatacacataggtctccccgtgccaacatatcctcagcgcaagaccgaccaaaagggccacctgagtggcctgcagaaagttcactgggggctgcgccctgaccaaccccagcaggagctgacaggtcctgggagtggggctagtagccaggatagttcaatggatctgatctccaggactcgaagtcctgctgccgaacagcttcaggacattcttggagaggaggacgaagcaccaaaccctacccttttcacagaaatggacaccttgcaacatgatggggatcagatggagtggaaagaaagtgcaagatggattaaatttgaagagaaggtggaggaggggggagagagatggtccaagcctcatgtgagcacactgtccctgcactccttgttcgaactgaggacttgtctgcagactgggaccgtcctcctagatctggactctggttccctcccccagatcatcgatgacgtgatagaaaaacagatcgaggatggactcctgaggcctgagctccgagagcgcgtttcctatgtactcctgaggcggcaccgacaccagaccaagaagcccatccatcgctctctggccgacattggaaaatcagtgagtacaaccaaccggagtcctgcccgttcacccggagcaggaccttctttgcaccatagcacagaggatctgaggatgcgtcagagtgcgaactacgggcgattgtgccacgctcaaagccggtcgatgaacgatatctcccttactccaaacacagaccagcggaagaacaagtttatgaaaaaaattcccaaagacagcgaggcctccaatgtgctggttggtgaggtggacttcctcgatcagccgttcattgcctttgtgcggttgattcagagtgccatgctgggcggagtgaccgaagtgccggtgccgacacggtttctgtttattctactgggtccatcaggacgagctaagtcttataatgagatcggcagggccattgccactctcatggttgatgacttattctccgacgttgcctataaagccaggaatcgcgaggatttaatcgctgggattgacgagttcctggacgaagtgatcgtccttcctccaggggagtgggatcccaatatcaggatcgagcctcctaaaaaagtgcctagtgccgataaaaggaaaagcgtcttcagcctggctgagcttggtcaaatgaacggaagcgtgggcggaggtggcggagcgcctgggggtggcaatggcggtggtggcggaggcggttctggcggaggcgcaggaagcggcggagccggaggaacctcctctggagatgatggcgaaatgcccgctatgcatgagatcggtgaagagctcatttggaccggcaggttttttgggggattatgcctagatatcaagaggaagctgccatggttccccagtgatttctacgatggctttcacattcagagtatatccgccatcctgttcatctacctcgggtgcattacgaacgcaattacctttggaggtttgctcggagacgccactgataattatcaaggcgtcatggagtcattcttaggaacagctatggcaggatcactgttttgcctcttttccgggcagccgctcatcatactgtcttctaccggtcccatcctgatattcgaaaagctgctgtttgacttcagtaaggggaacggacttgattatatggagtttcgactgtggattgggctccactccgccgtgcagtgcttaattctggtcgccacagatgccagtttcatcatcaaatatatcaccagatttactgaggaaggcttcagcactctgatctctttcatcttcatctatgacgccattaagaagatgattggcgcttttaaatattacccgatcaatatggattttaagcctaacttcatcactacctataagtgcgagtgtgtggcccctgacacagtgaatactactgtctttaatgcatctgctcctctggctccagataccaatgctagcttatacaatctcttgaacctgaccgctctcgactggtcgctgctgtcaaaaaaagagtgtctcagttatggcggtcggttgctcgggaactcctgcaagtttatcccagacttagctcttatgtctttcatcctgttctttggcacgtacagcatgaccctgaccctaaagaaattcaaattctcccgctatttccctacaaaggtacgagccctggtcgctgattttagtattgttttctccatccttatgttctgcggaattgacgcgtgctttggcctggaaacgccaaaactgcacgtgccgagcgtgattaagccaacacgacccgaccgcggttggtttgtcgccccttttgggaaaaatccttggtgggtgtaccccgcttctattctacccgcactcctggtcaccatccttattttcatggatcaacagataactgccgtaatagttaatcgcaaagaaaacaaactcaagggcaccgagtcaaacaggcaccataggctccaccccgatgggaacttgtgcctgccaggctcccacccgaaagtgtacccgccagccggagctgtaagatcccttccactccatggaagaggtctgccagagtggcacccagtgctgggcaccctacaggccctgcccgacgcttcccaggcacccgctggcccatgcctgcctgccgcaagggctgcagcacctgaccctccgcttcaccctggggctgaccccctgccaggaggagcattggacccccagatccatggcggatgccatcacttgccaggccacgacccaggtccacatcacagatccaaggcatctggatttcatctgttccctgcacgacctgggctggattag

SEQ ID NO: 241606 - DNA, 2895 bp, synthetic construct
  misc_feature 1..2895: note = Description of Artificial Sequence: Synthetic coding sequence
  source 1..2895: mol_type = other DNA
atgaaggtgaaggaggagaaagccggagtcggcaaattagaccacacaaaccatagacgcagattcccggaccaaaaagagtgtcccccaatccacattgggctgccagttcctacctaccctcagcggaagacggatcagaagggccacctgtctggactccagaaagttcactggggactccgtcctgatcagccacagcaggagctcaccggacccggatccggcgcatctagtcaggacagcagcatggatttgattagtcggacccggtcaccggcagcagagcagctacaggacatcctgggagaagaggatgaagcccctaaccctactctgtttaccgagatggacaccctgcaacacgacggcgaccagatggagtggaaagaaagcgccagatggattaagttcgaggagaaggtggaggagggcggagagcggtggtcaaagccgcatgtctctacattgtcactgcacagccttttcgagctgcgaacatgcctccagaccggtactgtgctgcttgatctggacagtgggagtctcccgcaaataattgatgatgtaatagaaaaacaaattgaggatggattgctcagacccgagttgagggaaagggtttcttatgtcctgcttaggcgccataggcatcagacaaagaaacctatccaccgcagtctggctgacatcggcaagtccgtgtcgactactaataggagcccggcacgctcacccggagcaggcccttccctccaccattctacagaagatctacgtatgcggcaatcagcgaactacggtcgcctgtgccacgcgcagtcaaggtcaatgaacgatatctcgctaactcctaatacagatcagcgtaagaataaattcatgaaaaaaatccctaaagacagcgaagcaagcaatgtgctggtgggagaagtcgattttttagaccagccattcatagctttcgttaggctcattcagagtgccatgcttggaggcgtgactgaggtgcctgttcctacaagatttctgttcatacttctgggtcccagtggccgagccaaatcttacaatgaaataggacgcgcaatagccacacttatggtggacgacttgtttagcgatgtggcatataaagctagaaacagggaggacctgattgcaggtatagatgagttcctggacgaagtgatcgtcctaccgccaggcgaatgggatccaaatattagaatcgagcccccaaagaaagtgcctagcgcagacaagcggaaatccgtgttttcacttgccgagctcggacagatgaatgggtcagtcgggggtgggggtggcgcaccagggggtggaaatggagggggtggaggaggcggttcaggaggcggagcaggtagcggaggagctgggggaacatcatcaggagatgacggggaaatgcccgctatgcatgaaattggcgaggagctaatctggacagggcgattctttggcggactgtgcctcgacatcaagcggaaacttccttggtttccgtcagatttctatgacggattccacattcagtcgattagcgccatcctgttcatttatctcggttgcataaccaatgctatcacctttggcggtttgctaggtgatgccactgataactaccagggcgtaatggaaagttttctcggaaccgctatggcaggctcactcttttgcctttttagcgggcagcctttaattattttatcttctacggggccaatactgatcttcgagaaacttctcttcgatttcagtaaaggaaacgggctggactacatggaattccggttgtggataggcctgcactcagccgtgcagtgcttgatcctggttgctactgatgcctccttcatcataaaatatatcacccgctttaccgaagaagggttcagcaccctgatttccttcatcttcatttacgacgctatcaagaaaatgataggggctttcaagtattatcccatcaatatggacttcaagcctaatttcataaccacctacaagtgtgagtgcgtggctcctgacacagtgaataccacggtctttaacgcttccgctccactagccccagacacgaacgcttccctctataatctgctcaacttaactgcccttgactggagcctcctcagcaaaaaggagtgtttatcttacgggggtaggctgttggggaactcctgtaagttcattcccgacttagccttgatgagttttatccttttttttggcacctacagtatgacactgacacttaaaaaatttaaattctcaaggtactttcccacaaaaccgacaagacctgatcgcggatggtttgtggccccatttgggaagaacccatggtgggtttacccagcttcaatcctgccagccctgcttgtcactatcctgatcttcatggaccaacagatcactgccgtcattgtgaacaggaaagaaaacaaattgaaaggtacggagtcgaatcggcatcaccgtttgcaccccgatggcaacctctgcctaccaggctctcaccccaaggtttatcctcctgcaggcgcagtcagaagcctccctctgcacgggagaggactgcctgaatggcaccctgtgctgggtactctgcaggctcttcccgatgcgtcacaagcccctgctgggccatgtctcccggctgcccgtgcagctgctcctgaccctccactgcatcctggagcagatccactgccaggaggagctctggacccccagatccatggtggttgtcaccatcttcccggtcatgtgtccctccatcacagaagctgggctagctcctcgttcgaggggttctggatcagtagctttccttctaccacatggcctggactcaccacttcgtag

SEQ ID NO: 241607 - DNA, 390 bp, synthetic construct
  misc_feature 1..390: note = Description of Artificial Sequence: Synthetic coding sequence
  source 1..390: mol_type = other DNA
atgaaagtgaaggaagaaaaggccggagtaggaaagcttgaccataccaatcatcggagaagattccccgaccaaaaggaatgccccccaattcacatagggctcccggttccaacatatccccagcgtaagacagatcagaaggggcacttgagcggactccagaaggtccactggggcttaagaccggatcagcctcaacaagaactgactggacccggtagcggtgcaagttctcaagatagttctatggacctgatttcgaggacacgctcacccgcagcagagcagctgcaggatatcctgggtgaggaggacgaagcccctaatcctacactctttaccgagatggacacgctacaacacgacggagaccagatggaatggtag

SEQ ID NO: 241608 - DNA, 438 bp, synthetic construct
  misc_feature 1..438: note = Description of Artificial Sequence: Synthetic coding sequence
  source 1..438: mol_type = other DNA
atgaaagtcaaagaagaaaaggccggtgttggcaaattggatcataccaaccaccgtcggaggtttcctgaccagaaagagtgcccccctattcatataggcttacccgtacccacatatcctcagcggaaaactgaccaaaagggccatctgagcggtctgcagaaggtgcattgggggctgagacctgatcagccgcaacaggagctcaccgggccagggtctggcgcatcttcacaggattcttctatggacctgatttcaaggacacggagtcccgctgccgagcaactgcaagatattcttggggaggaagacgaggcacccaaccccactctgtttacagagatggataccctgcagcacgatggcgaccaaatggaatggaaagagtctgcaagatggatcaaatttgaggagaaagtcgaggaaggttag

SEQ ID NO: 241609 - DNA, 3429 bp, synthetic construct
  misc_feature 1..3429: note = Description of Artificial Sequence: Synthetic coding sequence
  source 1..3429: mol_type = other DNA
atgaaggtgaaggaggagaaagctggcgtaggaaagctggaccacactaaccatcggaggcgtttccccgaccaaaaggaatgccctcccatccacatagggttaccagttcctacttatccacagcgaaagaccgatcagaagggacatctgagcggactgcagaaagtacattggggcctccggcctgaccagcctcagcaggaactaacagggcctggtagcggggcatcatcacaagatagcagcatggacctcatcagcaggacccgctctcctgccgctgaacagctgcaagatattttgggggaggaggacgaggcccctaaccctactctgtttactgaaatggatacgctgcagcatgatggggatcaaatggaatggaaagagtcagcccgatggattaagttcgaggaaaaagtagaggaaggcggagaaagatggtccaagccacacgtgtccaccttatccctacacagcctgtttgaactgagaacctgtctgcagacaggaactgtgctgctggacctagactcgggctctctgccccaaataattgatgacgtgattgaaaaacaaatcgaagacggcttacttagaccagagctccgcgagcgggtgtcatacgtgctcctgcgcaggcacagacatcagacgaagaagccaattcatcggtcattggccgatatcggaaagtccgtgtctactaccaatcggagccccgcacgctctccaggcgcaggcccatccttacaccattcaaccgaggacctgcgcatgcggcagtcagctaattacggtcgcttatgtcacgctcaatcccgaagtatgaacgatatctcattgactcccaacacggatcagagaaagaataaattcatgaagaaaatccccaaagactcagaggcatccaatgtgcttgtgggcgaagtggactttctggaccagccctttatcgcatttgtgcggctgatacagtctgcgatgcttgggggagtgaccgaggtgcctgttcctaccaggtttctttttattttgctcggtccctctggtcgggctaagtcatacaatgagattgggagggccatcgctacgctcatggttgacgacctattttcagacgtcgcttataaagcacgcaatagagaagacttgatcgccggtatcgacgaatttttggatgaagttatcgtactccccccaggggagtgggacccgaacatacgcatcgaacccccaaaaaaggttccatccgccgataaaagaaaaagtgtgttttcactggcagaactgggtcaaatgaacggcagcgtcggaggtggaggtggggcacccggtggaggaaatggaggcggtggaggtggagggagcgggggtggggctgggtccggcggagcaggaggcacttcgagtggggatgacggcgaaatgcccgcaatgcacgagatcggggaagaattgatttggactggaaggtttttcggtggcctctgcttggatataaagcgtaagctgccatggttcccctctgacttctacgacggatttcacatccagagtatttcagctattctgttcatatacctaggctgtatcactaatgcaatcactttcggaggcttgctgggcgacgccaccgacaactatcagggcgtgatggagagctttctggggactgccatggcgggttcgcttttttgtctctttagcggtcaacccctgattatactcagctctacaggccctatcctgatcttcgaaaagcttcttttcgacttctctaaagggaatggactcgactatatggagttcagactctggatcggccttcattctgccgttcagtgtctaatcctcgtggccacagatgcaagcttcatcattaagtacattacacgcttcacagaagaagggttctctacactgatcagctttatcttcatatatgacgctataaagaagatgatcggagccttcaagtactacccgatcaacatggacttcaagcccaacttcattaccacatataagtgcgaatgtgtcgccccagacacagtgaacacgacggtcttcaacgcttcagcccctcttgcacctgacaccaacgcatccctgtataacctattaaaccttacagctctggactggtcattgctgagcaagaaggagtgcctcagttacggaggccgattattggggaactcgtgcaaatttattccggacctcgccctcatgagctttatcctgttttttggtacctactccatgaccctcactctcaagaagttcaagttttctaggtactttcctaccaaagtcagggctctggtagcagacttctccatagtcttctctatccttatgttctgcggcatcgatgcctgctttggcctggagactccgaagctgcacgtaccatcagtgattaagcctactagacctgacagaggttggttcgtcgcgccatttggtaaaaacccttggtgggtgtatcctgcaagtatcctgccggcactgttagttaccatccttatcttcatggaccagcagattacagcagttatagtgaatcgtaaggagaacaaacttaagaaagctgccggataccacctcgatctcttttgggtaggcattctgatggcactttgctcctttatggggttgccttggtacgtggctgcaacagtaattagcattgcacatatcgacagcttgaaaatggaaactgaaactagtgcccctggcgagcagccgcagttcctgggcgtaagagagcagagggtgactggtattattgtcttcatcctgactggcattagtgtgtttctggctcccatcctgaagtgcatccccctccctgttctgtacggcgtttttctgtatatgggagtggcgagtcttaatggaatccagatgggtaccggagggtccgagtttaaaattcagaaaaagctaaccccattctgggagagatgtaagctgttcctgatgcccgctaagcaccagccagaccatgccttcctgagacacgtcccattgcgtcgcattcacctctttacactcgttcagattctctgcctggccgtgctctggattttgaagtctactgtcgctgcaattatctttcctgtgatgtcactgtccaccaccgatctgggactgatcattgtccgcagactgctggactttatcttctctcaacatgatctggcctggattgataatattctacccgagaaagaaaaaaaagagaccgataaaaagcgtaaaaggaaaaaaggagcccacgaggactgcgacgaagagccacaattcccacccccttccgttatcaagatccccatggaatctgtccagtctgaccctcagaatggaatccactgtatagcaagaaaaaggtcatcttcttggtcctactccctgtag

SEQ ID NO: 241610 - DNA, 3645 bp, synthetic construct
  misc_feature 1..3645: note = Description of Artificial Sequence: Synthetic coding sequence
  source 1..3645: mol_type = other DNA
atggaaaggtttcgcttagagaaaaaactgccgggaccagatgaagaggccgtggtggatcttgggaaaaccagctctactgttaatacaaagttcgagaaagaggagctggaatctcatagagctgtgtatattggcgtccacgtgccgttttcgaaggagtcccggcgaagacatcggcaccgtggccataagcatcaccatcgaagacgcaaggataaagagtctgataaagaggatggtcgtgaaagcccatcctatgatactccctctcaacgcgtgcagttcattctgggaacagaagacgacgacgaggagcacattccacatgatcttttcactgagatggatgaattatgttatagggatggggaagagtacgaatggaaagaaaccgcccgatggttgaaattcgaagaagatgtggaggacggcggtgaccgttggagcaagccctatgtggcaaccctatcactgcactctttgttcgaactgaggtcatgtatcctgaacggtaccgtcatgctggacatgagagcatccactttggacgagattgctgatatggtgctcgacaacatgattgctagtggtcagctagatgaaagtatacgggagaatgtaagggaggctctgctcaaaagacaccatcaccagaatgaaaagcgctttacctcgcgcatccctctggtgagatcattcgccgacattggcaagaagcactccgacccacatctgctcgaaagaaatggcgaaggactctctgccagccgccattccctccggactggtctctcagcatctaatctgagcttgaggggcgaatcccccttatcgctcctccttgggcacttattgccttcctctcgagctgggacccccgctggttcacgttgtaccacacctgtccccacaccacaaaattcgccaccgtcctcaccctcaatcagcagactcacttcccgttcatcacaggaatctcaacggcaggccccagagctactcgtgtcccctgcctccgatgacatcccgaccgtggtgattcacccgccagaggaagatcttgaggccgctctaaaaggcgaagaacagaagaacgaggaaaatgtggacctgacccctggcatcttagcctctcctcagagtgcccctgggaatcttgataatagcaaaagcggagagataaaaggtaacgggtctggtggaagccgggaaaacagcactgtggacttctctaaggttgacatgaacttcatgagaaaaatcccaacgggagctgaggcatcaaatgtgctggtaggcgaagtggattttctggagcgccctataatcgcgttcgtgaggctggcccctgctgtactgttgacagggctgactgaagtccctgtccctacacggttcctttttctactgcttggcccagccggtaaggccccacagtatcacgagattggccgatccatcgctaccctgatgacagacgaaattttccatgacgtggcatataaagcaaaagacaggaacgatctgctgtccggaatcgacgagttcctggatcaagtcacagttctaccccctggggaatgggatccctccataagaattgaaccccctaagagcgttccctcacaggaaaagagaaagataccagtgttccacaatgggagtaccccaactctgggagaaaccccaaaagaagctgcacatcatgccggaccagaactccaaagaacaggtcgcctgtttggcggacttatcctggacatcaagaggaaggcacctttctttctgtccgactttaaagacgccttaagcctacaatgtcttgcatctatcctgttcctctactgcgcttgtatgagccctgtgattacatttggcggactgttgggcgaggccacagaagggagaatctcagctattgagagcctgttcggcgctagtctgacaggtatcgcttatagtttgttcgcaggccagcctctgactattctcggcagtaccggtcccgttctcgtttttgagaaaatcctgtataaattctgtcgggactatcagctatcttacctgtcactccggaccagtattggcttgtggacttccttcctctgtatcgtgctggtcgccactgacgcttcatcactggtctgctacatcacacggttcacggaggaggcctttgcagcactcatttgcatcatctttatctacgaggccctcgagaagctttttgacttgggagaaacgtatgcgtttaatatgcacaacaatctcgacaagctgacttcatatagctgcgtttgtactgagccccctaaccccagcaacgagactctcgcacagtggaaaaaagacaatattactgcccataatattagttggaggaacctaactgtatccgaatgcaaaaagctgcgtggcgtcttcctagggtccgcctgcgggcaccatggtccttacatccctgacgtcctcttttggtgcgtgattctcttcttcaccacattttttttatcctcattcctgaagcagttcaagaccaagagatatttcccaactaaagtacgctctacaatctctgattttgctgtatttctgacaatcgtaataatggtgacaatcgattacctggtaggcgtgcccagccccaaactgcacgtaccagagaaatttgaacccacgcatcccgagcgagggtggatcatttctcctcttggagataatccctggtggacactgttgattgcagccatccctgcccttttgtgcacaattctgatctttatggaccagcagatcacagccgtaatcataaacagaaaggaacataagctgaagaagggggcaggataccacctcgatttgctgatggtaggagtaatgttgggcgtctgcagcgtgatgggcctgccttggtttgtggcagcgaccgtgctgtccatctctcatgttaattccctgaaagtggagagtgaatgcagcgctccgggagaacagccaaagttcttgggcatccgcgaacagcgagtgactggcttgatgatctttatcttgatgggcttgtcagtgtttatgaccagcgtgttgaagtttattccaatgcctgttctgtacggcgtcttcctgtacatgggggtgtcttcccttaagggaatacagctgttcgaccgtataaaattatttggaatgccggctaagcaccagcctgatctgatctaccttcgatatgtgcccctgtggaaagtccatatctttactgtgattcagctcacatgcttggtgctgctgtgggtcattaaagtgtctgcagcagccgtggtatttcctatgatggttctggccctggtctttgtgcgcaaactcatggatctgtgcttcaccaaacgcgagctttcctggcttgacgacctcatgcccgagtcgaagaaaaagaaggaagacgataagaaaaagaaagaaaaagaagaggcggaaagaatgctgcaggatgatgatgatactgtccacctgccattcgagggagggtctctgctccagatccctgtcaaagcactaaagtactcgcctgataaacctgtgtcagtgaagatctcctttgaggacgagccccgaaagaagtacgttgatgccgaaacgagcctttag

SEQ ID NO: 241611 - DNA, 2403 bp, synthetic construct
  misc_feature 1..2403: note = Description of Artificial Sequence: Synthetic coding sequence
  source 1..2403: mol_type = other DNA
atggaagtggtggaagcagagaagatcgtcctgttaaccagcgctaggtttctgttcctgctacttggccctgctggaaaggcacctcagtaccacgaaatcggaaggtctattgctactctgatgacagatgagattttccacgacgtggcttataaggctaaggatagaaacgatttactgtccggcatagacgaattcttagatcaggtaacggttctcccacctggtgagtgggatcctagcattcggatagaaccgccaaagagcgtgccaagccaggagaaaaggaaaatccccgtgtttcataatggatccacccccaccctgggcgaaacacctaaggaggccgctcatcacgccggtcctgaactgcagcggaccgggaggctgtttggtggcctgatcctggatattaagagaaaggcaccctttttcttgtcagacttcaaggatgccctcagccttcaatgcttggctagtatcctattcctgtactgcgcttgtatgagccctgtgatcacgttcggtggactgctcggcgaggctacagaaggcagaataagcgccatagaatcactgtttggggctagcctgactgggatcgcctattctctgtttgcagggcagccacttactattctcggctcaaccggccctgtcttggtcttcgagaaaattttgtacaagttctgccgcgactatcagctcagctatctgtctctgcgcacttccatcggtctatggaccagcttcctgtgtatcgtgctagtggcaaccgacgcctctagccttgtttgctacatcactaggttcactgaagaagcttttgcagccctgatctgtatcatcttcatctacgaggccctcgagaagctgttcgacctgggcgagacatacgcgttcaacatgcacaacaacctggataagctgacttcatactcttgcgtttgcaccgaacctcccaacccctccaatgaaaccttggcccagtggaagaaggacaatatcacggcccacaatatcagttggcgtaacttaaccgtttcggagtgcaaaaaattacgaggcgtgtttttaggctccgcgtgtggccatcatgggccttatattcccgatgtgctcttctggtgcgtgatactcttttttacaacgttttttctgtctagctttcttaaacagtttaaaaccaagcggtatttccctacgaaggtccggagcacaattagcgacttcgctgtctttctgacgattgtgattatggttactatagactatcttgtcggcgtaccgagcccaaaactgcacgtacctgagaagtttgagcctacacacccagagagaggctggattataagccctctgggcgataacccctggtggactctgttgatcgcagccatccccgctctgctgtgcaccatcctaatttttatggaccagcagatcactgctgtgattattaatcgcaaggagcacaagctgaagaagggagccggataccacctggacctgctcatggtaggagttatgctcggggtgtgttccgttatgggcctaccctggttcgtcgcagccactgtactgagcatctctcacgttaacagcctaaaggttgaaagtgaatgtagcgcgccaggagaacagcctaagttcctgggtattagggaacagcgtgtgaccgggctgatgatcttcattctaatggggctgtcggtgttcatgacaagtgttctgaaatttatccccatgcccgttctgtacggtgtattcctgtatatgggagtgtctagcctaaaggggatccagttattcgatcgcattaaactctttggcatgccagctaagcatcaacctgatctgatctatctgagatatgtccctctgtggaaagtgcatattttcacggtgatacagctgacttgcttagtcctactgtgggtgatcaaggtgtcagccgcagcagtggtcttcccaatgatggtgttagctcttgttttcgtgcggaagctcatggacctctgcttcactaaacgtgagttatcttggctggacgacctgatgcccgagagtaagaagaagaaagaagatgataagaaaaagaaggagaaggaagaggctgaacgcatgctgcaagacgacgatgatactgtgcatcttccatttgaagggggatctcttttacagattcccgtcaaggctctcaagtattccgtcgacccaagtatcgtgaacatttccgatgagatggcaaaaaccgcgcagtggaaggcattgtccatgaataccgaaaatgccaaggtgacaagatctaacatgtcccctgataaaccggtgagtgtgaaaatctcattcgaggatgagcccaggaaaaagtacgtcgatgcggagacctcactctag

SEQ ID NO: 241612 - DNA, 1725 bp, synthetic construct
  misc_feature 1..1725: note = Description of Artificial Sequence: Synthetic coding sequence
  source 1..1725: mol_type = other DNA
atggaggctgacggcgcaggagagcagatgaggcccctcttgacaaggggtcctgacgaagaagctgttgtggacctggggaaaactagtagtacggtgaatacgaaattcgaaaaagaggagcttgagagtcacagggcggtgtacattggcgtgcatgtcccattctctaaggagagccgcaggcggcacaggcacagaggacataaacaccaccacagaaggcggaaggacaaggaatctgataaggaggacggccgtgagtctccgagttatgatactccttcccaacgcgtccaatttatcctcgggacagaggatgacgatgaagaacacatcccacacgatttgttcacggaaatggatgagctgtgctatcgtgacggcgaagagtacgagtggaaggagactgcacgatggcttaagtttgaggaggatgtcgaagacggcggtgacaggtggagcaagccctacgtcgcaactctgtcccttcactcgctcttcgaactcaggtcctgcattctcaacggtacggttatgctcgatatgagagcgtctaccctcgatgaaatcgccgacatggtcctcgacaacatgattgccagtggacagttagatgagtcaattagagaaaacgtgcgcgaagccctgctaaagcgccatcaccatcaaaacgagaagcggttcacaagtcgcatccccctagtacgcagttttgccgatatcggagaaggactgagcgcaagcagacactcgctgaggaccggcctgtccgcaagtaacctgtccttaagaggcgagagtccactgtctctgctgctgggtcatcttttgccttctagcagagcaggcaccccagccggtagtaggtgtacgaccccagtccccacaccacagaattccccaccctcttcgcctagcatcagtcgattaacctccagaagctctcaggagtcccagagacaagctccagagctcttggtgagccccgcatccgatgatatccctaccgtggtcatccaccctcccgaagaggatctggaggccgcattaaaaggggaggaacagaagaatgaggagaacgtggacctcacacccggtattctggcatcaccccaaagcgctcccggtaacctggacaatagcaaatccggagagataaagggaaacggctctggcggatccagagagaatagtaccgtggacttctccaaggtggacatgaattttatgcggaaaattcctaccggcgctgaagcatcaaatgtcttagtcggcgaggtggactttctggaacgccctattattgctttcgtacgcttagccccagccgttctcttaacggggctaactgaagtaccagtccccaccagatttctgtttctgctcttgggtccagccggaaaggcaccgcaatatcacgaaattggtagatcaattgcaacactgatgacggatgagatatttcacgacgtggcttataaggctaaagatcgcaatgatctcctttcaggcattgatgaattcttagaccaggtcactgtgctcccgcctggcgaatgggatccaagcatccggatcgagcccccaaaatctgtccccagtcaagaaaagcgtaagatccctgtcttccataatgggtccaccccaaccctgggcgagactcctaaggaggctgcacatcatgctggaccagagcttcagcggacgggcagggtgcagtag

SEQ ID NO: 241613 - DNA, 3273 bp, synthetic construct
  misc_feature 1..3273: note = Description of Artificial Sequence: Synthetic coding sequence
  source 1..3273: mol_type = other DNA
atggagcggttccgtctggaaaaaaaattgcccggtccggatgaggaagccgtggtggacctggggaagacctcatccaccgtgaatacaaagttcgagaaagaagagctggagtcccaccgcgctgtgtacatcggcgttcacgtccctttcagcaaggaaagtcgcagacgacataggcacagagggcacaaacatcatcacaggagacgcaaggacaaagaatcagacaaggaggacggcagggaaagtccaagttacgacactccatctcagcgcgtgcagttcatcctaggcaccgaggatgatgatgaggagcatatcccccacgacttatttactgaaatggatgagctgtgctatcgtgatggagaagagtacgagtggaaggaaactgctaggtggctgaagttcgaggaggatgtagaggatgggggagaccggtggtctaaaccttacgtggctacactttcgctgcacagcctgttcgagctgaggagctgcattctgaatggcactgtcatgctggacatgagagcttcgacgctggatgaaattgcagacatggtcctggacaacatgattgcctctggacagctcgacgagtctattagggagaatgtgagggaggcccttctgaagcgccatcatcaccaaaatgagaagcgctttacctctcgtattcctctcgtgcggagcttcgcggatatcggtaagaagcatagtgacccacaccttctggaacgaaacggtatcctggcatccccccagagcgcccctggtaacctggacaactcaaaatcaggtgaaatcaaaggtaacggaagcgggggatcgagggaaaattctacggtcgatttctcaaaagtggacatgaattttatgaggaaaattccaactggggcagaggcaagtaacgtgctggtgggagaagtggactttctagagagacctatcatcgccttcgtgcgtctggcgccagccgttctgttgacgggtctgacggaggtccctgtaccaacacgcttcctattcttgctgctgggcccagcagggaaggctccccagtatcatgagatcggcagaagtatcgctacgctcatgaccgatgagatttttcacgatgttgcttacaaagccaaagacaggaatgacctgctgtctggaattgacgaattcctggaccaagtgaccgttcttcccccaggtgagtgggacccaagtatcaggatcgagccacctaagtccgtcccctcacaggagaagcggaaaatcccagtgttccacaatggctcaacgccaacactgggagaaacgcccaaggaagcagcccatcacgccggaccagagctacaacggaccggcaggttgtttggcggactgatcctcgacattaagaggaaggcgcctttctttttgtccgattttaaggatgcgctttccctgcagtgcctcgcatcaattctcttcctgtactgcgcttgtatgagtcccgtcattaccttcggaggactcctgggagaggccactgagggtaggatctctgccatcgaaagcctgtttggagcatcactcacgggcatcgcctattcgttgttcgccggtcagccgctgactattctgggcagtaccgggcctgtgctggtgtttgaaaaaattctgtataagttctgcagagactaccagcttagttaccttagtctgcggacgtcgataggactgtggaccagtttcttgtgcatcgtacttgtggccaccgatgctagcagcctggtttgctatattaccagattcaccgaggaggctttcgctgcactcatctgcattatatttatctatgaagctttggaaaagctctttgatctgggggagacttacgcttttaacatgcacaataatctggacaagctgacctcttattcctgcgtgtgcacagaacccccaaaccctagcaatgaaacactagcgcagtggaagaaagacaacatcacggcacacaacatctcctggcggaacttgacggttagcgaatgtaaaaagctacgcggagtgttcctcggctctgcctgcgggcaccacggcccttacattccagatgtgttgttctggtgcgtcattctgttctttaccaccttctttctgtcctctttcctgaagcagttcaagaccaagagatattttccaacaaaagtgcgctcaaccattagcgatttcgccgtgtttctcacaatcgtgatcatggttaccatcgattacctcgtgggcgttcctagtcccaaattgcacgtccccgagaaatttgaacctactcatcccgaaaggggctggattatctcgcctctgggcgataacccttggtggacactgcttatagctgccatcccagcactactgtgtacaattctgatctttatggaccagcagatcactgctgtgattatcaaccgcaaagagcataagttaaaaaagggagctggctaccacctcgacctcttgatggtgggtgtcatgctgggcgtgtgtagtgtgatggggctgccgtggtttgtggcagctactgtcttgtccatatcacacgtcaactccctcaaggtggaatcagagtgtagcgctccaggcgagcagcctaagttcctcgggattagagagcagcgggtgacaggtcttatgattttcatcctgatgggtctctctgtctttatgacttccgtactaaaatttatccccatgcctgtcctctacggtgtgttcctatacatgggcgtaagtagcctgaagggaatccagctgtttgatagaatcaagctcttcggaatgccagctaaacatcagcccgatctgatatatctgcggtatgtgcctctatggaaggtacatattttcacagtgattcagctaacttgcttggtgcttttatgggtgataaaggtgagcgctgcggcagtggttttccccatgatggtgcttgctctcgtgttcgtgcgaaagttgatggatttgtgcttcaccaagcgggagttgtcttggctggatgatctgatgcccgaatcaaaaaagaagaaggaagacgataagaagaagaaggaaaaggaggaggctgagcgcatgttgcaggacgacgatgacactgtgcacctgccatttgaaggtggaagccttctccagatcccagtaaaggcgttgaagtatagcccggataaaccagtgtctgttaagatctcttttgaagacgagcccagaaaaaagtatgttgacgccgaaaccagcctctag

SEQ ID NO: 241614 - DNA, 3408 bp, synthetic construct
  misc_feature 1..3408: note = Description of Artificial Sequence: Synthetic coding sequence
  source 1..3408: mol_type = other DNA
atggaggccgatggggcaggagaacaaatgcgcccactgctcacccgcgtgacctccaggggacccgacgaggaggctgtcgtagacctgggcaaaacatcttctactgtgaacactaaatttgaaaaagaggaactggagagccaccgcgctgtgtatattggggtgcatgtgcccttcagcaaagaatccagacggcgtcaccgtcatcggggacacaaacatcatcatcggcgtcgtaaggataaggaaagtgataaggaggacggaagagagtcccccagctatgacaccccatcgcagcgggtgcagtttattctcgggacagaggatgatgatgaggagcatattccccacgatctttttaccgaaatggacgagctttgctacagagacggcgaagaatacgagtggaaagagaccgccaggtggctgaaattcgaggaagatgtggaggatggaggcgatagatggtccaagccatatgtggccaccctatccttgcactccctgttcgagctgcgctcgtgtatcctcaacgggaccgtcatgttagacatgagagcttccacactggatgagatcgcagacatggtgctggataatatgatcgcctctgggcagctggacgaatcaatccgagaaaatgtcagggaggcgttactaaaaagacaccatcaccagaatgaaaaacgtttcacttcacgcatcccccttgttcggtcatttgctgacattggaaagaagcattccgacccacacctcttggaaaggaatgggatactggccagtcctcagtcagccccaggcaacctggacaactctaaaagcggagaaattaaaggtaacggatctgggggttccagagagaacagcaccgtggatttttccaaggttgatatgaattttatgaggaaaatcccaaccggagcagaggcctccaacgtgctcgttggagaagtggacttcctggaaaggccgatcattgcatttgtgcggctcgcccctgcagtcctgcttaccggcctgacagaagtgccggtgccaacccgattcctctttctcctgctgggtccagccggtaaggcgccacagtatcatgagatcggcaggagcatagcaacccttatgactgatgagatcttccacgacgtagcctacaaggccaaggaccggaacgacttattatctgggattgacgagttcctggatcaagtgacggttctgcctcccggtgaatgggacccttcaatccgtatcgagcccccaaagtctgtacccagccaagaaaagaggaagataccagttttccataacggaagtactccaacacttggcgaaactcccaaggaagctgcgcaccacgccggtcccgaacttcaaaggacaggcaggctgttcggtggtctgatcctggatatcaagagaaaagctccctttttcctgagcgacttcaaggacgcactgtcattgcaatgccttgcaagtatcttgtttctgtactgcgcttgcatgtcaccagtcattacattcggtggccttttgggtgaagccactgaggggcgtatatctgctattgaatccttattcggcgcttcacttacagggatcgcttacagtctttttgcaggccaaccactgaccatcctgggatccactggacctgtcttagttttcgaaaagattttatacaagttctgtagggactaccagctgagctatttgtcattgagaacaagcattgggttgtggacgtcatttctgtgtattgtcctggtcgctaccgacgcaagtagcttagtatgctacattacccgctttacagaggaggcctttgctgcactgatttgtattatttttatttacgaagccctggagaaactgttcgatcttggggagacctatgccttcaacatgcataacaatctggacaagctaactagctatagctgtgtctgcaccgagccccctaatcctagcaatgagactctggcccaatggaagaaggacaacatcactgcgcataatatctcctggcgcaacctcacagtgagcgaatgtaaaaagctccgcggagtctttcttgggtctgcatgcggccaccacggtccctatatcccggacgttttgttctggtgcgtcatcctcttcttcactacattctttcttagttcttttttaaagcagttcaaaactaaacgatatttcccaactaaggtcaggtccaccatatctgacttcgcggtattccttactatagtgatcatggtgacaatcgattacctggtgggcgtccctagccccaaacttcacgttccagaaaagttcgaaccaacgcatccagaacgcggatggatcatttcaccactgggcgacaatccctggtggacactgctcatcgccgctatccctgccctgctgtgcacgattctgattttcatggatcagcagatcacagccgtcatcatcaaccggaaagagcacaagctgaaaaaaggtgctggctaccacttggacctactgatggtgggcgtgatgctgggcgtatgctccgtgatgggactgccatggttcgttgccgctacagtcctctcgatatcacatgtcaattcgttaaaagtcgaaagcgagtgttcagccccaggagaacagccgaagtttttgggtataagagaacagagagtgaccggacttatgattttcatattgatgggactgtctgtgtttatgaccagcgtgctcaaattcatccccatgccagtcctgtacggagtttttctgtatatgggcgtttcaagcttaaagggtatccagctgttcgacagaattaagctttttgggatgccggcaaagcaccagcccgatttgatatatctgcgatatgttcctctatggaaggtgcacatttttacagttattcagttgacttgcttagtgcttctgtgggtgataaaggttagcgcagccgctgttgtgttcccaatgatggtactcgcgctcgtgtttgtgcgcaagctgatggacttatgttttacaaagcgggagctgagctggctggacgatctgatgcccgaatctaagaaaaagaaggaggacgataaaaagaagaaggagaaggaggaagccgaaaggatgctgcaggatgatgatgatacggtgcaccttccctttgaaggtggcagtctcttacaaataccggtgaaggcactgaaatactcagtcgacccatccatcgtgaatatctcagacgaaatggccaagacggcccagtggaaagctttatccatgaataccgaaaacgcaaaagttacccgctctaacatgagtcccgataagccagtgagcgtgaaaatcagcttcgaagatgaacctcggaaaaagtatgtggacgcggagacaagtctgtag

SEQ ID NO: 241615 - DNA, 3288 bp, synthetic construct
  misc_feature 1..3288: note = Description of Artificial Sequence: Synthetic coding sequence
  source 1..3288: mol_type = other DNA
atggaggccgatggcgcaggggagcagatgagaccacttctgaccaggggcccagacgaggaggccgtcgtcgatttgggaaaaacctcgagcactgtgaacacaaagtttgagaaagaggaacttgagagccatcgcgctgtgtatatcggagttcatgtccccttttcaaaagagtcgcggaggcggcacaggcacaggggccataagcaccaccacaggagacgaaaagacaaagagtctgataaggaggacgggagagagtctccttcctacgacaccccaagtcagcgagtgcagttcattctggggacagaagacgacgacgaagagcatatcccacatgacctattcacagagatggatgagctttgttacagagacggcgaagaatacgagtggaaggagacagccaggtggcttaagtttgaggaggacgtggaggatggcggtgatcggtggagtaaaccttatgtggctactctgtcactgcactccctgttcgagctgaggagttgcatcttaaatggaaccgtgatgctggatatgcgcgcttctacactggacgaaatagctgacatggtgctcgataatatgatcgcctccggtcagctggacgagtctatcagggagaatgttagagaggcccttctcaagcgccaccatcatcagaatgagaagaggtttacaagtcgcatcccactagttagaagttttgcagatatcgggaaaaaacattccgatccacacttattggaacggaacggaattctcgcatcaccgcagtccgcacccggaaacttggacaattccaagagcggggaaatcaagggcaacgggagcggcggttccagggagaatagtacagtcgatttctcgaaagttgatatgaatttcatgcggaaaattccaacaggcgctgaggcttccaatgtgctggtgggcgaggtcgattttctggagagaccaatcattgcctttgtgcgtctggctcctgctgttctgctcaccgggctgaccgaagtcccagttcctacgcgtttcctcttcctgctcctgggccctgctgggaaggcaccccagtatcacgagattggcagaagcattgccactttaatgactgatgaaattttccacgacgtggcatacaaagccaaagaccgcaatgatctgctctccggcattgacgagtttcttgaccaggtgacagtcctgcccccaggggagtgggaccctagcattaggatcgagccccctaagagtgtgccgtcccaagaaaaacgaaaaatcccggtattccataacggctctacaccgaccttgggagagacacctaaagaagctgcccaccacgccggacctgaactgcaacgcaccgggagattgttcgggggtttgattcttgacatcaagcgcaaagcgccatttttcttatccgacttcaaagatgccctgtcactgcaatgcctggccagcatattgttcttgtactgtgcctgtatgtctcccgtgatcacattcggtggccttcttggcgaggctaccgagggtcggatatccgctattgagagcctgttcggcgcatccctgactggaatcgcgtactctctctttgccggacagccacttacaatcttggggtccactggacctgtgttagtttttgagaagattctttataaattctgccgggactaccagctgagctatttgagtttacggacttccattgggctttggacttccttcttgtgcatcgtgctcgtagcaacggatgcctcttccctcgtctgctacatcacaaggttcaccgaggaagcatttgccgcactgatttgcatcatcttcatctacgaagccctggaaaaactcttcgatctgggcgagacatacgcgttcaacatgcacaataatctcgacaaactcactagctacagctgcgtgtgcaccgaacctcctaatcctagtaatgaaaccctcgcccaatggaagaaggacaatatcacggcccacaatatctcatggcgcaatctgaccgtctctgaatgtaagaaactgagaggggtgtttctgggctcagcatgtggacatcacgggccttatatccctgatgtcctcttctggtgcgtgatactgttttttactacttttttcttgtcatcattcctcaagcagttcaagaccaagcgatattttcccaccaaggttcggagcacaattagcgattttgcagtgttcctgacaattgtaatcatggtgaccatagactacctggtcggtgtcccctcccctaagctccacgtaccagaaaaatttgagcccacccatcccgagcgtggctggattatctcccccttgggagataatccttggtggacactcctgatcgccgcaattcccgcattactgtgcacaatcctgattttcatggatcagcagatcactgccgtcatcattaaccgaaaggagcacaagctgaaaaagggagctgggtaccacctagacctccttatggtgggcgtgatgctgggggtttgtagcgtaatgggccttccttggttcgtggcagccactgtacttagcatctctcatgttaactccctgaaggtcgagtccgagtgtagcgccccaggggagcaacctaaatttctgggcatacgggaacaacgagtcaccggcctcatgatcttcattctcatgggcttatccgtctttatgacatctgtgctgaagtttatccctatgcccgtgctgtatggtgtcttcctctacatgggcgtgtcatctctgaagggcatccaactattcgacagaattaagctctttggtatgccggctaaacaccagcccgacttgatctatcttcgatatgtgccactttggaaggtccatattttcaccgtgattcagcttacctgcctggttctgctttgggttattaaagtcagcgccgcagcagtcgttttcccaatgatggtcttggcgctggtattcgtccggaaactgatggacctgtgctttacgaaacgtgagctttcatggctcgacgatctcatgccggagtcaaaaaagaagaaggaagatgacaagaaaaagaaggagaaagaagaagcggaacgtatgttgcaggacgacgatgacacagtccatttaccatttgaaggtggatctttgttgcaaattccagtaaaggctctcaagtacagtccggacaaacccgtgagtgttaagattagttttgaggatgaaccaagaaagaagtacgtagacgctgaaacctcactttag

SEQ ID NO: 241616 - DNA, 1392 bp, synthetic construct
  misc_feature 1..1392: note = Description of Artificial Sequence: Synthetic coding sequence
  source 1..1392: mol_type = other DNA
atggaggcagatggggcaggcgagcagatgcggcctttactgacgcgcggaccggatgaggaggcagtggtcgacctgggcaaaaccagttcaactgtgaacaccaagtttgaaaaagaggagctggaaagtcaccgtgccgtgtacatcggtgttcatgtgccttttagtaaagagagtcgcaggcgccaccggcatagaggacataagcaccaccacagaaggaggaaagacaaggagtctgataaggaggacggacgagaaagcccttcctacgacaccccttcacagcgagttcaatttattctcggaaccgaagatgacgacgaggagcacattcctcacgacttgttcaccgagatggacgagctgtgctacagagacggcgaagaatacgagtggaaggagactgccaggtggctcaaattcgaggaggacgtcgaggatggtggagacaggtggagtaaaccatatgtggcgacactcagcctacactcactctttgagctccgctcttgcatcctcaacggcaccgtaatgttggacatgagggcatcaaccctggacgaaatcgctgatatggtgcttgacaatatgattgcctctggtcagctggatgagtcaatccgcgagaacgttagggaagctctgctgaagcgccaccatcaccagaacgaaaagaggttcacttcacggattcctcttgtccggtccttcgccgacataggcaagaagcattcagatccccacctgcttgaacgcaatggcatcctcgcttccccgcagtccgcaccaggaaatctggacaactcaaagtccggggagatcaaaggaaacggatccggtggatctagagagaactccactgtagacttttctaaggtggatatgaatttcatgcgaaagattcccacaggcgctgaggcctccaatgtgcttgtgggagaggtggatttcctggagaggcccataatagcatttgtgagacttgccccagcagtgctcctgacagggttgaccgaggtccctgtgcctacccgtttccttttcctgctgctgggccctgctggcaaggcccctcaataccacgagataggtaggtcaattgcgacactcatgacagatgagatctttcacgatgttgcctacaaggctaaagataggaatgacctgctttcagggatcgacgaatttttggatcaagtcacggtcctcccccctggcgagtgggaccccagcatccggatcgaaccgcctaagagcgttccttcacaggagaaaaggaaaatacctgtttttcacaacggttctacaccaaccctgggcgaaaccccgaaagaggccgcacaccacgctgggcctgaattgcagcgcacaggtcgggtgcagtag

SEQ ID NO: 241617 - DNA, 1725 bp, synthetic construct
  misc_feature 1..1725: note = Description of Artificial Sequence: Synthetic coding sequence
  source 1..1725: mol_type = other DNA
atggaagctgacggagcaggtgagcagatgcgcccactactcacaagaggtccagacgaagaagctgtagtagatctggggaaaacctcatctacagtgaatactaagtttgagaaggaagagctcgagtcgcacagagccgtatatataggggtacacgtaccattctctaaggagtcgcggcgacgtcatagacacagggggcataaacatcatcaccggaggcgcaaagacaaggaatccgataaagaagacgggagggagtctccatcgtacgacactccatctcagagggttcagttcatcctgggaaccgaggacgacgacgaagaacatattccccatgatctctttacggaaatggatgagctctgctatagggatggagaagaatatgagtggaaggagacagccagatggctcaagtttgaagaagacgtggaggacggtggcgatcggtggagcaagccttatgttgccaccctcagcctgcactcattgttcgagttacggagctgtattttgaacggtactgtgatgcttgacatgagagcctcaactctggacgagatagctgatatggtgcttgataacatgatcgcttccggccaactagatgagtccattcgagaaaatgtgagagaagcacttctgaaacgacatcatcaccaaaacgaaaagcgatttactagtagaattccactcgtccgctcgtttgccgacataggtgagggcctctcagctagtagacacagtctgcgtactggcctctccgcttccaacctctcactgcgcggagagtcccctctgtccttactgctcggccacctactgccaagctctagggcaggcactcctgcaggttcccgatgcacaacccctgttcccacgcctcaaaattctcctccttcctcgccctcaattagtaggttaacaagccgatcttcccaggaaagccagaggcaggccccagagctgctggtgtcccccgcaagcgatgacattccgaccgtggtgatccacccccctgaggaggacctggaagctgcccttaagggcgaagagcagaagaacgaagaaaatgtggacctgacacccggtatactggcatcaccacagtctgctcccggaaatcttgataactcaaagtccggagaaatcaagggcaatggctccgggggaagcagagagaattccactgtcgacttcagcaaagtcgacatgaattttatgagaaagatccctacgggggcagaggcgagcaatgttcttgtgggcgaagtggactttctggaacggcctattatagctttcgttcggctggcaccggcagtgttgttgactggactgaccgaggtaccagtcccgaccaggttcctcttcttacttctgggtccagctggcaaggcacctcagtatcatgaaatcggcaggtctatcgccaccttaatgaccgacgaaatctttcatgacgttgcctacaaagctaaagatcgaaatgacctcctatccggaatcgacgagttccttgatcaggtgaccgtgctaccacccggagagtgggacccctccattaggatcgagcccccaaaatccgttcccagtcaagagaaacggaagattcccgtgttccacaatggttctactcctacactgggcgagacccccaaggaggcggctcaccatgccggtcccgagctccagaggacagggagggtgcaatag

SEQ ID NO: 241618 - DNA, 3741 bp, synthetic construct
  misc_feature 1..3741: note = Description of Artificial Sequence: Synthetic coding sequence
  source 1..3741: mol_type = other DNA
atggaggcggatggtgctggtgagcagatgcgccctctactcacccgagtcaccagcagaggcccagacgaggaagcagttgtggaccttggaaaaacatcaagcacagtcaacacaaaatttgaaaaggaagaactcgaatctcatcgtgccgtctacattggagtccacgtccccttctctaaagagtctaggagaagacatcgccatcgcggacataaacaccatcacaggcgcagaaaagataaggagagcgataaggaagacgggcgtgaatctccatcatacgatacccctagccagagagtgcagttcatccttggaacagaagatgatgatgaagagcacattccacatgacctgttcaccgagatggatgaactgtgttacagggatggagaagagtatgagtggaaggaaacagcacgatggctcaaatttgaggaggacgttgaggacggaggagaccgctggtccaagccctatgtggcaacactgtcccttcacagtctctttgagttgagaagctgcatcctgaatggcaccgtcatgctggatatgagagcctcaactcttgacgagatcgcagacatggtgctggacaacatgatagcaagcggacaactagacgaatctatacgggaaaacgttcgcgaggcattactgaaaaggcatcaccaccagaatgagaagagatttaccagtaggattccccttgtgcgaagttttgctgacattggagaggggctgtctgcttcccggcatagcctccggaccggactttctgcatcaaatcttagcctcaggggggagtccccattaagtttgctgctcgggcacctgctgccttcttcccgagccggtacgcccgcaggcagtagatgtacaactcctgtgcctactccacagaacagcccgccttctagcccatcaatcagtcggctgactagcaggagctcccaggaatctcaacggcaggcccctgaactcctggtgagtccagcaagtgacgacatccccactgtggttatccacccaccagaagaggatctcgaggcagcactgaaaggagaagagcagaagaatgaggaaaacgtcgacctcactccgggtattctggcctccccccagagcgcacctggtaatctggataactccaaatccggtgagattaaaggtaatggctccggcggatctcgcgaaaactcaactgtcgacttttcaaaggtcgatatgaatttcatgcgtaaaattccaaccggagctgaggcgtccaacgtacttgtgggtgaagtggatttcctcgagagaccgattatagcctttgtgagactggcacccgcagttttgctgaccgggctgaccgaagtcccagtacccacgcggtttttgttcctacttcttggacctgccggaaaggcaccccagtatcacgagataggtcgttccatcgcgaccctcatgacagacgagatttttcacgacgtggcatacaaggcaaaagatcgtaacgacttattgtccgggattgatgaattcctggatcaggttacggtgctgccacccggagaatgggacccgagcatcaggatagagccacccaagtccgtgccatcccaggagaaaaggaagattcccgttttccacaacggcagcacccccaccttgggggagactcccaaagaagccgctcaccatgcgggtcccgaattgcagcgcaccggcaggctcttcggcggtttgatcttggacattaagagaaaagctccattcttccttagtgacttcaaggacgctctgagcctgcagtgtctcgcatctatcctgttcctctattgcgcctgtatgtctccagtgattacttttggcggtctccttggggaggcaactgaaggtagaatctcagcaattgaaagtttgtttggggcttccctcaccggcatcgcatattctctcttcgcaggtcagccactcacgattctcggatctactggcccagtcctcgtgttcgagaagatcctctataagttctgtcgcgactaccagttaagctatttgagtctgagaacctccattggactctggaccagttttctgtgcatcgtgcttgtggccacggacgcctcttctttagtgtgttatatcacaagattcacagaggaggcatttgctgcactcatctgcataatcttcatctatgaagctcttgagaaactttttgacctgggggagacctatgctttcaacatgcacaacaacctagacaagctgacatcatatagttgtgtgtgcactgagccccctaatccctccaatgagactctcgctcagtggaagaaagacaatatcactgcgcataacatctcgtggaggaatctcaccgtgtcagagtgcaagaaattgcggggagtcttcttgggatccgcatgtgggcaccacggaccttacatccctgatgttcttttctggtgtgtcatcctttttttcactactttcttcctgtcatcctttctcaaacagttcaagacaaagcggtattttcccaccaaagtgaggagcaccataagtgacttcgcggtcttccttaccatcgtgattatggtcaccattgattacctcgtgggcgtgccatcaccgaaattgcacgtgcccgagaaattcgagcctacacaccccgagcgcggttggattataagtcctctcggggacaatccctggtggacactgcttattgcagccatccccgctctattgtgcaccatccttatctttatggaccagcagataacagctgtcataattaataggaaagaacataagctcaagaagggagccggatatcatcttgacctactgatggtgggggttatgctgggggtgtgcagtgtcatgggattaccttggtttgtggccgcaaccgtgttaagcataagtcatgtcaacagcctcaaggtggaatctgaatgttccgcccctggcgagcaacccaagttcctcggcatccgagagcagagggtaaccggcttaatgatattcatcctgatgggactttcagtgtttatgacatctgtgctgaagtttattccaatgccagtcctgtacggggtctttttgtacatgggggtcagtagtctgaaaggaattcagcttttcgaccgaatcaaactattcggaatgcctgccaagcatcagcctgatctcatctatttaagatacgtgccactgtggaaagtccatatcttcacagtgatccagctgacttgcttggtgctgctgtgggttatcaaggtgtctgcagcggctgtggtatttcccatgatggtgcttgcgctcgttttcgtacgcaagctgatggatctgtgctttaccaagcgcgaactttcttggctggatgacctgatgcctgaaagcaagaaaaagaaggaagatgacaaaaaaaaaaaggaaaaggaggaggccgagcgaatgctgcaggatgacgacgatactgtccacctgcccttcgaggggggaagtctattgcagatcccagtcaaggcactgaagtatagcgttgacccatcgatcgtaaatataagtgacgagatggccaagacagctcaatggaaggccctatccatgaacacagaaaatgcaaaggtgactcggtccaacatgtctcccgataaacctgtgtcagtgaaaatttcctttgaagatgaaccgcgaaaaaagtatgtggatgccgagactagtctgtag

SEQ ID NO: 241619 - DNA, 3780 bp, synthetic construct
  misc_feature 1..3780: note = Description of Artificial Sequence: Synthetic coding sequence
  source 1..3780: mol_type = other DNA
atggaagctgacggcgctggcgaacagatgcgcccattgttgactcgggtgactagtcgcggacccgacgaggaagccgtagtggatcttggtaagaccagctctacggtgaacacaaaatttgaaaaagaggaactggagagccatcgcgcagtatacataggggtgcacgttcctttttccaaggagtcgagacgcagacatagacaccgaggacataaacaccatcatcgacgtagaaaggataaggaatccgataaagaggacggcagagaatcgccttcctatgatactccatcccagagggtgcaattcatcctaggaacagaggacgatgatgaggaacacatcccacacgatctgttcaccgaaatggatgaactttgctaccgcgacggagaggaatatgaatggaaagagacagcacgctggcttaagttcgaagaagatgtggaggatggtggtgaccggtggagcaagccttacgtagccactctgtctctccattcattgttcgaactgagaagctgcatcctcaacggaacagtcatgctcgatatgcgtgcatccactctggacgaaatcgctgacatggtgctagacaatatgatcgcctctgggcaactggatgagagcatccgggagaacgttcgtgaagccctgctgaagcgccaccatcatcagaacgagaagaggtttacgtcgagaatcccactggtcaggagttttgccgacattggcaagaagcacagcgatccgcacttgctggaaagaaacggggaggggctgtccgcatcacggcacagtcttcgcacgggcctctctgctagtaacctcagcttgcgcggagaaagccctctctctttacttctgggccacctgctgccatctagtagagctggaactccagccggatcccgctgtacgaccccagttccgaccccacagaactcaccgccaagtagtcccagtatctccagactgacctctcggagctctcaggaatcacagcgccaggcgcctgagttactagtgtcccctgctagcgacgacatccctactgtggtgatccatccgccagaggaagacttggaggccgcactcaaaggagaggaacagaagaatgaggagaatgtcgacctgacccctggcattctcgcatccccgcagtctgcccctggaaaccttgataactccaaatcaggcgagatcaagggaaacggttccggcggtagccgggaaaactctacagtagacttctccaaagtggacatgaactttatgcggaagatccctactggagccgaggcctccaacgttctggtgggcgaggttgacttcctggaacgccctattatcgcttttgttcggctggctcccgctgtcttactgaccggccttaccgaggtgccggtgccgaccagattcttgtttctgctcctggggccagctgggaaggcaccccagtaccatgaaataggcaggagtatcgcaacactcatgactgatgaaatttttcacgatgtggcctacaaggccaaggatcggaacgacctgctttccggtatagacgagttccttgatcaggtgacggtcttaccccctggtgaatgggacccttccattcggatcgaaccgccaaagtcggtgccatcacaggaaaagcggaaaattcccgtgttccataatgggagtacccctacgttgggcgagacccccaaggaggccgcacaccacgcgggtcccgagctccagcgaacggggagattatttggcggtcttatccttgacattaagaggaaggccccattctttctatccgatttcaaagacgctctctcacttcaatgtctggcatctatcctgttcctttactgcgcttgtatgagtcccgtgattacctttggtggactgttgggtgaagccactgaggggagaatttctgcaattgaatccctgtttggcgctagcttgacgggaatcgcctacagtttattcgctggtcagcctctgacaatcctgggtagtacgggtcctgtgttggtatttgaaaagatcctctacaagttttgccgggactaccagctgtcgtatttatccctgcggacgtcaatcggactttggactagcttcctgtgtattgtgttagtcgcaacagacgctagtagcctggtctgctacatcactcgattcaccgaagaggcatttgcagccttgatatgcataattttcatttacgaagccctggaaaagcttttcgatctgggtgagacttacgcattcaacatgcacaataatttggataagctgacatcctactcttgtgtctgtaccgaaccccctaacccttccaacgagacacttgcccagtggaaaaaggataacatcacagcccacaacattagctggcggaatctcacagtgagcgagtgcaagaaactgagaggggtgttcctgggctctgcctgtggtcaccatggcccttacatccctgacgtgcttttctggtgcgtcatcttgttctttacaacattcttcctgtcttccttcctcaaacaatttaagacaaaacgctattttcccaccaaagttcggagcacaatttctgactttgccgtttttctgactatagtgataatggtgacaatcgattatctcgtgggcgtgccctcaccgaaactgcatgtgcctgaaaagtttgagccgacccacccagagagaggttggattatctctccactgggggacaatccatggtggacccttcttatagctgccatccccgcactgctgtgcacaatcctgatcttcatggaccagcagatcactgctgtcatcataaaccgaaaggagcacaaactcaaaaaaggagcgggttaccatttagatctcttaatggtaggggtcatgttgggagtgtgttccgtcatgggcctaccttggttcgtagccgctacagtcctgagcatttcccatgtgaacagtttaaaagtggaatcagagtgctcggcccctggcgagcaacctaagttcctcggcatacgcgagcagagagttaccggcctgatgatcttcattctcatgggactttccgtgtttatgacatctgtcctgaaattcatccccatgccagtcctgtacggtgtgttcctttacatgggggtgtcatctcttaagggaattcagctgttcgatcggatcaagctgttcggcatgccggcaaagcatcagcctgatctcatttatttaaggtacgtacctctgtggaaagtgcacattttcacagtaattcagcttacatgcctggtccttctttgggttattaaggtgagcgctgccgcagtggtatttcctatgatggtgctagccctggtgtttgtaaggaaacttatggacctgtgttttacaaagcgcgagcttagttggttggacgatctcatgcctgagtctaagaagaagaaggaggacgataaaaaaaagaaggagaaggaagaggccgagcggatgttgcaggacgatgacgatacagtgcacttacccttcgaaggtggcagcctattacagattccggtgaaggccctgaagtactcagttgacccgtctatcgtgaatattagcgatgaaatggcgaagactgcccaatggaaggcccttagcatgaatactgagaatgctaaagttactaggtcaaacatgagtcccgataagcccgtttccgttaagatttctttcgaggatgagccaaggaaaaaatatgttgatgccgaaacctcactgtag

SEQ ID NO: 241620 - DNA, 3396 bp, synthetic construct
  misc_feature 1..3396: note = Description of Artificial Sequence: Synthetic coding sequence
  source 1..3396: mol_type = other DNA
atggaggctgacggagcgggtgaacagatgcggccacttctgacaagggggccagatgaagaggcagttgtggacctcggtaaaacctccagtaccgtgaataccaaattcgagaaggaggagctcgaaagtcatcgcgctgtgtatatcggggtgcacgtccctttcagcaaggaaagcagacgccgacatcgtcaccggggtcacaagcatcaccacaggagacgtaaggataaagagtctgacaaggaggatggccgagagtccccaagctacgacaccccttcccagagagtgcagttcatcttaggcacagaagacgacgatgaggagcatattccccacgacttgtttactgaaatggatgaattgtgttatcgggatggggaggaatatgaatggaaggaaacagctcggtggctgaaatttgaagaggacgtagaggacggaggagataggtggtcaaagccttacgtggccaccctaagtctccatagcctgttcgagctgcgatcctgtatcctgaacggtaccgtaatgctggatatgcgagcttctacgcttgacgaaattgcagacatggtgctagacaacatgatcgccagtgggcagttggatgaatccatcagagaaaacgtaagggaagctctcctgaaaaggcatcaccatcaaaacgaaaaacgattcaccagcaggatccctctggtacgtagcttcgctgatatcgggaaaaagcatagtgatccccacctactggaacggaatggtatactcgcatcccctcagagtgcccctgggaacctggataactccaagtcaggagagataaagggcaacggatccgggggatcccgggaaaactccaccgtggatttttctaaggttgacatgaatttcatgagaaaaattcctaccggggctgaggcctcaaacgtgctagtaggcgaggtagatttcctggagcgtcccatcatagcctttgtacggctggctcctgctgtgcttctgacaggactgaccgaagtcccagtgcctaccagatttctgtttctgcttctgggcccagccggaaaggcccctcagtatcacgagatcggcagatcaatagcaacactgatgacagatgaaatttttcatgatgtggcttacaaagcaaaggacaggaacgatctcctgagtgggatcgacgaatttcttgaccaggtgacagtgctgcctccgggagagtgggacccaagcatccgcatcgaacctcccaaatctgtaccttctcaagaaaaaagaaagatacccgtgttccacaatggctcaacacctactttgggcgaaacccccaaagaagccgcacaccacgcaggacccgagctacagcgaaccggcagactgttcggaggcttgattttagatattaaaaggaaggcacccttctttctgtctgattttaaagatgccctaagcctacaatgcctcgcttctatcctttttctgtactgcgcctgtatgtcccctgttatcacgtttgggggtctgttgggtgaggcaacagagggcaggataagtgctatcgagtctctgttcggcgcatcactgacgggcatagcttacagcctgtttgccggtcagcctctgacgattctgggaagtaccggacccgtgctagtcttcgaaaagatcctttataagttttgtagagattaccagctgtcatacctgtctttgcgtacatcaatcgggttgtggaccagctttctgtgcatagtcctcgtcgcaaccgatgcttcttcccttgtatgttatattacacgcttcacagaggaagcttttgccgcacttatatgcatcatctttatatacgaggccttggaaaagttgttcgacctgggtgaaacctacgcatttaacatgcataataacctggacaagctcacctcctattcctgcgtctgtacagaacctccaaatccctctaatgagaccctcgcacagtggaagaaagataatatcacagctcacaatatatcctggaggaatctgacagtgagcgaatgcaagaaattgcggggagttttcttaggttctgcctgcggtcaccacggtccgtacattccagatgtgttattctggtgtgtcatcctattttttactacctttttcttgagctccttcctcaaacagtttaaaacaaaacgatattttccgacgaaggtgcgcagcacaattagcgatttcgccgtgttcctgactattgttatcatggtcacaattgactatctcgttggtgtgcctagtcccaaactgcacgtgcccgaaaaattcgaaccgacacacccggaacggggatggatcatttcgcctctgggggataacccgtggtggacactgctcattgccgctattcctgccctactgtgtactattctgatctttatggaccaacagattacggcagtgattatcaacaggaaggagcataagttaaaaaaaggagccggataccacttggatctgttgatggttggagtgatgttaggtgtgtgctctgtgatgggactgccctggtttgttgccgcaactgtgctgtctattagtcatgtgaattccctcaaggtggagtctgaatgcagcgcacctggcgaacagccaaaatttctgggcattcgggaacagagggttaccgggcttatgatatttatccttatgggtctgtctgtgttcatgaccagcgtgctcaagttcattcctatgcccgtactgtatggagtgttcttatatatgggggtgtcaagcttgaaggggattcagctcttcgaccggatcaaactcttcggtatgcccgcaaagcatcagcctgatctgatatacctccgttatgtgccactgtggaaagtacatatttttacagtcattcagctgacgtgcctggtgctgctgtgggtcattaaggtctctgcagcagcggtggtgttcccaatgatggtcttagcgctggttttcgtgaggaagctgatggatctctgttttactaaaagggaactcagctggcttgatgacctgatgcccgagagcaaaaagaagaaggaagacgataagaaaaagaaggaaaaagaagaagctgaacgaatgcttcaggatgacgatgacaccgtccatttaccttttgagggtggttctcttcttcagattccagtgaaggctcttaaatattccgttgatccctccattgtgaacatatctgacgagatggcgaaaactgctcagtggaaggctcttagtatgaacactgaaaacgcaaaggtaactcggtccaatatgagtccggataaacctgtgtcggtcaagatttcatttgaagatgagcccagaaagaaatacgtggatgccgaaacttcactgtag

SEQ ID NO: 241621 - DNA, 1392 bp, synthetic construct
  misc_feature 1..1392: note = Description of Artificial Sequence: Synthetic coding sequence
  source 1..1392: mol_type = other DNA
atggaagccgatggcgcaggagagcagatgaggcctctcttgactcgcggtcccgacgaagaggctgtggtcgatctgggaaaaacatctagcactgtcaatacgaagttcgaaaaagaggagctggagtcccatagggccgtgtacatcggcgtgcacgtgccctttagtaaagagtctcggagaagacatagacacaggggacataagcaccaccacagacgtagaaaagacaaagaaagcgataaggaagatggcagggaatccccttcctacgataccccctcgcagcgcgtgcagttcattctggggaccgaggatgacgatgaagagcatatccctcatgatctattcacagaaatggatgaactttgttaccgcgacggagaagaatatgagtggaaagagacagctagatggcttaaatttgaagaggatgtggaagatggtggcgatcggtggtctaagccttacgtggcgacactcagcctccatagcctgtttgagttaaggtcatgtatactgaacggtaccgtcatgctggacatgcgagccagcacacttgatgaaatcgctgatatggtcctcgacaatatgattgctagcggccagctcgatgaaagcatccgggagaatgtacgggaagccctcctcaagcgccaccaccaccagaacgagaagcggttcacgagccgaatcccacttgtaaggtcttttgccgacatagggaaaaaacacagcgacccccatttattggaacgaaacggcatcttggccagtccacagtccgctcccggaaacctggacaactctaaatccggggagataaaagggaacgggagcggcggatcacgggagaacagcacagtggacttctcaaaggtggatatgaatttcatgcggaaaataccaaccggggctgaagctagcaatgttctggttggcgaagttgatttcctggaaagaccaatcatcgcattcgtccgactggcccctgccgtgctcttaaccggcttgactgaggtgcctgtacctacgcggttcctgttcctgcttctcgggcctgccggaaaagctcctcaataccacgagattggtcggtccatcgctactctcatgactgacgaaatctttcatgatgtggcctataaagccaaggataggaacgacctgcttagtggaatcgatgaatttctggatcaagttactgttctccccccaggtgagtgggatccttcaattcgtatcgaaccaccgaagtctgtgcccagccaggagaaaagaaaaattcctgtgtttcataacgggtccacgcctactttgggtgaaaccccgaaggaagccgctcaccatgcgggtcccgagctacagagaacgggacgtgtgcaatag

SEQ ID NO: 241622 - DNA, 3135 bp, synthetic construct
  misc_feature 1..3135: note = Description of Artificial Sequence: Synthetic coding sequence
  source 1..3135: mol_type = other DNA
atgccagccgctgggagcaatgagccagacggagtactgagctatcaaagacctgatgaagaggctgtcgtggatcaaggaggaacatcaaccatcctgaacatccactatgagaaggaggagttagagggacatagaaccctgtacgtcggcgtgaggatgccactggggagacagtcacatcgacaccacaggactcatggccagaagcacagacggagaggccgaggcaagggcgcttcacaaggcgaagaaggactagaggctctagcccatgatacgccatcgcagagagtgcagtttattctgggcacggaagaagacgaggaacacgtgccccacgaactgtttaccgagttagatgagatatgcatgaaagagggcgaggatgcagagtggaaagaaactgcaagatggctgaaattcgaagaggatgtggaggacgggggtgagaggtggagcaaaccttatgtggctaccttatcgctgcactcactgttcgagctgcgctcttgtttgataaacggcaccgtcctgctggacatgcatgctaacagcatcgaagagatttcagacctgatcctggaccagcaggagctgagttccgacctgaatgatagtatgcgggtgaaggtgagagaggcgttgttgaagaagcaccatcaccagaacgaaaagaagagaaataacctcattcccattgtgcggtctttcgctgaagtaggaaagaagcagtccgatcctcatcttatggacaagcatgggcaaaccgtgtcacctcagtcagtgcccactactaatttagaggtcaaaaacggggttaattgtgagcactcgccagtggacttgtccaaggtggacctgcactttatgaaaaaaatacctaccggggcagaggccagcaacgtcctagtgggagaggtggatattttggaccgcccaatcgtcgcgtttgtgagattatcccctgcggtcctcctgtcaggtctgactgaggtgccaatcccaacccgcttcctcttcattctgctaggccctgtgggaaagggccagcagtatcacgaaattggcagatccatggcaaccattatgacagatgaaatatttcacgacgttgcctataaggcaaaagaacgcgacgacctactggccggtattgatgaattcttagatcaggtcacagtgcttccaccgggtgaatgggatccctccatcaggattgaaccacctaaaaacgtccccagccaagaaaagcggaagatgcccggagtgcctaacggaaatgtttgtcacatcgagcaggagcctcatggaggtcactctggaccagagctccagcggaccggcaggctgtttggcggtttggtgttagatatcaagagaaaagctccttggtactggtcagactatcgtgacgccctgagcctccagtgtctcgcttccttcctatttctatactgtgcatgcatgagcccggtgatcactttcggcggactcctgggagaggcaacagaaggcagaatctctgccattgaatccctgttcggagcttctatgacaggaattgcttattctctgttcgccggacaggctctcaccatattaggcagcactggacccgttctcgtgttcgagaaaatcttgttcaaattctgtaaagactacgcccttagctacctgagcctgcgcgcatgtattgggctgtggacggcttttctgtgcattgtgcttgtggctaccgatgcttcttcccttgtgtgctatatcactagattcactgaagaggccttcgcaagtttgatctgtatcatcttcatttacgaagcaattgaaaaactgatccaccttgccgagacatatccaatacatatgcacagccagctggatcacctctccctgtattattgccgatgcactctccccgaaaatcctaataaccatacacttcaatattggaaggatcataacatcgtgacagccgaagttcactgggcaaacctgaccgttagtgaatgccaagagatgcacggcgaattcatggggagcgcgtgtggacatcatggcccatatacaccagacgtgctcttttggagttgtatactgttctttacgacctttatcctcagctccactttgaaaactttcaagacaagcagatacttcccaactcgagtgcggtccatggtctccgattttgctgtattcctgaccatctttacaatggtgatcatcgatttcctgatcggcgtcccctcaccgaagcttcaggtgccctcagttttcaaacccacccgggatgataggggatggatcatcaacccgatcggccctaatccttggtggacggttatagccgcaataatccccgctctgctgtgcaccatattgatcttcatggatcagcaaattaccgcagtgatcataaaccgcaaggagcacaagctgaagaaaggatgtggctatcacctagacctcttgatggtggccattatgttgggggtgtgcagtattatgggtctgccttggtttgtagccgcaacggtgctgtccattacacatgtcaattctctcaaactggaatctgagtgttccgctcccggagagcaacccaaatttcttggcattcgggagcagcgcgttacgggcttgatgatttttgtgctcatgggctgctctgtgtttatgacagctatcttaaagttcatacccatgccagttctctatggtgtatttttgtacatgggagtgagcagcctgcagggtattcagttttttgacagactgaaactctttggtatgcccgcaaagcaccagcccgacttcatctatcttcggcacgtgcccctcagaaaagtgcacctgttcaccctcatacaactgacctgtctggtcctgctgtgggtaatcaaagcctcgcctgcggctatcgtcttccccatgatggtactagcactggtctttgtgcgaaaggtgatggatctctgtttcagtaaaagagagctgagctggctcgatgacctgatgccagaaagcaagaagaagaagttagatgacgcaaagaagaaggctaaagaggaagaagtcattgttctggctccaacggtgtacctcggggcatcaaactataggacctag

SEQ ID NO: 241623 - DNA, 3216 bp, synthetic construct
  misc_feature 1..3216: note = Description of Artificial Sequence: Synthetic coding sequence
  source 1..3216: mol_type = other DNA
atgtttaacaaaaacaacagcaacaagctccgctccacacctagataccggcgaggggaccctgggtacttgaatttcaccgagctagggcctctgaagcctgagcaaaaagaccaatggagccagcaccgtcctgacgaggaggctgtggtggatcaagggggaacctccacgatattaaacattcactacgagaaagaagagctcgaggggcacaggacactttatgtgggcgttagaatgcctttgggcagacagagccataggcaccaccgcacccacggccagaagcacaggaggcgcggtcggggtaaaggagccagccagggtgaagagggcttggaggccctggcacacgacactccgtctcagagggttcaatttatccttggaaccgaggaggacgaagagcatgtcccacacgaactgttcactgaactggacgagatttgtatgaaggaaggcgaggacgccgaatggaaagaaactgcgagatggctgaagttcgaagaggatgttgaagatggcggtgagcggtggtcaaaaccttatgtggctaccttaagtttgcatagtttgttcgagctgcgctcctgtcttattaacgggactgtgctgctggacatgcacgcaaattctatcgaggaaattagcgaccttatactggatcagcaggaactcagctcagacttaaacgattctatgcgggtcaaggtgcgcgaggccctcctcaagaaacaccaccaccaaaacgagaaaaaacgtaacaatctcattccaatcgtccggtccttcgctgaagtcggtaagaaacagtccgacccacatcttatggacaagcacggtcagaccgtgtctccacagtcagtgccaacaacgaacttggaagtcaaaaatggagttaactgcgaacatagccccgtcgacctgtccaaggtagatctacatttcatgaaaaagattcctactggcgctgaggcatcaaacgtactggtgggcgaggtcgatatcttggataggccaattgtggcgttcgttcgcctttctcctgccgtgctcttgtcaggacttactgaggtccctatccccacacggtttcttttcatactgctgggcccagtcggtaagggccagcagtatcacgagatcggtagatccatggcaactatcatgacggatgagatatttcacgacgtcgcgtataaagccaaagaaagggacgacctgttagccggaattgatgagtttctagaccaagtcacagtcctcccacccggagaatgggacccctctatacgaatcgagcctccgaaaaacgttccaagccaggagaagcgcaagatgccaggagtccccaacgggaacgtgtgccacatcgagcaggagccccacgggggtcactccggccctgagcttcagcggacagggagactgttcggcggtctcgtgctggacattaagcgaaaggcgccttggtattggtctgactacagagatgcgctatccctgcagtgccttgcctccttcctctttctgtattgcgcctgtatgagccccgtgattacattcggtgggcttttgggcgaggcgactgaggggagaattagcgcaatcgaatcgctgttcggggcatccatgacaggcattgcttattctctctttgctggacaagccctgacgatcctcgggtctacaggccctgtgctagtgttcgagaaaatactgtttaagttttgcaaggattatgctctctcatatctgtcactgcgcgcttgcataggcctctggacggcattcctgtgtatcgtcctagtggctaccgacgctagcagcttagtgtgttacatcactcgttttacagaggaggcattcgcctccttgatctgcatcatcttcatatacgaggcaatcgagaagttgatccacttggcagaaacctaccccattcatatgcactcccagttggaccacctttcgctttattactgccgatgtactctccctgaaaatcctaataatcacacactgcagtattggaaagaccataacattgtgaccgcggaagtccattgggcaaatctcacagttagcgaatgtcaggagatgcacggtgaattcatgggcagtgcctgtgggcaccacggaccttacacgcccgacgtgctcttttggagttgcatactctttttcacaacattcatcctgtcgagcactctcaaaacttttaagactagccgttattttcccaccagagtaaggtccatggtaagcgatttcgcggtgttcttgacaatctttactatggtgatcattgactttctgataggagtaccttctcccaagctgcaagtgcccagcgtttttaagcccaccagggacgatcggggatggataatcaaccctatcggtcccaatccatggtggaccgtcattgccgctataatccccgctcttctatgcaccatcctgattttcatggaccagcaaataacagctgtcattataaaccgcaaggaacacaagttaaaaaaaggctgtgggtatcatctggatttgttgatggtggcaataatgctgggcgtttgctccattatgggtttaccatggttcgtggccgctacagtcctttccataacgcatgtgaactctctgaagctcgagtctgagtgttctgcacccggagaacaacccaagttcctggggattcgggagcagagggttaccgggctcatgattttcgtgctaatggggtgctcggtgtttatgactgcaatactgaagtttatccctatgcccgtattgtacggtgtgtttctttacatgggagtgagctccctacagggcatacaatttttcgaccgcttaaaactcttcggcatgcccgcaaagcaccagccggattttatctacctcaggcatgtgcctctccgcaaggtgcatctctttaccctcatccagttaacctgccttgtgttactctgggtgatcaaagctagccccgctgctattgtgtttcccatgatggtgctcgccctcgttttcgtcagaaaggttatggacctgtgcttttcgaagagggagctatcctggctagacgatctgatgcccgaaagcaagaagaaaaagttggatgatgcgaagaagaaggctaaagaggaggaggtgattgtattggcccctaccgtttacctcggcgcaagcaactacaggacgtag

SEQ ID NO: 241624 - DNA, 2244 bp, synthetic construct
  misc_feature 1..2244: note = Description of Artificial Sequence: Synthetic coding sequence
  source 1..2244: mol_type = other DNA
atgcctctcggcaggcagtcccacagacaccaccgtacacacgggcagaagcacaggcgccgtggccgtggtaagggtgcctcccagggcgaagaaggtctcgaggcgctggcccacgacactcctagtcagcgagtccagtttattttgggtacggaggaggacgaggaacacgtgccacacgagctgttcacggagctggacgaaatctgtatgaaagaaggagaagatgctgaatggaaggaaacggcccgatggctcaagtttgaagaggatgtcgaagacggaggagaacgatggtccaagccttacgtggctaccctcagcttgcactctctttttgaactgagaagttgccttatcaatggcacggtcctccttgacatgcacgccaacagcatagaggagatttccgatttgatcctcgatcaacaagagctttctagcgacctgaatgactcgatgagggtgaaggtgcgggaggctctgctgaagaagcaccatcaccagaacgagaagaaaagaaataacctcattccgatcgtcaggtcgttcgccgaggtaggaaagaagcagtccgacccccacctcatggataaacacgggcaaactgtttctccccagtcagtgcccaccaccaatctggaggtgaaaaatggagtgaattgtgaacatagtcccgtggacctgtccaaggtggatctccacttcatgaaaaaaatcccaactggggcagaagcctctaatgtactagtcggggaggtggatattcttgacaggccaatagtcgccttcgttcgcctgtcacccgctgtactgctgagtggtctgaccgaggtgcccatacctacacgcttcctgttcatactgctgggccctgtgggtaaggggcagcagtatcatgaaattggtagaagtatggccaccataatgactgatgagatctttcacgacgtggcttataaggccaaggagcgggacgatctgctggccggaattgacgagtttctggatcaggtcactgtgctgcccccaggggaatgggatccttctatccgtatagaacctccaaaaaacgtgccttcccaggaaaagaggaagatgccaggtgtccctaatggcaacgtgtgccacattgaacaggaaccccatggaggtcatagcggcccagagctgcagcgcacgggccgtctcttcgggggtttggtgcttgacattaaacggaaggcgccttggtactggagcgattaccgggacgcgctctccctgcagtgtctcgcaagttttctcttcctctattgcgcctgtatgtcacccgtcatcacattcggcggactgctgggggaggctactgaaggaaggataagcgccatcgaaagcttgttcggagcctccatgaccggtattgcctattccttattcgcaggccaggcgcttaccatactgggctccacaggaccagttctggtgttcgagaagattctgtttaagttttgtaaggactacgccctgtcatacctctcacttcgcgcttgcatcggtctgtggaccgccttcctgtgcatcgtccttgtcgctactgacgctagctctttggtttgttatataactagatttacagaagaagccttcgcctcactgatctgcatcatcttcatctacgaggccatcgagaaattgatacacctcgctgagacttatcccatccatatgcattcgcaactcgatcatttgtccctgtactactgcagatgtactttaccagaaaaccctaacaaccatacgttgcagtattggaaagatcacaacatcgttactgccgaggtgcactgggctaatttgaccgtatccgagtgccaggagatgcatggtgaattcatgggcagcgcctgtggccaccacggcccatacacgccagatgtgttattttggtcatgcatactgttcttcactacattcatactatctagcaccctaaaaacctttaaaacaagcaggtactttcctacccggatggaatcatgcagtgtggcgtggctagaatgtggcggagtgatccttgctcactgtaacctgcggttactgcccagttcctgggactatagacatgcccctccgcagcccgcaaacttctgcattttcagcagggacggcgtgagtccgtgttggcctggatggagtcagagccttgatctggtcatctgtctgcccagaccccctaagatgctgggtctccaggcttag

SEQ ID NO: 241625 - DNA, 3282 bp, synthetic construct
  misc_feature 1..3282: note = Description of Artificial Sequence: Synthetic coding sequence
  source 1..3282: mol_type = other DNA
atgccagcggctggcagcaacgagcccgacggcgtgctgagttaccaaagaccggacgaggaggccgtagtcgatcaaggaggaacttcaactatactcaacatccactacgagaaagaggagttggagggccacaggacactgtacgtcggtgttagaatgcctttgggaaggcagtcacataggcaccatcgcacacatggccagaagcatcgcaggcggggtcgcggtaaaggcgcatcacagggcgaagaggggctcgaagcgctcgcccatgacacaccttcacagagggtccagttcatcctgggaacagaagaagatgaggaacacgtgccccacgaactgtttaccgagctagatgaaatttgcatgaaggagggcgaggatgcagagtggaaggagactgccaggtggctgaagttcgaggaggacgtggaggatggtggtgaacgctggtctaagccctacgtggctaccttgtcactccactctctgttcgaactgaggtcatgtttgattaatggaactgtgctgttagacatgcacgctaacagcatcgaggaaatttccgatctgatcttggaccagcaggagctcagcagtgacctcaatgacagtatgagagtcaaggttcgagaggccctacttaagaaacaccatcatcaaaacgagaagaagaggaataatctgatccctatagtccgttcttttgctgaggtcggtaaaaaacagtctgatccacacctcatggacaaacacggccagaccgtcagtccacagagcgtgccaactacgaacctggaggtaaaaaacggagtgaattgtgagcattcccctgtagatctctcaaaggtcgatttgcactttatgaaaaagatccctaccggcgctgaagccagcaatgtgctagtgggtgaagtggatatactcgaccgcccaattgtggccttcgtccggctttcacctgctgtgttgctgtcaggattaaccgaggtgcccatccctactagattcctgttcatcctgttgggaccagtggggaagggccagcagtatcacgagatcgggaggtctatggccaccatcatgaccgatgagatcttccatgacgtggcttataaagccaaagaaagggatgaccttctcgcaggaatcgacgaattccttgatcaggttactgtactgccgcctggcgaatgggatcctagcattcgcattgagcctccaaagaacgtcccgagccaggagaaacgcaagatgcctggggttccaaatggtaatgtctgtcacattgaacaggagccacacggcggacattccggcccagagctacagaggacagggaggttattcggaggcctagtgctggatataaagagaaaggcaccatggtactggagcgattacagagacgcgctgtctttacagtgcctagcaagttttctttttctctattgcgcatgtatgagccccgtcattacgttcggaggcttgctgggagaagcaaccgagggcagaatcagcgcaatcgagtctttgtttggggcttctatgacagggatcgcatattcactcttcgccggtcaggccctcaccattctggggagcacaggacctgtcttggtctttgagaagatcctgttcaagttctgtaaagactacgctctctcctatttatctttgcgagcatgcatcgggctctggactgcctttctttgtattgtcctggtagccaccgatgcttcctcgctggtctgctacataactcggtttacagaggaggcgtttgcttctctcatttgcattatcttcatatacgaggcaatagagaagttgattcacctggccgaaacctatccaattcacatgcactctcagttggaccatctgtctctctactactgtcggtgcactctgccagagaatcctaacaaccacacccttcagtattggaaagaccacaatatcgtcaccgctgaagtccattgggcgaatctgacagtgagcgagtgccaggagatgcacggagaatttatggggtccgcgtgcggacatcacggcccatataccccagatgttctgttttggtcctgtatcctgttctttactactttcattttgtcaagtacccttaaaacatttaagacatcccggtatttccctactagagttcgtagcatggtgagtgatttcgccgtattcttaacgatctttacgatggtgattatcgacttcctgatcggggtccccagcccaaagctgcaagtgccctctgtattcaagcctaccagagacgacaggggctggatcattaatcccatcggtcctaatccctggtggactgttattgccgctattatacctgccctgctgtgtacaatcctgatttttatggaccagcagatcaccgcagtgatcatcaaccgcaaggagcacaagctaaagaagggatgcgggtaccacttagacttgctgatggtagctattatgttaggagtctgctccattatggggctgccctggtttgtcgcagctactgttctatccattacacatgtcaattcactgaaacttgagtcagagtgctcggcacctggagaacagcccaagttcttagggattcgggagcagcgggtgactgggcttatgatatttgtgctaatgggctgtagtgtatttatgacagccattcttaaatttatcccaatgcctgtgctgtatggcgtcttcttgtacatgggggtgtcctccctacaggggatccagttctttgacaggctgaagttgtttggaatgcctgccaaacatcagccagattttatttatcttcgacatgtgccccttcgtaaggtgcacctgttcacactgatacagctgacttgtttggtccttctctgggttattaaagcctccccagctgcaatagtattccctatgatggtgctagcactcgtgttcgtgagaaaagttatggacttgtgcttctcgaaaagagagctcagttggcttgatgatttaatgccagagagcaaaaaaaagaagctggatgacgccaagaagaaggcaaaagaggaggaggaagcagaaaagatgctcgaaatcgggggagacaagtttccactcgagtcacggaaattgctgtcatctcccggaaaaaatatctcatgtcggtgtgatccgtcagagattaatatcagcgatgagatgcccaagaccactgtatggaaggccttaagtatgaacagcggcaatgcaaaggagaaatcactatttaattag

SEQ ID NO: 241626 - DNA, 1917 bp, synthetic construct
  misc_feature 1..1917: note = Description of Artificial Sequence: Synthetic coding sequence
  source 1..1917: mol_type = other DNA
atgcctctcggaagacagtctcaccgacaccatagaactcacggccagaaacaccggcgtcgcggaaggggtaaaggtgccagccagggggaggagggtttagaagccctggctcacgacactccatctcaacgagttcagtttatcctgggcacagaagaagacgaggaacatgtgccccacgagcttttcacggaacttgacgaaatctgtatgaaggaaggcgaggacgccgagtggaaggagaccgctaggtggctgaagtttgaggaagacgtggaagatggcggtgagaggtggtcaaagccatacgttgcaaccctgtccctgcactctctgtttgagctgcgatcatgtcttatcaatggcaccgtgctgcttgacatgcacgccaatagcatcgaggaaatttccgatttaatcctggatcagcaagagctgtcaagcgatcttaacgacagtatgagagtaaaggtacgggaagcactcctgaagaaacaccaccaccagaacgagaaaaagcggaacaatctcatccccatagtccgaagttttgccgaggtggggaaaaaacagagcgacccgcacttaatggataaacatggccaaacagtgtcacctcagtccgttcctacaactaatttagaggtgaaaaatggcgtgaattgtgagcatagccctgtagacctgtccaaagtggatctgcattttatgaaaaaaatccctaccggtgccgaggcttccaatgtcctggtgggcgaagtggatattctcgatcgaccaatcgtcgccttcgtgcgcctgagccctgctgtgctcttgagcggactgactgaggtgcccattcccaccaggttcctttttatccttttaggcccagtgggaaaaggacagcaatatcacgaaatcggcagatcaatggctaccatcatgaccgatgagattttccatgatgttgcttataaggcaaaagagagagacgatttactcgcagggattgacgagttcctggaccaagtcactgtcctgccccctggagaatgggacccttccataagaatagagcctccgaaaaacgtgccgtctcaggaaaaacggaagatgccaggtgtaccaaacggaaacgtttgtcacatcgaacaggaaccccacggcggacattccgggccagagctgcagcggactggacgtctgttcggaggccttgtgctcgatatcaaaaggaaagcaccttggtactggagcgactatagggacgcattgagcttacagtgtctcgcctcattcttattcctgtattgcgcttgcatgtcaccagtgatcaccttcggcggactgcttggcgaggccactgaaggcaggatctcagccatcgagtccctgtttggcgctagtatgaccggcatagcatactccctgttcgccggacaggcactgactatcttggggtctactggtcccgtgctagtgtttgagaaaatcttgttcaagttttgtaaggactatgcactttcctacttatccctgagggcatgcatcggactgtggaccgccttcctgtgtattgtattggtcgcaacggatgcctcctcactggtatgttatatcacgcgtttcaccgaggaagcttttgcatcattgatctgtattatcttcatctacgaggctattgagaaactaattcatctcgccgaaacctatcctattcacatgcactcacaactcgatcacctgtcactgtattattgtcgttgcacactcccagaaaatcctaacaaccatacactccaatattggaaggaccataacatcgttaccgctgaagttcactgggccaacctgacagttagcgtctcgttgggcgctgcccgttgccccagcatagttactactggcctcggcggtacctccaagtag

SEQ ID NO: 241627 - DNA, 2976 bp, synthetic construct
  misc_feature 1..2976: note = Description of Artificial Sequence: Synthetic coding sequence
  source 1..2976: mol_type = other DNA
atgcccttaggcagacaaagccatcgccaccaccgcacacatggtcagaagcaccgccgacggggacgcggaaagggagcgtctcaaggtgaggaaggacttgaggcccttgctcatgataccccctcacaaagagtccagtttatcctcggcaccgaggaagatgaggagcacgttccacacgaactgttcactgagttagacgagatatgtatgaaggagggagaagacgcagaatggaaggagactgctcgctggctgaagtttgaggaagatgttgaggatgggggtgaacgttggtccaagccatatgtggccacactctcactgcattccctgttcgaactcagatcctgtttgattaacggcactgtactgcttgatatgcacgcaaacagcattgaggaaatttccgacctgatcctagaccagcaggaactgagttctgacctgaatgattccatgcgagtgaaggttcgtgaagcactcttgaagaagcatcaccaccagaatgaaaagaagcgaaataatctgatcccaattgttcgcagcttcgctgaggtgggcaaaaagcagtctgatccccacctgatggacaagcatggccagacagtttctccccagtcagtccctacgaccaaccttgaggtaaagaatggcgtgaattgtgagcactcccctgtggacctgagcaaggttgatctacatttcatgaaaaaaattccgacaggagccgaggctagcaacgttctggtcggtgaagtcgacatactcgacaggccgatcgttgctttcgtccgtcttagcccggcagttcttctgtccgggctcaccgaggtcccaattccaacgagattcttattcatcctccttgggccagtaggcaagggccaacagtatcatgagatcggccgatcgatggctaccatcatgaccgacgaaatctttcatgatgtcgcctataaggctaaagaaagggacgacctcctcgcgggaatcgacgagtttctcgaccaggtgaccgtgctcccacctggagagtgggacccttctatcaggatagaaccacccaaaaacgtcccctcccaggaaaagcgtaagatgccaggcgttcctaacggaaacgtctgtcacatagagcaggaacctcacggtggtcattctggcccagagctgcaaaggacaggtagactgttcggtggcttggtgttagatattaagcgtaaggctccctggtattggagtgactatcgcgacgccctgagcctacagtgcttagcatcttttctgttcctgtattgcgcttgcatgtcacccgtaattacatttgggggactgctgggagaagccacagaaggacggatatccgccattgaaagcctctttggtgcgtctatgacaggtatcgcctattcgctcttcgctggccaggccctcacaatacttgggtcaacggggcctgtattggtgtttgagaagatcctcttcaagttctgtaaggactacgccctctcatatctgtctctgcgcgcttgtatcggattatggaccgctttcctatgcatcgtgctggtcgctaccgatgcatcctctcttgtttgctacatcactaggttcactgaagaagccttcgcttcacttatctgcatcatatttatatatgaagccattgaaaagctgatccacctcgccgaaacttaccctatacatatgcattcccagctggaccacctttcgctctattattgtaggtgcactctcccagagaaccccaacaatcatacactgcagtattggaaagatcataacatcgtcactgccgaggtccactgggccaacttaacggtcagtgaatgccaggagatgcacggcgagtttatgggcagcgcctgcggacaccatgggccttacacccctgatgtgctgttctggtcttgcattcttttcttcaccacatttatactttctagcacactcaagaccttcaaaacatccagatatttccctactagggttcgttcgatggtgtccgattttgctgtctttctgactatctttaccatggttattatagatttcctgattggtgtcccgagcccaaaactgcaagttccaagcgtgtttaagcctacaagagatgaccgagggtggattatcaacccaatcggacctaacccatggtggacagtgattgcggcaatcatccccgctcttttgtgtaccatcctgatcttcatggatcagcagatcacagccgtgatcattaaccgcaaggagcacaaactcaagaaagggtgtggataccatctggatttgctgatggtagccatcatgctgggagtatgcagcattatgggattgccatggttcgtggctgctactgtgctgtcaatcacccacgtcaattctctgaaactcgagtctgaatgtagcgcccctggcgaacagcccaagttcctcgggattcgggaacagcgggtgactggacttatgatctttgtgctgatgggctgttccgtctttatgaccgccattctgaaatttattcccatgcccgttctgtacggggtgttcctgtacatgggagtgtcctcccttcaaggcattcagttctttgaccgtctgaaactgtttggtatgcccgcaaagcaccaacccgacttcatctatttacggcacgtcccactgcgaaaggtgcacttattcacgctgattcagctaacgtgcctggtactgctctgggtgatcaaagcaagtccagccgctattgtgtttcccatgatggtcttagccctcgtattcgtgcgaaaagtcatggatctctgttttagtaaaagggaactttcctggcttgatgacctgatgccggaatctaagaaaaagaagctggatgacgccaaaaagaaagctaaggaggaggaggtaatcgtgctggcaccaacagtctatctcggggcatccaactaccgtacctag

SEQ ID NO: 241628 - DNA, 3321 bp, synthetic construct
  misc_feature 1..3321: note = Description of Artificial Sequence: Synthetic coding sequence
  source 1..3321: mol_type = other DNA
atggagataaaagatcagggggctcagatggaaccactcctgcctacgcgcaatgacgaggaagccgtggtggatcggggaggcacccgcagcatactcaaaacacactttgagaaagaagatcttgaagggcataggacgctgtttataggcgtccacgtgcctttaggcggaaggaagtcgcatcggcgtcatagacatcgcggacataaacatcgcaagcgggacagggaacgggactctggactcgaggatggcagggagtctccttcgttcgataccccctctcagagagttcaatttatcctgggaaccgaggacgacgatgaagaacacatacctcacgatctgttcaccgaattggacgaaatctgctggagagagggggaagacgcggagtggagggagactgcccgatggttgaagtttgaagaagacgtggaggacgggggagagcggtggagcaagccctacgttgcaaccctttccctgcattcactctttgaacttagaagttgcattttaaacggcacagtcctgttggacatgcatgcaaatacattggaggaaatagccgacatggtgctggatcagcaggtctccagcggccagcttaacgaagatgtccggcacagggtgcacgaagcactcatgaaacagcatcatcaccaaaaccagaaaaaattgacgaatcgaattcctattgtccgcagctttgccgacatcggtaagaaacagagtgaaccaaacagcatggacaagaacgcaggacaagtcgtatctccccagtctgcccctgcgtgtgtggagaacaaaaatgatgtctcccgggaaaactcaaccgttgacttcagtaaggtggatctacatttcatgaaaaaaatcccacccggagctgaagcctccaatatacttgtgggcgagctcgagtttctcgatcgtacagtggtggcgtttgtccggctgtcacccgctgtcctgctgcaaggacttgcggaagttcccataccaaccaggttcctcttcattttactcggaccacttgggaagggccaacaataccacgagatcggcagatctatcgccacactcatgacggacgaagtgtttcacgacgtggcctacaaagcaaaagaccggaatgacctggtttctggaattgacgagtttctggatcaggttacggtgttacctcctggggagtgggatcctagcattaggattgaacctcctaagaacgtcccatcacaggagaagcgtaaaatcccagccgtgcctaacggtacggccgcacatggcgaagctgaaccacatggtgggcatagcggtcccgagctccaacggaccggcaggatatttgggggacttatcctggacataaaaaggaaagccccatatttttggtcagatttcagggatgcatttagcttacagtgtttagcatcgtttctgttcctttattgcgcttgtatgtctccggtgatcacgtttggtggccttctcggtgaggcaacggaggggcgaatctcagcaatcgagtccttattcggcgcttcaatgaccgggatcgcatatagcctgttcggcggtcaacccttaacaatactgggtagtaccggccctgtgttagtgttcgagaagattctcttcaagttttgtaaggagtacggcctgtcctacctatccttgcgggcatccattggcctttggacagcgaccctgtgcattatcttggtggcgaccgatgcttcttcactcgtgtgctacatcaccaggtttaccgaagaggcctttgcaagcctgatttgcattatcttcatatacgaagccctcgaaaaactgtttgaattgagtgaagcttatccgatcaacatgcataatgatctcgaattattgacccagtacagctgtaactgtgttgaacctcataatcccagcaatggcacactgaaggagtggagggaaagcaatatttctgcttccgatatcatctgggagaatttgactgtgtcagagtgtaagagtttacacggagagtacgtcgggagagcctgcggacacgaccacccttatgtacccgatgtgctcttctggtcagtcatactatttttctcaaccgtgacattgtccgccacattaaagcagtttaagacatcccgctactttccgaccaaagttagaagcatcgtgtctgacttcgccgtcttcttaaccattctgtgcatggtgctgatcgattatgccatcgggattcctagtcccaagcttcaggtcccaagtgtgtttaagccaaccagggatgatagaggatggtttgtgacacctctcggccctaatccctggtggactgtgattgcggcaatcatacctgccctcctttgtaccattttaattttcatggaccaacagatcacagccgttattatcaaccgcaaagaacacaagttaaagaaaggctgcggttatcatctcgatctcctgatggttgctgtcatgctgggcgtctgctcaatcatgggacttccctggtttgtagccgctactgttctctccattacccatgtgaacagtttgaaactggaaagcgagtgcagcgcccctggggaacagcccaaatttctaggaattcgagagcagagagtgaccgggctcatgatcttcattttgatgggaagctccgtctttatgacgtctattctgaaattcattcctatgccagtgctttacggcgtgtttctgtacatgggagcttcttctctcaagggcatccaattcttcgataggataaaactgttctggatgccagccaaacaccagcctgacttcatctatctgcggcacgtccccctgcgcaaagtccatctattcaccataatccagatgagctgtttggggctcttatggataattaaagtctcacgggctgctatagttttcccaatgatggtcctcgctttagtctttgtgcggaaactgatggatcttctcttcacaaaacgagagctttcctggctggacgacttaatgcctgaatccaaaaagaaaaaactggaggatgctgaaaaggaggaggaacagtcaatgcttgccatggaggacgagggcaccgtgcaacttccgctagaggggcactatcgagacgacccaagcgtgatcaacatcagtgatgaaatgtcaaaaaccgcattgtggcggaatctattaatcaccgcggataactcgaaggacaaggaaagctcctttccttcaaagagcattgaaagtagaaaggaaaaaaaggctgacagtggaaagggagtggacagggagacatgcctgtag

SEQ ID NO: 241629 - DNA, 3300 bp, synthetic construct
  misc_feature 1..3300: note = Description of Artificial Sequence: Synthetic coding sequence
  source 1..3300: mol_type = other DNA
atgcagagtctgggagtgtctggaaaccgtaaggtcatgcagagcggcacatgcgaaccctttcaatctctgagccaccagagaaatgatgaggaggcagtggttgacagaggaggaacgcgctcgattttaaaaacacatttcgagaaagaggacctggagggccatagaactttgttcattggagtgcacgtgcctcttgggggacgcaaatcgcaccgtcggcataggcatagagggcataagcacagaaaaagggaccgagagagggactccggcttagaagacggtagggaatcaccatctttcgacaccccctcccagcgcgttcagttcatcctagggacggaggacgacgatgaagagcacatcccgcacgacctgtttactgagctggatgagatatgctggagggaaggagaagatgctgaatggcgtgagacagcgagatggctcaagtttgaggaagacgtggaggatgggggagagaggtggtcaaagccctacgtggccaccttatcgttgcattcactgttcgagttgcgcagctgcatccttaacggaacggtgcttttagacatgcacgctaacacacttgaagagattgccgacatggtgctggaccagcaggtttcatccggacagcttaatgaggatgtcagacatcgggtgcacgaagcccttatgaaacagcatcaccatcaaaatcagaagaaactgactaacagaatcccaattgtccggagctttgccgatatcggaaagaagcaaagcgaacccaactccatggacaagaacgccggtcaagtggtgtctccgcagagtgcaccagcatgtgtcgagaataaaaatgatgtctctcgcgaaaatagcacagtggactttagcaaagttgacctccacttcatgaagaagatccccccaggtgccgaggcctcaaatattctcgtgggcgaacttgagttccttgatcgaactgtggttgctttcgtgagactatcccctgcagtgctgctgcagggactcgctgaagttcccattcccaccaggtttctctttatcctgttaggaccactgggcaagggacagcagtaccacgaaattggcaggagtatagccactctgatgaccgacgaagtctttcatgatgtggcttataaagccaaggaccgcaatgatctggtatctgggatcgatgagtttttagaccaggtgactgtgctccctcctggtgagtgggatcccagcatccgcatcgagccgccaaaaaatgtccccagccaggaaaaaagaaagattccagccgtgccgaacggcaccgccgctcacggtgaagctgagccacatggagggcacagcggacccgaactgcagcggacgggcagaattttcgggggattgattctcgacattaaaaggaaagcaccatatttttggagtgacttccgggacgccttctcgctgcagtgtttggccagctttctgtttctgtactgtgcctgtatgtctcctgtgatcactttcgggggactacttggggaagccacagaagggagaatcagcgcaattgaatcgttgtttggagcttccatgactggcattgcgtacagccttttcggcggacagccccttacaattctgggctctacaggcccagtgttggtctttgagaagatactgttcaaattctgcaaagaatatggcctgtcctacctctccttacgcgcatcaatcggcctgtggacggcaactctctgcattattctggtcgcaaccgacgcctcttcacttgtgtgttacattacccgcttcaccgaagaggctttcgcctctttgatctgcattatttttatttatgaggccctcgaaaagttgttcgaactcagcgaggcttatccaatcaacatgcacaatgacctcgagctgcttacccagtacagctgcaattgtgttgagccccacaacccaagcaatggcactctgaaggagtggagggagagcaatataagcgcttctgacatcatctgggaaaaccttaccgtgtccgagtgtaaatctctgcacggcgaatacgtgggtagggcctgtggccacgatcacccctacgtgcctgatgttcttttctggagcgttatcctctttttttctacagtgacactgtcggcgacgctcaaacagtttaaaacctctaggtacttccctacaaaggtacgctcaattgtgagcgattttgccgtattccttactatcctgtgtatggtgctgatcgattacgccattgggataccttctccgaaactccaggtaccatccgtgttcaaaccaactagggatgaccgcggttggttcgtcacacctctgggacccaacccttggtggaccgtgattgctgcgattataccagccctcctttgtaccattttgatcttcatggatcagcaaataactgcagtgatcatcaacagaaaggaacataaactgaagaaaggctgcggctaccatttagacctgcttatggtggctgtaatgctcggcgtatgttcgattatgggtcttccttggtttgtggccgcaacagtcctgtccattactcacgtgaatagtctgaagcttgagtcggaatgctccgcgccaggcgagcagccaaagttcttgggaataagagaacagagggtcactgggttgatgatatttattttgatgggatcttctgttttcatgacatccatcctgaagttcatccctatgcccgtactttacggagtcttcttgtacatgggagcatcatctctcaagggtatccaattttttgaccggattaagctgttctggatgccagcgaagcaccagccagatttcatctatctgcgacatgtccccctcaggaaggtgcatttgtttacaattatccaaatgagctgcctcggtttgctctggattatcaaggtcagccgtgccgcaatcgtgttcccaatgatggtcctcgcactggtgtttgtgagaaaacttatggatttactttttactaagcgggaattatcttggcttgatgatctcatgcctgaatctaagaaaaagaagctggaggatgcggagaaggaggaggaacaatccatgctggcgatggaggacgaagggacggttcagttgcctttggaggggcactatcgcgatgaccccagcgtgattaatatttccgacgaaatgagtaagacagcactgtggaggaacttgctgataacagctgataatagcaaggacaaggagtcgtcgttcccgtctaaaagcagcccttcctag

SEQ ID NO: 241630 - DNA, 3354 bp, synthetic construct
  misc_feature 1..3354: note = Description of Artificial Sequence: Synthetic coding sequence
  source 1..3354: mol_type = other DNA
atggaaattaaagaccagggcgcacagatggagcccctgctgccgaccagaaatgatgaagaggccgtcgtggatagaggaggcaccaggtcaatccttaaaactcattttgagaaagaggaccttgaaggccacaggaccctcttcattggggtgcatgttcctctgggcggtaggaagtcccaccgcaggcataggcatcggggacataagcataggaagcgcgatcgggaaagggacagcggcttggaagatgggagagaatcgccttctttcgacaccccttcacaacgggtccagttcatcctcggtacagaagatgatgacgaggagcacatcccacacgacctcttcacagaactggacgagatttgttggcgagagggagaggacgccgagtggcgagagactgccagatggctgaagttcgaagaggatgtggaggacggaggcgaacgatggtctaaaccttacgtggcgaccttaagcctgcactccctgttcgagctcaggagctgtatcctgaacgggaccgtgctgttggacatgcacgccaacacccttgaggaaattgctgatatggtcttggaccagcaggtgagctccggccaactgaacgaagatgtccggcatagggtccatgaggctctgatgaagcagcaccatcaccaaaatcagaaaaaactcacaaacaggattcctatcgtaaggtcattcgcagacatcggcaagaaacagtcagagccaaactccatggacaaaaatggacaggtggtgagcccacagtcagcacccgcatgtgtggaaaacaaaaacgacgtctcccgtgaaaactccactgttgacttctcaaagggcctcggcggacagcagaaggggcacactagcccatgtgggatgaagcagaggcacgagaaaggtcctcctcaccaacaggaaagagaggtggacttacactttatgaaaaaaatacctcctggcgctgaagcttcgaatattctagttggcgagctcgagtttcttgaccgtaccgttgtggcattcgtgagactctctcctgcagtgttgttgcaaggcttggcggaggtgcctattccaactagattcctctttatcctgttaggcccactgggcaagggccagcagtatcacgagattgggaggtctatcgccactctaatgacggatgaggttttccacgacgtggcttataaggccaaggacaggaacgaccttgtgtctggaattgacgaattcctggaccaagtgaccgtcctacccccaggcgaatgggatcctagcatacgtattgagcccccaaagaacgtcccctcgcaggagaaacgcaagatcccagctgtgcctaatgggactgccgctcacggggaggctgagccccacggtggtcattccgggcctgagttgcaacgcactggaagaattttcggcggtctcatcctggatattaaacggaaggctccctatttttggagtgacttcagagacgctttcagtttacaatgcctcgcgagctttttgtttctgtactgcgcctgcatgtctcccgtgattacatttggaggcctcttaggcgaggctaccgaaggtcgcatctccgcgatagagtctctattcggggctagcatgactgggatagcatattctctgtttggtggacagcctttaacaattctgggtagtaccggcccagtgcttgtgttcgagaagatcctgttcaaattttgcaaggagtacggtctcagctacctctcactgagggccagcattggtctgtggacggcaaccttgtgcatcatcctggtggccacggacgcaagttccttggtctgctacattacccgcttcacggaggaggcttttgcctcccttatttgtattatcttcatctacgaagctctcgagaagctgtttgagctctccgaggcctatcctattaacatgcataatgatctggagttgctgacacagtacagctgcaattgcgtcgagccacacaatccctcaaatggcacgctgaaagaatggagagagagtaatatctcggcaagcgacattatctgggagaatctcacagtgtccgaatgtaaaagcctgcacggagagtatgtcggaagggcttgcgggcatgaccacccctacgttcctgacgtgcttttttggagcgtgattctgttcttttcgaccgtgacgcttagcgcgacactgaaacagttcaaaacatctaggtattttcctacaaaagtgaggtctatagtgagcgattttgccgtctttctgaccatcctctgcatggtgctaattgattatgctattggcataccctctcccaagttgcaggtgccatcagttttcaaacctactagggatgatcgcggttggtttgttacacctctgggccctaatccctggtggactgttatcgcagcaatcattcccgcattgttgtgcactattctgatcttcatggatcagcagattaccgctgtgattataaatagaaaagagcacaaactgaaaaagggatgtggctaccatctcgacctcctaatggtggccgtgatgttgggcgtctgctcaattatgggtctaccttggtttgtagcagccacagtactgtctattacacacgttaacagcctgaagctcgaatctgaatgttccgctcctggagaacagcccaagttcttaggaattcgcgagcagagggtcacaggcctgatgatattcattctaatgggtagttctgtcttcatgacttcaattctgaagttcattccaatgccagtgctctacggagtcttcctctatatgggggcaagttcccttaaggggatacaattttttgacagaatcaaactcttctggatgccagccaaacaccagcccgacttcatctacctgaggcatgtcccactgcggaaggtgcacctgttcacaatcatacaaatgtcgtgcttgggtctgctgtggatcatcaaagtatcccgagcagccatagtgttccctatgatggtgttagctctggtatttgtgcggaagttaatggacctgctgtttactaaaagggaattgtcttggctggatgacctcatgcctgaaagtaaaaaaaaaaaacttgaggatgcggaaaaggaggaggaacagagtatgttggctatggaagacgagggcacagttcagttaccattagaggggcactaccgggacgaccctagcgttataaacatctcggatgagatgtctaagacagcactgtggcggaatctgctaatcactgccgataacagtaaagataaagaaagttccttccccagtaagagctctccttcttag

SEQ ID NO: 241631 - DNA, 3267 bp, synthetic construct
  misc_feature 1..3267: note = Description of Artificial Sequence: Synthetic coding sequence
  source 1..3267: mol_type = other DNA
atggaaataaaagatcaaggagcccagatggagcccttattaccgactcggaacgacgaagaggctgtcgtggaccgtggcggaacccgttctattcttaaaacccattttgaaaaggaagatctcgagggccataggacgctctttatcggggtccatgtacccttaggagggagaaagtcccacaggagacaccggcacaggggacacaagcataggaagagagacagggagcgcgattcaggactcgaagatggccgtgaatcaccctccttcgatacaccttctcagcgtgtacaatttatactgggaaccgaggacgatgacgaggagcatatcccacatgacctgttcaccgagctggatgagatctgctggcgagaaggagaagacgcagagtggagggagactgctcgatggctgaaattcgaagaagacgtggaggacggtggagagagatggagtaaaccgtatgtcgcaacattaagcctgcacagcttatttgaactccgaagttgcatcttgaacggtacagtgctccttgacatgcatgccaacaccctcgaggaaatcgcagacatggttctggaccagcaggtgagttctggtcagctgaacgaggacgtacggcatagagtccacgaggccctgatgaagcagcaccaccatcagaatcagaaaaaattgacaaatagaattcccattgtccgaagctttgctgacattggcaagaagcagtctgaacccaactcaatggacaagaacgctgggcaagtcgtttcacctcagagcgctccagcgtgtgtggagaacaagaatgatgtgtcacgcgagaactcaacggtcgattttagcaaggtcgatctgcactttatgaaaaaaatcccccctggcgctgaggcgtcaaacatcctcgtgggcgaactcgagttcctggacaggacagttgtcgcttttgtgcgcctctctccagcagtgctcctgcagggactcgcagaggttccaattccaaccaggttcctgtttattttgcttggtcccctgggcaaagggcagcagtatcatgaaattggaaggtctatagccactttaatgaccgacgaggtgttccacgacgtcgcttacaaggcgaaggatagaaacgatctagtgtcaggtattgatgaatttctggaccaggtgactgtcctgcccccaggtgagtgggacccctctatcagaatcgagccgccaaaaaacgtcccatcgcaggagaagaggaagatacctgccgtccctaacggaacggccgcacacggggaagcagagccccatggtgggcattccggtccggagctgcagcggacagggcgaatattcgggggtctcattctcgatattaagcgcaaggccccatacttctggagcgattttcgggacgctttctcactgcaatgtctggctagtttcctgtttctgtactgtgcctgtatgtccccagtgataacctttgggggactcctcggggaagccacagaagggcgaatcagtgctatcgaaagtctatttggtgcaagtatgacaggcatcgcatattctctgttcggtggacaacctctgacgatcctcggctcaaccgggcctgtactcgtattcgagaagatcttgttcaaattctgtaaagagtatgggttgagttacctcagtttacgtgcctccataggactttggacggccactttatgcatcatcctggtggccactgatgctagcagccttgtgtgctatattacacggttcaccgaagaggcctttgcgtcactgatctgtattatctttatatacgaggctttggaaaaactttttgagcttagtgaggcctaccctatcaacatgcacaatgaccttgagctgctcacccagtacagttgtaactgtgtggaacctcataatccttctaacggcacacttaaggagtggagggaaagcaacatcagtgcgtctgatattatttgggagaacctaactgtttctgaatgtaagtcactacacggagaatatgttggaagagcctgcgggcacgatcatccctacgtgcccgacgtccttttttggtccgtcatactcttcttttctactgtaactttgtcagcaacgctgaaacagttcaagacatccaggtattttcccactaaggtccggagcatcgtatcagacttcgcagtgtttctgactatcctctgcatggttcttattgattatgctattggcatcccctcacccaagcttcaagttccctctgtttttaagcctactagggacgatcgcggatggtttgtgacacctcttggcccaaacccctggtggactgtgattgccgcaattattccagcgttgctctgtacaatcctgatttttatggatcagcagatcaccgccgtaatcattaacagaaaagagcacaaattgaaaaaaggctgtggttatcacctcgacctcctgatggttgccgtcatgctcggagtgtgcagcatcatggggctaccttggtttgtggccgctactgtgctttccattactcatgtaaattctctcaagctagagagcgagtgctctgctcccggagagcagccaaagttcctgggaatcagggaacagagggttacaggcctgatgatcttcatactgatggggagcagcgtgtttatgacaagcatcctgaaattcattcccatgccagtgctttatggggtgttcttgtatatgggcgcttcgtctctgaagggcattcaattctttgacagaataaagttgttctggatgcccgctaagcaccagccagatttcatttacctgaggcatgttccactacgcaaggtccaccttttcactataatccagatgagctgcttaggactactctggattattaaggtgagccgagccgctatcgtttttcccatgatggtgctcgctcttgtgttcgtgcggaagctcatggatttgttattcacgaagagggagctctcttggctagacgaccttatgcctgagtccaagaaaaagaaactagaagacgctgagaaagaggaggagcagtccatgcttgccatggaagatgaagggactgtgcagctccccctcgaagggcattaccgagacgatccttccgtaattaatattagtgacgaaatgtccaaaacagcgctctggcggaatctgctcatcaccgccgataattccaaggataaagagagctctttcccctccaagtctagtccgtcgtag

SEQ ID NO: 241632 - DNA, 3165 bp, synthetic construct
  misc_feature 1..3165: note = Description of Artificial Sequence: Synthetic coding sequence
  source 1..3165: mol_type = other DNA
atggagattaaggatcagggcgctcagatggagcctctcctgccaacccgaaacgacgaggaggccgtggtggaccggggagggacccggtccatcctgaaaacgcacttcgaaaaggaagatctcgaagggcacagaacgctctttattggtgttcatgtgccgcttggagggagaaagtcccatcgcaggcatcgccatagagggcacaaacatcgcaagagggatagggagcgcgacagcgggctggaagacggaagagagagcccatcattcgataccccctcacagagagtacagttcatcctcgggaccgaagacgacgatgaagaacatataccccacgacttgttcactgagctggacgaaatctgttggcgtgaaggagaagacgcagagtggcgggagaccgcgaggtggctcaagttcgaggaagacgttgaagacggcggagagcgctggtctaaaccctacgttgctacattatctctgcattccctgttcgagctgaggagctgcattctaaatggaaccgtactgctggacatgcacgccaacaccctggaggaaattgctgacatggtgctcgatcagcaggtgtcctctggccagctaaacgaagacgtgaggcaccgcgtgcacgaggctttaatgaagcagcatcaccatcagaaccagaagaaactgaccaatagaatccctatagtgcgaagttttgctgacataggtaagaaacagtcagagccaaacagcatggacaaaaacgcaggacaagtggtgagcccacagtccgctcccgcatgtgtggagaataaaaacgatgtgtctcgcgagaatagcacagtcgatttttctaagggccttggtggacaacaaaaggggcacacaagtccctgcggaatgaagcagcggcacgagaaaggtccgccacaccaacaggagcgagaagtagacctgcatttcatgaaaaaaatcccaccaggagcggaggcctcgaatatactggttggagaactggagtttctggataggactgtggtggccttcgtccgcctgagtcctgcagtactgctccaggggctggccgaggttcctatacccactcgtttcctgttcattctgctgggcccactggggaaaggccagcagtaccacgagatagggagaagcatcgctaccttgatgactgacgaggtgtttcacgacgtggcttacaaggctaaggataggaatgatctagtatctggtatcgatgaattcctcgatcaggtcacggtactgccccctggcgaatgggatcctagcatcaggattgaaccacccaagaatgttccctctcaggagaagcgaaagatacctgccgtgcccaatggcacagctgctcatggagaagctgaacctcacggcggtcatagcggtccggagctgcagaggaccgggaggatttttgggggacttattctggacatcaagcggaaagcaccatatttctggagcgactttcgggatgctttttcgttgcagtgtctcgcatcatttctctttctttactgcgcgtgcatgtctccagtgatcacctttggcggacttctgggtgaggccactgagggcagaatctccgccatcgagtcactctttggggctagcatgaccggtattgcctacagcctctttggagggcagcccctgaccattctgggctccacaggccctgtgctggtcttcgagaaaatcctgttcaagttctgtaaagaatatggcctttcctacctgtcactccgggcttctataggcttatggacagccacgctctgtattatccttgtcgcaacagacgcctcgagcctggtgtgttacataactcgtttcacagaggaagcctttgcaagtttaatatgcattatcttcatctatgaggccctggagaagctatttgaactgagcgaagcctacccaatcaacatgcataacgatctcgagctgttgacacagtactcttgcaattgcgtcgaacctcataacccctctaatggcacactgaaagaatggcgcgagtctaatataagcgcctcagatattatttgggaaaacctaacagtgagcgaatgcaagtctcttcacggggagtacgtgggaagggcatgcggacatgatcacccttacgttccagacgtactgttctggtctgtgatcctcttttttagtacagtcacgctgtcagccactcttaaacagttcaagaccagcaggtacttcccgacaaaagtccgaagcattgtctcagactttgcggtctttctgaccattctatgcatggttcttatcgactatgcgatcggtattccttccccaaaactgcaagtgcctagtgtgtttaagcctacgcgagatgaccgcggatggtttgtgacccccctggggcctaatccttggtggacagtcatcgcagccataatccctgctctgctctgtacgatcctaatttttatggaccagcagatcactgctgtgattataaataggaaggagcacaaactgaagaaaggttgtgggtaccatttggatctactcatggtggcagtgatgctcggcgtgtgctcaataatgggactcccgtggtttgtggccgcaactgttctttctattacccacgtgaactcacttaaactcgagagcgagtgcagtgccccaggcgagcagcctaaattcttggggattcgggagcaaagagtcacgggcctaatgatctttatccttatggggtctagtgtattcatgactagcatcctgaagtttataccgatgcccgtgttatatggagtgtttctatacatgggagccagcagcttaaagggcatccagttttttgatagaattaaacttttttggatgcccgctaagcatcagcccgatttcatttatttaagacacgtaccacttagaaaggttcatctgtttacgattatacaaatgagctgtctggggcttctgtggattatcaaggtttctcgagctgctattgtgttccccatgatggtgctggctctggtctttgtgaggaagctcatggatctgcttttcactaagcgagagctatcttggttagacgacctgatgcctgagagcaaaaaaaaaaagctggaagatgccgaaaaggaacactag

SEQ ID NO: 241633 - DNA, 3357 bp, synthetic construct
  misc_feature 1..3357: note = Description of Artificial Sequence: Synthetic coding sequence
  source 1..3357: mol_type = other DNA
atggagattaaggatcagggcgcacagatggagccactcctacccactaggaacgacgaggaggctgtggtggacaggggtggtacaagatctatactgaaaacgcacttcgagaaggaagatctggaggggcatcggacgctgtttattggcgttcacgtaccgctcggagggcgtaaatcccaccggaggcatagacatagaggccataagcacaggaagcgcgatcgcgaacgagatagcggactggaggatgggagggagagcccttcctttgataccccctcccaacgggtgcagtttatactgggtaccgaggatgacgatgaggagcacattccacacgatctatttactgagctggatgagatctgttggcgggagggggaggacgctgagtggcgcgaaactgcgagatggttgaagttcgaggaggacgttgaggatggtggggaacggtggagcaagccttatgtggctaccttgtccctgcacagcctgttcgaacttcgatcttgtatacttaatggcactgtgctcctggatatgcatgccaacactttagaggagattgcagatatggtattggatcaacaggtgtcatcagggcagcttaatgaggatgtgagacacagagtgcatgaagcattaatgaagcaacatcatcaccaaaaccagaagaagctgacaaaccggatcccaattgttcgctcatttgcagatatcggcaagaagcagagcgaacctaatagcatggataaaaacgcgggacaggtcgtttcccctcagtccgccccagcatgtgttgagaacaagaacgacgtgagcagagagaattccaccgtcgacttcagtaaggggctggggggtcagcaaaaagggcatacctccccgtgcggcatgaagcagcggcatgagaaaggaccaccccaccagcaagagcgtgaagtcgatctccattttatgaagaagatacctcccggagccgaggccagcaatattcttgtgggagagctggagttcttggaccggacagtcgtcgcattcgtacgcctgtctccagccgtcctgctccaggggctcgcagaagtccctataccgacacgattcctatttatcctcctaggaccgctcgggaaaggacaacaataccacgaaattggcaggagtatcgcgacactgatgacggatgaggtgttccacgacgtggcctataaggccaaggacagaaacgatctggtgtccggtattgatgagttcttggatcaggtgacagtgttgccgccaggggaatgggaccccagtatccgtatagaacctcctaaaaacgttccatctcaggagaaaagaaaaattcctgctgtgccaaacggcacagccgcacacggcgaagccgagccccacgggggacattcaggccctgaacttcaaagaacagggagaatttttggcggattgatcctggacatcaagcggaaggccccatacttttggagtgacttccgcgatgccttctcactgcagtgcctcgcatcttttttgtttctgtactgcgcctgcatgtcccccgtaatcactttcggcggtttactgggggaggccacagaaggaaggatctcggcaattgagtccctttttggtgctagtatgaccggcatcgcttattctttgtttggaggccagccacttacaattctgggcagcacaggccctgtattagtgttcgagaagatccttttcaaattctgcaaggagtacggtctgtcctatctaagtttgcgtgccagtatcggattatggactgccacgctgtgtataatactggttgctactgatgcatcaagtctggtttgctacattaccagatttactgaagaggccttcgcctctctcatttgtatcatcttcatctatgaggctcttgagaagctgtttgagctgtcagaagcttaccctattaatatgcacaatgacctggagctgcttacacaatactcttgtaactgcgtcgaaccccataacccctccaatggtacactgaaagagtggagagagagcaacattagtgccagcgacattatctgggaaaatctgaccgtttccgagtgtaaatcgctgcacggagagtatgtggggagggcgtgcggtcatgaccatccctacgttccggatgtcctgttttggagcgtgattctgtttttcagcaccgtaacactgtctgctactctcaagcagtttaaaacatctcgttactttccaactaaggtgcgatcaattgtgtctgattttgccgtcttcctgacaattttatgcatggtgctcattgactatgcaattggaatcccgtcccctaagctccaggtcccgagcgtttttaagcccacacgggacgatcggggttggtttgtcacgccactgggcccaaatccctggtggactgtaatcgcagcaataatccccgcattgctgtgcactatcctgatttttatggaccagcagattaccgctgtgattattaataggaaggagcataaactgaaaaaagggtgtggctaccaccttgatctgctgatggtggccgtgatgctcggcgtgtgctccattatgggactcccctggttcgtggccgctactgtactctcgatcactcacgtgaacagcttaaaattggagagtgaatgctctgccccaggtgagcaaccaaagttcctgggcatcagagagcagcgagtgactgggttgatgatattcatcctgatgggttcctcagtctttatgactagcatactgaagtttatcccaatgccagtcctgtacggagtgttcctatacatgggagcctcttctctcaaggggattcagttcttcgatcgaattaaactgttctggatgcctgctaaacaccagccagactttatctatctgagacacgttcccctgagaaaagttcatctcttcaccatcattcagatgagttgtctgggcctgctttggatcattaaggtcagccgtgccgctattgtgttccctatgatggtgttagcactggtctttgtcagaaaactcatggatcttctgttcaccaagcgcgagctctcgtggctggatgatctaatgccagaatcgaagaaaaagaagctcgaagatgcggagaaggaggaggagcagagtatgctggctatggaggatgaaggcaccgttcagttgcccctggagggccattacagggacgaccccagcgtgatcaatataagcgacgagatgagtaaaacagccctgtggaggaacctgctcatcaccgcagataatagcaaggataaggaaagtagctttccatcgaagtcttcgcccagctag

SEQ ID NO: 241634 - DNA, 3318 bp, synthetic construct
  misc_feature 1..3318: note = Description of Artificial Sequence: Synthetic coding sequence
  source 1..3318: mol_type = other DNA
atggagatcaaggaccagggagctcagatggaaccactcctgcctactcgaaacgatgaggaggccgtggtggacaggggaggtacccgttcaatccttaaaacacattttgagaaagaggatctcgagggtcatcggaccctgttcattggggtccacgtgccgcttgggggaagaaaaagccacagacgacaccggcacagaggtcacaagcatagaaagagagatcgcgagcgcgactcagggttagaggacggccgagagtccccctcctttgacactccctcacagagagtgcagttcattctgggcacagaggacgacgatgaagagcacataccccacgatttgtttacagagttggacgaaatctgctggagggaaggggaagacgcggaatggcgggaaactgcccgatggctcaaatttgaagaggatgtggaagacggaggcgaaaggtggtcgaagccatatgtagctactctttctctgcactccctgttcgaattgcgaagttgcatactgaacggaaccgttctgctcgacatgcacgcgaacaccttggaggaaattgcagatatggtcctcgaccagcaggtgagtagcggacagctcaatgaggacgtgcggcaccgagtgcacgaggccctgatgaaacaacaccatcaccaaaaccagaagaagctgactaatcgcattccaatcgtgaggtcctttgcagacatcggaaagaagcagtccgaacccaactctatggacaaaaatggacaggtcgtcagtcctcagagtgcccctgcctgcgtggagaataagaatgacgtgagtagggaaaatagtactgtggatttctctaaagtcgacctgcactttatgaaaaagatcccaccgggagcagaggcttccaatatactagtcggggagttagagtttcttgatcgcacagttgtcgctttcgtacggctttctcctgcagtcttattacagggactggcggaagtccccataccaactcgattcttgttcatcctgctgggaccattggggaaggggcagcagtatcacgaaataggaagaagcatcgctactctgatgaccgacgaggtctttcatgacgtcgcctataaagcaaaagatcggaacgatctggtgtccggcattgatgaattcctggaccaagtaaccgtgctgccccctggggagtgggacccatcaatcaggatcgagcccccaaagaacgtcccatctcaggagaagcgaaagattccagccgttcccaatggcactgccgcacacggtgaagccgaacctcacggtggtcattccggcccagagctgcagcggacgggacggatctttggcggactgatcttggacattaagcggaaagccccatacttttggtccgactttagagacgcatttagcctccaatgtctagcatctttcctctttctgtattgcgcctgcatgagccccgtcatcaccttcgggggacttctcggggaggctaccgagggtcggatctcagccattgagtcactctttggtgcctcaatgacggggatcgcctattcactgtttggaggacagcccctgaccattctcgggagcacaggccctgtcttggtcttcgagaaaattctgtttaaattttgtaaagaatacggcttaagttacttgtctctccgtgcctctattggactatggaccgcgacactgtgtatcatccttgtcgcaactgacgcttccagtctagtgtgctacattacaaggtttactgaggaagcttttgcctcactgatttgcatcatcttcatctacgaggccctagaaaagttatttgagctgtccgaagcctaccccatcaatatgcacaacgacctggagctactgacacagtacagctgtaactgcgtggaaccacacaacccctctaatggcaccctaaaagagtggagggaatccaatatcagcgcatctgacatcatctgggagaatttgacagtcagcgaatgcaagtctctgcacggcgaatacgtcggtagggcttgtggacacgaccacccttacgttccggatgtgctgttctggtcggtgattttattcttctctacggtcacattgagcgctacattaaagcagttcaaaaccagcaggtatttcccaacaaaggttagaagtatcgtctccgatttcgccgtctttttgaccattctgtgcatggtgttaatcgactacgcaattgggatcccttcacctaagctccaagttccctccgtgttcaagcctactcgggatgacagagggtggtttgtcacccctttaggccctaacccatggtggactgttattgccgcaatcatacctgcgcttctgtgcacaatccttatcttcatggaccagcagattaccgccgtgatcatcaaccgtaaagagcacaaactgaagaaggggtgcggctaccatttggatcttctgatggtggctgtgatgctgggtgtttgttccatcatgggtctgccctggttcgtagcagccacagtgttgagcataacgcacgtcaacagtttaaagctggaaagcgagtgttcagctcccggtgagcaacctaaattcttggggattcgcgagcagcgcgtgacaggcctaatgatattcatactgatgggaagttccgtgtttatgaccagcatcctgaaattcattccaatgccagtcctgtatggggtgtttctgtacatgggggcatcctcactgaaaggaatccagttctttgacagaatcaagctcttctggatgcctgccaagcatcaaccagattttatttacctgcggcacgtccccttgaggaaggtccatctgtttaccatcatccagatgagttgtttaggcctgttatggatcattaaggtatcgcgcgctgcaatcgtattcccaatgatggttctggcccttgtgtttgtgcgcaaacttatggaccttttatttacaaagcgggagctgtcctggcttgatgacctgatgcctgaatctaagaaaaagaaactggaggacgcggagaaggaagaagagcagtctatgctggccatggaggatgaaggcacagtgcaattgccactggagggacactaccgggatgacccttcagttatcaacatcagcgatgagatgagtaagactgccctgtggagaaacctccttataaccgccgacaacagtaaggacaaagagagtagctttcctagcaagtccatcgaatctcgcaaagaaaagaaggcggactctggcaaaggtgtggatcgagagacctgcctgtag

SEQ ID NO: 241635 - DNA, 1227 bp, synthetic construct
  misc_feature 1..1227: note = Description of Artificial Sequence: Synthetic coding sequence
  source 1..1227: mol_type = other DNA
atggagattaaggaccagggggcacaaatggagcctctgctccccactaggaatgatgaggaagctgtcgtcgacagaggaggaacacgctctatcctgaagacgcactttgagaaggaggacttagagggacataggaccttgttcatcggtgtgcacgtgcctctcggaggccgtaagtctcatcgtaggcataggcacaggggccataaacatcggaaaagggaccgcgagcgcgactccggcctggaggacgggagggagtctccctcatttgacacaccttctcagcgggtgcagttcattttgggtaccgaggacgacgacgaggaacacattccacacgatctgttcactgaattggatgaaatatgctggagggagggcgaggacgccgagtggagggagaccgcccgatggctgaaatttgaagaagatgttgaagacgggggagagaggtggagcaagccttatgtggccactctctctctacattctctgttcgaattgaggtcttgcattctgaacggaacagttctgctggacatgcacgccaataccctggaggagattgccgacatggtcctggaccagcaggtgtctagtgggcagctcaatgaggatgtccgtcacagggttcacgaggccttaatgaagcagcaccatcatcagaaccagaagaaactaaccaataggatcccgatcgtgcgatcgtttgcagatatcggtaaaaaacagtcagaacccaatagtatggataagaacgctggtcaagtggtcagcccccaaagcgccccagcgtgcgttgaaaacaagaacgatgtgtcgcgagagaatagcaccgtggacttcagcaaggggctggggggacagcaaaagggccacaccagtccatgcggcatgaagcagagacatgagaaaggacctccccaccagcaggaacgtgaggttgatttacacttcatgaagaagatcccacctggggcagaggcgtcaaatattctggtgggcgagctggagtttctcgatcgcaccgtggttgcgtttgttcgattgtctccagccgttctcttgcagggcctggcagaagtgccgatacccacgagatactttatgatgctgcctattaagttgaaaattgtcatgacttggtatcaggaactgatgagtttctggatacgactgcttttctcacttctcgaaaatgggatacaagcttttgaatag

SEQ ID NO: 241636 - DNA, 2676 bp, synthetic construct
  misc_feature 1..2676: note = Description of Artificial Sequence: Synthetic coding sequence
  source 1..2676: mol_type = other DNA
atgtctcaggtaggaggtagaggagatcgttgtacccaggaggtgcaggggctggtgcatggcgctggcgatttgtcggcatctcttgctgagaacagtcctaccatgtctcagaatggctattttgaagattccagttattataaatgtgatacagatgatacatttgaagccagagaagaaattttgggcgacgaagcctttgacaccgccaattctagtattgtttctggggagtccatcagattcttcgtcaatgtgaatctggaaatgcaagcaacaaataccgagaacgaagccaccagcggagggtgtgtccttctacacacatcccggaagtatcttaagctaaagaacttcaaggaagagatcagggcacaccgagacctcgatggttttctggcgcaggcctccattgtcctgaatgaaacagctacttctctggataacgtcttacgcacaatgctgcgccgattcgcacgggaccccgacaacaatgaacccaactgtaatctggacctattgatggcgatgctgttcacagacgctggggcacctatgcgtggaaaggtccatctgttgtcagacactattcagggtgtaactgccactgtgaccggagtcagataccagcagagttggttgtgcataatttgcaccatgaaggcgctgcagaagcgccacgtgtgtatcagccggctcgtcaggccacaaaattggggggagaactcctgtgaagttcgctttgtcattctggtgctggcccctcctaaaatgaagtccaccaaaacagcaatggaagtcgcacggacattcgcaactatgttttcggatattgccttccggcagaagctgctcgagacccgaacggaagaggaatttaaggaggcactcgtccaccagcgacaacttctgacgatggtctcacatggaccagtcgcgcctcgcaccaaggagcgatctactgtgtctctgccagctcatcggcatcccgagccccctaagtgtaaagactttgtgccttttggaaaagggataagagaagatattgccaggaggtttccattgtaccccctggactttacagacggcatcattggcaagaacaaagcagtcggcaaatatattaccacaactttattcctgtatttcgcctgtttgctgccaactatagctttcggaagtctcaacgacgaaaataccgacggagcgatcgacgttcagaaaaccatagccggtcaatctatcgggggactcctttacgcactattctccggccagccactcgtgatactgcttacaaccgcccctctagcgctgtacatccaagtcatacgcgtgatatgtgacgattacgaccttgatttcaacagtttttacgcatggactggtctgtggaattctttttttctcgcgctttatgcatttttcaacctgagtctggttatgtcactgttcaaacgctctaccgaggaaataatcgcgctatttatctcaattacgtttgtcctggatgcggtgaagggcaccgtgaagatcttttggaaatattattatgggcattatctggacgactaccacacaaaacgcacatcctccctcgtctcactgagcggattaggtgcttccctgaacgccagtctccatacagccctgaacgcatcctttctggccagcccaactgagctgccctccgccacacattctggacaagccaccgctgtgctgtctctactgattatgctgggcaccctttggttgggctatactctgtatcagttcaaaaagtctccttacctgcatccttgcgtccgagaaatcctgagcgactgtgctttgccgattgccgtgcttgctttcagcctgatttctagccacggattcagggaaatcgagatgtcaaagttccgctacaatccatccgagagcccattcgcaatggcacagatccagtccctcagtctgagggccgtaagcggcgcaatggggctgggctttctgctaagcatgctgttctttatcgaacagaatctcgtcgccgcacttgtcaacgcgccagagaacaggctggttaaaggcaccgcataccattgggatctcctgctcttggcgattattaacacagggctgtctctatttggattgccgtggattcacgctgcatacccacatagcccactccatgtacgggctctcgcgttggtggaggagcgggttgagaacggccatatctacgataccatcgtgaacgtcaaagagacccgcttaactagtttaggcgctagcgttctggtgggcctatcactgcttcttctgcccgtccctctgcagtggattccaaaacctgtgctgtatggtttgttcctctacattgctctcacatcactcgacggcaaccagctggtacagcgtgtggcactactacttaaggagcaaaccgcttatcctccaacacattacatacgcagagtcccacaaagaaaaatacactactttacagggttacaggttttacagctattacttttgtgtgcatttggcatgagctcactgccatatatgaagatgatctttcccctgatcatgatcgccatgatcccaattcggtatatacttctcccgaggattattgaggccaagtacttggacgtgatggatgccgagcatcgtccttag

SEQ ID NO: 241637 - DNA, 2757 bp, synthetic construct
  misc_feature 1..2757: note = Description of Artificial Sequence: Synthetic coding sequence
  source 1..2757: mol_type = other DNA
atgggtgtctacgggccacaggatagatccgagtcggaaaaaagagacgtgcagcgtgatcctccaccatggcaccctcgacgtgagggagagagacctgctcgtgctaggagcctccccctggctgctgcagggcaggggttcttgaggaagacttggattagcgaacatgagaacagccccactatgagtcagaatggatattttgaggactcttcttactacaaatgtgacactgacgatacctttgaggctagggaggaaattctgggtgacgaagccttcgataccgcaaattccagtattgtctccggcgagagcatccggttcttcgtcaatgtcaacctagagatgcaggcgacaaacaccgagaatgaggcgacgtccggcggttgcgtcctcttgcatacgagcagaaaatacctgaaactcaaaaactttaaggaagagatccgcgctcaccgcgaccttgacgggttcctcgcccaggcctctatcgtactcaacgaaacagcaacatctttggacaatgtcttacgcactatgctgaggcggttcgctcgcgatccggataataatgaaccgaactgtaatctggatctgctaatggccatgctcttcactgacgcgggtgccccaatgagaggcaaggtgcaccttctgagcgacacaatccagggagtcactgcaactgtcaccggagtgcggtatcagcaaagctggttgtgcatcatatgtaccatgaaggcactgcaaaaaagacatgtatgtatctctagattggtgcggcctcagaactggggggagaatagctgcgaggtgcgcttcgtcatcctcgttctcgcacccccaaagatgaagagcaccaagacagccatggaggtggcccgaaccttcgccaccatgttctcagacatagccttccggcagaaacttttggagacccgaactgaggaagagttcaaagaggcgctggtacatcagagacagctgcttaccatggtctcccatggtcctgtagctcctcgcacaaaagagaggtccaccgtcagcctgcccgcacatagacaccctgaaccacccaagtgcaaggacttcgtgcctttcggaaagggtatacgggaggatatcgcaagaagatttcccttgtatcccctggatttcacagatggcataatcggtaaaaacaaagcagttgggaagtatatcacaacgactctgtttctgtattttgcctgcttactgcccacgatagcgtttggatcactgaacgatgagaacaccgacggagccattgacgtgcagaagacaatagccggacaatctattgggggactgctctacgctctcttttcaggccagcctctggtcatacttctcacgaccgcacctctcgcgctttacatccaggtgattcgtgtgatatgtgacgactacgaccttgacttcaacagcttctatgcatggacaggactgtggaactctttctttttggctttgtacgctttctttaacttgagcctggtcatgtctttgtttaaaaggtctaccgaggagatcatcgccctctttatatccattacctttgtgctggacgccgtgaaggggacagtgaagatcttttggaagtattactacggacattatctggatgattatcacactaagcggacgtctagtctggtgagtctctctggcctaggagcctcgctgaacgcgagtctccacactgccctaaacgcctcctttctggcctcccccacagagctcccaagcgcgacccactctggacaggccactgcggtgctgtcgctcctgataatgttaggtaccctctggcttgggtacacactctaccagttcaagaaatcgccataccttcatccatgtgtacgcgaaatcttgtctgattgtgccctccccattgctgttctggctttctccctcatctcttcccacggttttcgggaaatcgagatgagcaagttcaggtataacccctctgaatcgccttttgctatggcccagatccagagtctgtccttgagggctgtctctggtgcgatgggcctgggatttctgctgtcaatgctcttttttattgagcagaacctggtggctgctctggtgaacgctccagagaacaggctggtgaaaggaacggcatatcactgggatctcctcctcttggccatcatcaacacaggcctctcactgttcggtcttccttggatccacgccgcttacccgcactcccccttgcacgtacgggctctagccctcgtcgaagagcgagtggagaatggacacatttatgataccattgtgaatgtcaaggagaccaggctgaccagccttggggctagtgtactggttggtctgtctctgctgctactgcctgtaccactgcagtggattccaaaacccgtgctgtacggcctgtttctgtacattgccctaacatcactggacggaaatcagttagtccaacgtgtggcacttctcctgaaagagcagaccgcttacccacccacccattacattcgcagagtcccacagaggaagatacactatttcaccggcctgcaagtgctccagctgctcctcctttgcgcatttggcatgtcttcactcccctacatgaagatgatattccctcttatcatgattgccatgatacccatcaggtatattttacttcctagaattattgaggccaagtatctggacgtgatggacgctgagcatcgcccatag

SEQ ID NO: 241638 - DNA, 951 bp, synthetic construct
  misc_feature 1..951: note = Description of Artificial Sequence: Synthetic coding sequence
  source 1..951: mol_type = other DNA
atggcagccgctacccgcagggtgttccacttacagccttgtgaaaatagccctaccatgtcccaaaatggctattttgaagacagttcctactacaaatgcgataccgacgacacctttgaagcacgagaagaaatcctcggggacgaagctttcgacaccgccaatagcagcatcgtctcaggggagagtattcgtttttttgttaacgtcaatttagagatgcaggctactaacaccgagaatgaggcaacatctgggggatgcgttctgctgcacacgtcaaggaaataccttaagctgaagaatttcaaggaggagattcgggctcaccgcgatttggatggcttcctcgcccaggcctcaattgtactgaatgagaccgccacctccctggataatgtcctgcgtacaatgcttagaagattcgcgagagacccagacaacaatgaaccgaattgcaatctggatctgcttatggctatgcttttcactgacgctggcgctcctatgaggggaaaggtccatctgctttccgatactatccagggagtaaccgcaacggtcaccggggtgcggtaccaacagtcctggttgtgcattatctgcacaatgaaggcgctccagaagcggcacgtttgtatttctcggttggtgcggcctcagaattggggcgaaaactcttgcgaggtgcggttcgttatcttagttctggcacccccaaagatgaagagtacaaagacagcgatggaagtggcaagaacattcgcgacaatgttttccgacatagcattccgccaaaagttgctggaaactaggactgaagaagagttcaaagaggcactggttcaccagcggcagctgctgaccatggtcagccatggtcctgtcgcacccagaaccaaggaacgatcaaccgtgtccctccccgctcacagacatcccgagtag

SEQ ID NO: 241639 - DNA, 2628 bp, synthetic construct
  misc_feature 1..2628: note = Description of Artificial Sequence: Synthetic coding sequence
  source 1..2628: mol_type = other DNA
atggcagctgcaaccaggcgggtcttccacttgcaaccgtgcgagaactcccctaccatgtcccagaatggatacttcgaggatagctcttactataaatgtgacacggacgatacttttgaggcacgggaggagatcctaggggacgaggcgttcgatactgccaactccagcatagtcagtggagagtcgattcgattcttcgtgaatgtcaatttagaaatgcaggcaactaacacggaaaatgaggctacaagtgggggatgcgttctcctccatactagtcgtaagtacctcaagttaaaaaatttcaaggaggaaatccgggcacaccgggacctcgatggattcttggcgcaagccagcatagtcctcaacgagacagcaactagtcttgacaacgtgctgagaactatgcttcgcagattcgctcgagatccagacaacaatgagccaaactgcaacctggacctactcatggctatgttatttaccgatgccggtgcacctatgaggggtaaggtgcatctattgtccgacaccatccagggagttacagctacggtgaccggagtgagatatcagcagagctggctgtgtataatttgtacgatgaaggccctacaaaaaagacatgtgtgcattagccgcttggtacgaccacagaactggggggaaaactcttgcgaagtacggttcgttatccttgttctggcgcctccaaagatgaagagcaccaagacggcgatggaggtggccagaaccttcgcaaccatgtttagcgatattgcctttaggcaaaagctcctggagacaagaacagaggaggagtttaaagaggcattagtacaccagcgacaactgctgactatggtgagccacggacccgtcgccccacgcaccaaagaaaggtctacagttagcctgcccgctcatcgtcatccagagcctcctaagtgcaaagattttgtgccattcggcaagggaatccgcgaggatatagcacggcgtttccctctctacccgctcgactttacagacggaatcattggcaagaataaagctgtcggaaaatacatcacaaccacgctattcctttatttcgcgtgccttctccccaccattgcttttggctcccttaacgacgagaacaccgatggagccatcgacgttcagaagaccatcgctgggcagtctattgggggtctgctgtatgccctattcagtggacagcctcttgtcattcttctaacgaccgcccctctggctttgtacattcaagtgataagggttatctgtgacgactacgaccttgatttcaactctttttatgcctggaccggtctctggaatagcttttttctagcgctgtatgccttcttcaacttatccctggtaatgtccctatttaagcggtccacagaggagataatcgccctcttcattagtattactttcgtcctcgatgccgtgaagggaacagtcaaaatattctggaaatattattacggccattacctggatgattatcacactaaaaggacaagctccctggtctcattaagtggactgggtgccagcctgaacgcaagcctgcatacggctctgaacgccagttttctggccagtccgacagaacttccctcggccacgcacagtgggcaagcaaccgcagtgttgtctcttctcattatgttgggtactctctggctcggatacacactgtatcagtttaaaaagtccccttatttgcacccatgcgttcgagaaatcttgagtgactgcgctctgccaattgcagtgttggcgttctcacttatctcttcccatggcttccgggagatcgaaatgtctaagtttaggtataatccaagcgaaagcccttttgcaatggctcagattcagagcctgagcctccgcgcagtatctggggctatggggctcggtttcctgctgtcaatgctcttctttattgagcagaatctggtggccgctcttgtaaatgcccctgaaaacagattggtgaaaggcactgcctatcattgggacttgctgctgctagccatcataaatactgggctttctctgtttggccttccatggattcacgccgcatacccacatagtcccctgcatgtacgagctctcgccctggtcgaagagagagtggagaacggacatatctacgacactatcgttaatgtgaaggagaccaggttaacgagtctcggagcatccgtcctcgtcggcctctccttacttctgttgccagtccctctgcagtggattccgaagccggttctatacggcctgtttctatacattgccctcacaagtcttgacggcaaccaattggttcagagagttgctctgctgctgaaagagcagacagcctatccacctactcactatatccggagggtgccgcagcggaagattcattatttcaccgggctgcaggtcttgcagctgcttctgctgtgcgctttcggcatgagcagcttgccatacatgaagatgatttttcccctgatcatgattgccatgatcccaattagatacatcctgctaccccgtattatcgaggcaaagtacctggatgtaatggatgcggagcacaggccctag

SEQ ID NO: 241640 - DNA, 1113 bp, synthetic construct
  misc_feature 1..1113: note = Description of Artificial Sequence: Synthetic coding sequence
  source 1..1113: mol_type = other DNA
atgaccctggcgtccaggctatcgactgcagccaacacgggtcagatagacgatccccaagaacaacaccgagttatctcttctaacctggcactaatacaggtgcaagccactgtagtcggcctccttgcggctgtagccgctttactgctgggcgtagttagccgagaggaggtggacgtggctaaagtcgaattgctctgtgcaagttcagtgctcaccgctttcctggctgctttcgccctgggggtgctaatggtgtgcattgtgatcggcgctcggaaactgggggttaatcctgacaacattgctaccccaattgctgcaagccttggtgacctcattaccttgtccattctggccctggtgtcctccttcttctaccggcataaagatagcaggtacttgactcccctcgtatgcctttcgtttgccgctctgacacccgtttgggtgttgatcgccaaacaatcacctcctattgtgaagatccttaagtttgggtggtttccgatcattctagccatggtcatatcatcctttggcggactgatcctgtccaagaccgttagcaaacagcagtacaaaggaatggcaatctttacgccagtaatatgcggagttggtggaaatctggtcgcaattcagacatctcgaataagcacatatctccacatgtggtcggccccaggggtgctgccactgcagatgaaaaaattctggccaaatccgtgttcaaccttttgcacctccgagataaattctatgagcgcacgcgtgctgctgctattggtggtgccagggcacctgatattcttctatatcatctacttggtcgaaggccagtctgttatcaattcccagactttcgtggtcctataccttcttgccggactgattcaggtgactatcctgctttaccttgctgaggtgatggtgaggctcacctggcaccaggcactagaccccgacaatcactgcatcccttacctgactggccttggggacttgctgggcacaggccttctggccctatgtttcttcacggattggttgttgaagagcaaggctgaactaggcggaatctctgagcttgcgtctggcccaccttag

SEQ ID NO: 241641 - DNA, 1542 bp, synthetic construct
  misc_feature 1..1542: note = Description of Artificial Sequence: Synthetic coding sequence
  source 1..1542: mol_type = other DNA
atgtccagtaagcctgagcccaaggacgtgcaccagttaaatggtactggcccaagcgccagtccgtgttcctcagatggccctggccgtgaaccccttgcaggaacatccgaatttttaggtccagacggagcaggcgtggaagtcgttattgaatctcgagccaacgccaaaggagttcgcgaggaggatgcgctactggaaaacggcagtcagtcaaacgagagcgacgacgtgagcacggatcgcggtcccgcacccccttccccactgaaggagacctctttcagtatcggcctgcaggttctgttcccatttctcctggccggatttgggaccgtggccgcaggtatggtgttagacattgtgcagcactgggaggtatttcaaaaggtaactgaagtgtttatcctagttccagccctgctcggactgaaaggcaacctagagatgaccctggcttcccggctgagtactgccgctaatatcggccacatggataccccgaaagaactatggagaatgatcaccggaaatatggctctgatacaagtgcaggcgacagtcgtcggatttctggcatctatcgctgctgtggtcttcggctggataccagatggacatttttctattccacacgcattcctgttatgcgcctctagcgttgcaacagccttcattgcatccctggtgttgggcatgattatgatcggagttatcatagggtccagaaaaattgggataaatcccgataacgtggcgacgcccatcgctgccagcttaggagatctcatcaccttagccctccttagtggtatctcttggggattatacctggaacttaaccactggaggtacatttatccccttgtctgtgccttcttcgtggccctgctgccagtgtgggtggtcctggccagaaggtcacctgctactcgtgaagttctgtacagtggctgggaacccgtgattatcgcaatggctatctcgagcgtgggaggactgatcctggacaagactgtttccgatcccaattttgctggtatggccgtcttcacccccgtaataaacggagtgggaggcaacctggtcgccgtacaagcatctaggattagcactttcttacacatgaacggaatgcccggtgaaaacagtgagcaggccccacgcagatgtccaagtccttgtaccaccttctttagtcctgacgtcaattctagatctgcacgcgtgctttttctgcttgtagtcccgggtcatctggtattcctatacactataagctgcatgcaaggaggccatacaaccctgaccttaatcttcattattttctatatgaccgccgctcttttgcaggtgcttatcttgctttatattgccgattggatggtacattggatgtggggtcggggactagacccagacaatttttctattccctatctcactgcattaggggacctgctgggcactgggctgctagccctgagctttcacgtactgtggcttatcggggatcgggacactgacgttggcgattag

SEQ ID NO: 241642 - DNA, 1722 bp, synthetic construct
  misc_feature 1..1722: note = Description of Artificial Sequence: Synthetic coding sequence
  source 1..1722: mol_type = other DNA
atgactaattccaaaggtcgttcaattaccgacaaaacaagcggcggtccgagctccgggggtggatttgtagattggactctccgactcaataccatccagtcagataagtttctgaaccttttgctgtccatggtgccagtcatttatcagaagaatcaggaagacagacataagaaagcgaatggcatctggcaggatgggttatccactgccgtgcagaccttctctaatcgatctgagcagcacatggaataccattccttctctgagcagtcctttcacgccaataatggccatgcctcctcttcttgctcacagaagtacgatgattacgcaaactataattactgtgacgggcgtgaaaccagcgagacaactgcgatgctgcaagatgaggatatttcttccgacggtgatgaggatgctatcgtcgaggtgactccgaaactacccaaggaatccagtggcattatggccctgcaaattctcgttcctttcttgctggccggttttggtaccgtgtctgcgggaatggttctcgacattgtccaacactgggaggtgtttaggaaagttacggaggtgtttattctggtcccggcactgcttggcctcaagggcaatctggagatgacattggcctccagactgtccaccgctgtgaatattgggaagatggattcaccaattgagaaatggaatctgataattgggaacctcgctctgaaacaggtccaggctactgtggtgggatttctggctgctgttgcagctattattctggggtggattccggagggtaaatattatctggaccactctatcctcctgtgttctagtagcgtggccacggcctttatagcctccctcctgcaggggattatcatggtcggcgtcatagttggctccaagaagaccgggatcaaccctgataatgtggccacacctattgccgcaagctttggagatttgatcacattggcaattcttgcctggattagtcaggggttgtattcctgcctggagacctactactacatctctccactggtgggtgtattcttcctagctctcacccctatatggatcatcattgccgctaaacatcctgccactaggactgtgctgcacagcggatgggaacccgtgatcaccgccatggttatcagtagcatcggcggattgattttggataccacagtatcagaccctaacctggtggggatcgttgtgtacacccccgtcattaatggtatcggcggtaacctggtcgccattcaggctagccgcatctcaacttatctgcatctgcattcaattccgggagagctgcccgacgagcctaaggggtgctactaccctttccgcacgttctttgggcctggcgtgaataacaaatcagcccaagtgctgctcctgctggtaattccagggcacctcatctttctgtacactattcacctgatgaagagtggtcacacgtccctaaccataatcttcatcgtcgtgtatctgtttggagccgttctccaggtgttcacactgctgtggatagccgactggatggttcaccatttctggcgtaaaggcaaggatcccgatagtttcagcataccctatctcactgctctgggcgacttactgggcaccgcactcctggcactgtcatttcactttctttggctcattggagacagggatggcgatgtaggcgactag

SEQ ID NO: 241643 - DNA, 369 bp, synthetic construct
  misc_feature 1..369: note = Description of Artificial Sequence: Synthetic coding sequence
  source 1..369: mol_type = other DNA
atgaccaattctaagggacgtagcataactgacaaaacttcaggaggcccttctagcgggggaggatttgtggactggactctgcggttgaataccattcagagtgataaatttttaaacttgttactttctatggttcccgtgatctatcagaaaaaccaagaggaccgacataaaaaagcaaacgggatatggcaggatggtttaagcaccgccgtgcaaacattttctaacagatcagaacagcatatggaataccacagcttcagcgagcagagtttccatgccaacaacggacacgcctcatccagttgctctcagaagtacgacgattacgccaactataattattgtgatggccgagaatag

SEQ ID NO: 241644 - DNA, 432 bp, synthetic construct
  misc_feature 1..432: note = Description of Artificial Sequence: Synthetic coding sequence
  source 1..432: mol_type = other DNA
atgaccaacagcaagggccgatccatcaccgacaaaacctctgggggtccaagttccgggggaggatttgtggactggaccctccgacttaacactattcaaagcgacaagtttttgaatttgctactctccatggtccctgtcatctatcagaagaaccaggaagacagacacaagaaggccaacggtatttggcaggacgggctttccaccgccgtgcagacgttttctaatcgctctgagcaacacatggaatatcacagtttctccgaacaaagttttcacgctaataacgggcacgcttcatcttcctgcagccagaagtatgacgactacgcgaactacaattactgtgacggccgagaaacatcagaaacaacagctatgctgcaggacgaggatatctcctctgatggggatgaagacgcatag

SEQ ID NO: 241645 - DNA, 141 bp, synthetic construct
  misc_feature 1..141: note = Description of Artificial Sequence: Synthetic coding sequence
  source 1..141: mol_type = other DNA
atgactaacagcaaagggaggagcattacggataagaccagcggcggaccctcttccggcggagggttcgtagactggaccttacgattgaataccatacaatcagacaagtttctgaacttattgttgtctatggtgtag

SEQ ID NO: 241646 - DNA, 219 bp, synthetic construct
  misc_feature 1..219: note = Description of Artificial Sequence: Synthetic coding sequence
  source 1..219: mol_type = other DNA
atgactaatagcaaaggaaggagcattacagacaagacttcaggcggaccatccagcggaggcggattcgtcgactggaccctgaggctgaacactatacagagcgacaagttcctcaatttactcctgagcatggttcctgttatctatcagaaaaatcaagaagatcgccataaaaaagctaatgggatctggcaggacggtctttcaaccgcctag

SEQ ID NO: 241647 - DNA, 39 bp, synthetic construct
  misc_feature 1..39: note = Description of Artificial Sequence: Synthetic coding sequence
  source 1..39: mol_type = other DNA
atgacaaactcaaagggtcggtctattacagataagtag

SEQ ID NO: 241648 - DNA, 231 bp, synthetic construct
  misc_feature 1..231: note = Description of Artificial Sequence: Synthetic coding sequence
  source 1..231: mol_type = other DNA
atgaccaacagtaaaggccgtagtatcaccgacaaaaccagtgggggaccatcttcaggaggtgggtttgtggattggacgctcaggctcaacaccatccagtcagataaattcttaaacctgcttctttcaatggttcccgtgatctaccaaaagaaccaggaagaccgacataaaaaggcaaacggcatctggcaggacggcctgtctactgccgtgcagacattttag

SEQ ID NO: 241649 - DNA, 285 bp, synthetic construct
  misc_feature 1..285: note = Description of Artificial Sequence: Synthetic coding sequence
  source 1..285: mol_type = other DNA
atgaccaatagcaagggacgctccatcaccgacaaaacttccggcggtccctccagcggtggtggcttcgtagactggacgctaagactgaacacaatccagagtgacaaattcctgaacctgctcttatcgatggtccccgtaatttatcaaaaaaatcaggaagaccgacacaagaaggctaacggcatttggcaggacggtctttctaccgcagttcagacattctctaacagaagcgaacagcatatggagtaccattctttctctgaacaaagcttctag

SEQ ID NO: 241650 - DNA, 1524 bp, synthetic construct
  misc_feature 1..1524: note = Description of Artificial Sequence: Synthetic coding sequence
  source 1..1524: mol_type = other DNA
atggacggtactgaaaccaggcagcggcgtctggactcctgtgggaaacccggtgaactgggtctcccccaccccctgtctacagggggactacccgtcgcatcagaagacggcgctttgcgagccccagaaagtcaatcggttactccaaaaccactcgagaccgagccatcgcgcgagaccacgtggtccattggcttgcaagtgacggtgccttttatgtttgccggactcggactgtcttgggccggtatgcttctagattacttccaacactggccggttttcgtggaggtgaaggaccttctgactttagtcccgccacttgtgggtctgaagggtaaccttgagatgacactggcatcacgactttctaccgccgcaaacacaggccagatcgatgatcctcaggagcagcatagagtcattagctcaaatttggctcttatccaagtgcaagctacagtcgttggattactagccgcagtcgccgcactcttgctgggggtggtgagcagagaggaggtggatgtggccaaggttgagcttctgtgcgcgtcttctgtgctaactgcctttttggccgcatttgccctgggtgtattaatggtatgcatagtgattggcgctagaaagcttggcgtgaatccggataacatcgcaacgccaatcgctgcgtcactaggagatctgattacactttctatcctggccttagtgtccagcttcttctaccgacacaaagatagtagataccttactccattagtgtgtctctcattcgctgcactgactccagtgtgggtgttgatcgccaaacagagccctccgatagttaagattttgaaatttggctggttcccgatcatcttggccatggtgatttcctcttttgggggactcatcctttcaaagaccgtcagtaaacagcagtacaagggaatggcaatcttcacacctgtcatatgcggcgtgggtgggaacctcgtcgctattcagaccagtcgtatctcaacatatctccacatgtggtctgctccaggagtgctgcctctgcagatgaagaagttctggcctaacccttgttcaaccttttgcacatccgagattaattccatgagcgctcgggttctccttctgcttgtggtgcccggacacctcatttttttttacatcatctacctagtggagggccagtccgtgataaattctcaaacgttcgtggttctgtacctccttgcaggattaatccaggtgactatactgctctacctggcggaagtgatggttcggctcacatggcaccaggcactggacccggacaaccattgcatcccttacctgactggactaggcgacctgctgggctctagtagcgtggggcatactgccgctgtgccccgtagatgtactgcgtcacctggctggggtttaattcagccattcatttgcacccagcatctgatagtaagcttactgtccttttattttcctttttgtctgctggccaagacttcaatctag

SEQ ID NO: 241651 - DNA, 1416 bp, synthetic construct
  misc_feature 1..1416: note = Description of Artificial Sequence: Synthetic coding sequence
  source 1..1416: mol_type = other DNA
atggatggaacggaaacaaggcagcgaagactcgatagttgcggcaagcctggagagttgggactgccccaccccctttccacaggtggcttacctgtggccagtgaagatggcgctcttagagcacccgagagtcagagtgttacgccaaagccgttggaaactgagccctcccgcgagaccacctggtcaatcggactgcaagtcactgtgccttttatgttcgccggtctcgggttgtcttgggcgggtatgttacttgattactttcaggcgaatactgggcagatcgacgatcctcaagagcaacacagagttattagttccaacctcgctttgattcaggtgcaagccacggtggtggggcttctggccgctgtggcagcactcttgctaggcgtggtatcccgggaggaagtcgacgtcgcaaaagtggagcttctgtgcgcctccagtgtgctgactgctttcctcgcagcattcgcccttggggtgttaatggtatgcattgtaatcggggctcgcaagctaggagtgaatcctgacaatatcgctacaccaattgccgcttcacttggagatctgataaccttgtccatattagcccttgtgtcatctttcttctatcgccacaaagatagtcgctatttaactcctctggtgtgccttagttttgcagccctaacccccgtgtgggtgctcattgccaagcagagccctccgatcgtaaagatcctgaagttcggatggttccccattattctggcaatggttatctcttcattcggcggactgatcctgtccaagactgttagcaaacagcaatataagggtatggccattttcactccagtaatctgtggcgtgggcggaaatctggtggccattcagacctctcggatttcaacctatctgcatatgtggtccgcccctggagttttgcccctgcagatgaaaaagttctggcctaatccgtgctccaccttttgcacatccgaaatcaatagcatgagtgcacgtgtattactcctcctggtggtgcctgggcacctcattttcttttatataatatacctcgtggagggacagtcggtgattaattcccaaacattcgtggtcttgtacctactggccggactgatccaggtgaccattttgctctacttggccgaggtcatggtgcgtctgacatggcaccaggccctggatcctgataaccattgcataccttatctgacaggactgggcgatttgctggggagctcatcagtggggcatactgccgcagtgcccaggaggtgtacggccagccccggttggggactgattcagccctttatatgtacccagcatctaatcgtttccttgctttctttttatttccctttttgtctactcgcaaaaaccagcatctag

SEQ ID NO: 241652 - DNA, 1464 bp, synthetic construct
  misc_feature 1..1464: note = Description of Artificial Sequence: Synthetic coding sequence
  source 1..1464: mol_type = other DNA
atggatggtaccgaaacaaggcaaagaagactggattcctgcgggaagcccggtgagttaggactccctcatcccctctccaccgggggactgcccgttgcatcagaggacggggctctgcgggcaccggagagccaaagcgttaccccaaagccccttgaaacagagccatccagagagactacttggagcattgggctccaggtgacagtgccgtttatgttcgcgggtctcggcctgtcttgggccggtatgttgctggattattttcagcattggcccgtgtttgtcgaagtgaaggacctcctcacactggtgccccctttggtgggactgaagggaaacctggagatgactctggcaagtcggctgtcaactgcagcgaacacaggccaaatcgacgatccccaggagcagcacagggtcatctcctcaaacctcgcgctcattcaggtccaagcaactgtggttgggctcctcgccgcagtggcagctttattacttggagtggtaagcagggaggaggtcgatgtggctaaagttgagctgctgtgtgcatctagcgtcctgaccgcatttttggccgcattcgcactgggtgttctgatggtatgcatcgtgatcggggcacgtaagctgggggtgaaccctgacaatattgccacaccgattgcggctagtttaggagatctgatcaccttgtcaatattagctctggtctctagttttttttaccgccacaaagactcccggtacctgactcccctggtgtgtctgagctttgctgccctgactcccgtgtgggttcttatagctaagcagagtcctcccattgtcaaaattttgaagttcgggtggttccctattattctggccatggtcattagtagctttggcggattgatcctatcaaaaaccgtgtcgaagcaacaatataaagggatggcgatctttacccccgtgatatgtggcgtaggaggcaacctagtcgccattcagacgagtcggattagcacttatctgcacatgtggagcgcccctggtgttcttccacttcagatgaagaaattctggcccaatccctgtagcaccttctgtacgagtgagatcaactcaatgtccgcccgagtgcttctgctcctggtagttcctggacatctgatcttcttttacatcatataccttgtggagggtcagtcagtcataaatagtcagacttttgtggtactatacctcctggccggattgatacaggtgacgattctgctttatctggccgaagttatggtgaggctcacctggcatcaagcactggacccagataatcattgtataccctacctcaccggtttgggcgacttgctcgggactggccttttagcactgtgtttctttactgactggctcctcaagagcaaagccgagctgggtggaattagcgaacttgctagtggtcccccatag

SEQ ID NO: 241653 - DNA, 1386 bp, synthetic construct
  misc_feature 1..1386: note = Description of Artificial Sequence: Synthetic coding sequence
  source 1..1386: mol_type = other DNA
atggtggtaacccagttgaatttagaattctgctttcaggggaaaaaattacggggatttagctgcgaactcacccgatctccacacggagtgttacctgaatcttttttcacaattatgtgtcaggttgtggtgcccatcctgctgtccgggctgtgcatgatgaccgccggactggtcatgaatacaatccaacattggcctgtgtttgtcgaagttaaggaccttctgaccctagtaccacctttagtgggactgaagggaaacctcgagatgacactggcttccagactgagtacagccgcaaataccggacagattgatgatccccaggaacagcatcgggttatttcctccaacttagccctcatccaggtccaggccaccgtggtaggcctgctggccgctgtggccgcactgttactgggagtcgtctctagagaggaagttgatgtggccaaggtagaacttctgtgcgcttcttccgtgcttaccgccttccttgcggcttttgcactgggcgtcctgatggtatgtatcgtcatcggcgctcgcaagctgggggtgaatccggataacattgccacccccatagcagccagccttggggatctcatcacattatccatcttagcattggtcagcagttttttttacagacacaaggattccaggtacctgaccccactagtctgtttgtcctttgcagcactgacaccagtctgggttttaattgcaaaacagtccccacctattgttaagatcttaaagtttggatggtttcccataatcctggccatggtgatttcttctttcggcggtttgattttaagcaagaccgtcagcaaacaacagtataaggggatggctatatttacacccgtcatctgtggggtgggtggcaacttagtcgccattcagacttcccgcatcagcacctacctacacatgtggagtgccccaggcgtcctgcctctccagatgaagaagttctggcccaatccttgctccacattctgcacctcggaaatcaattcaatgtcagcccgagttctcctgttgctggtggtgcctgggcacctgattttcttttacattatttacctcgtggagggccagtccgttattaactctcaaactttcgtggtgctgtatttacttgcgggtctaattcaagtgactattttactgtaccttgccgaagtcatggtgcgcctaacctggcatcaggcattggatcctgataatcattgcatcccttacctgaccggattgggagatctgttagggacaggccttctcgctctgtgctttttcaccgattggttgctgaaaagtaaggcagagctgggagggatatcggagctggcaagtggtccgccttag

SEQ ID NO: 241654 - DNA, 1437 bp, synthetic construct
  misc_feature 1..1437: note = Description of Artificial Sequence: Synthetic coding sequence
  source 1..1437: mol_type = other DNA
atggatggtaccgaaacccgtcagcgcagactcgattcctgcggcaagcctggcgagctgggactgcctcaccccctgtccaccggcggtctgcctgtggcaagtgaggacggagctctgcgggcacctgaatcacagtcagttacccctaagccgcttgagaccgagccatcaagggttacagtgccgtttatgtttgccggtttagggctctcctgggcaggcatgctcctcgattacttccagcattggcccgtttttgtggaagtgaaagacctgctcactttagtaccaccgctagtgggattgaagggcaatctggaaatgaccctcgctagtaggctgtctacggctgctaacacaggtcaaatcgatgatcctcaggagcagcacagggtcatttcttccaacctcgcgttaattcaggtccaggccaccgtggtcgggctgttggcggcagtggcggctctgttgctaggggtggtcagccgggaagaggtagatgtggccaaggtagaactgctttgcgcttcctccgtgctaacagctttcctggctgcctttgcgctcggcgtgctgatggtttgtatcgtgatcggcgctcgcaagctgggcgttaaccccgataatatagccactcccattgcagcatcgcttggcgatctgattaccctgagtatcctggctctagtgtcttcgtttttttatcgtcataaggactcccgctatttaacccctctggtctgtctctccttcgccgctctgacacctgtttgggtgctgattgctaaacaatctccgcctatagtcaagatcctgaaattcggatggttcccaattatactggcaatggtgatctctagcttcggcggtctgatactatccaaaacagtctcaaaacagcagtacaagggtatggccatcttcacccccgtcatctgcggagtcggcggaaacttggtggctattcagacgtctagaataagcacctatctgcatatgtggagtgctcctggagtgctgccactacagatgaaaaagttctggcctaatccgtgtagcacattctgcacttctgaaatcaattccatgagtgcgagggtcctcctgttgctggttgtccccggacatctgatctttttctatattatctatttggtggagggccagtcagtgatcaattcacaaacttttgttgtgctctatctattagcaggcctcattcaggtgactattctgctgtacctggctgaggtcatggtccgactgacatggcatcaagcactcgatcctgataaccactgcattccctatcttacaggcctgggagatttattagggactgggctgctggccttgtgtttcttcacagactggctccttaaatctaaagccgaactcggcggaatctcggaacttgcttctggaccgccatag

SEQ ID NO: 241655 - DNA, 459 bp, synthetic construct
  misc_feature 1..459: note = Description of Artificial Sequence: Synthetic coding sequence
  source 1..459: mol_type = other DNA
atggacgggacagagacccggcagagacggctggacagctgtggcaaacctggcgagctaggccttccacatcctctgagcaccggtgggcttccagtcgctagcgaagacggcgctttgcgtgcacccgagtcccagagtgtaactcctaaacccttagagactgaaccttcccgcgagaccacctggagcatcggtcttcaggtaactgttccttttatgtttgcaggcctggggctcagttgggccggaatgctgttagattacttccagcattggccagtgttcgttgaggtgaaggacctgctgacactggtgccacctctcgtgggcctgaagggaaatctggaaatgaccctggcctccagactgtccacggccgctaatacgggccagattgacgacccccaggaacaacacagagtgatcagctcgaatctggctttgatccaggtgtag

SEQ ID NO: 241656 - DNA, 459 bp, synthetic construct
  misc_feature 1..459: note = Description of Artificial Sequence: Synthetic coding sequence
  source 1..459: mol_type = other DNA
atggacggaaccgaaactcgtcaaaggcgtttggatagctgcggcaaaccaggcgagctcgggttgccccatcccctatcgactggaggtcttccagtcgcttctgaggacggagccttgcgggctccagaaagtcagtccgtgacaccaaaacctctggaaacagagccctcacgcgagactacatggtcaatagggctgcaagtgacagtgccgtttatgttcgcaggtctcggcctctcttgggccggaatgctgcttgactactttcagcactggcctgtttttgtggaggtgaaggatctcttgaccctagttccgccacttgtgggactgaaagggaaccttgagatgaccctcgcgtcccggctgagcacagccgctaacaccggccagatcgacgacccacaggagcagcatcgcgtcatctccagtaatctggctctcatccaggtctag

SEQ ID NO: 241657 - DNA, 261 bp, synthetic construct
  misc_feature 1..261: note = Description of Artificial Sequence: Synthetic coding sequence
  source 1..261: mol_type = other DNA
atggacggtacagaaacccgccaaagaaggctcgattcgtgtggaaaaccaggggagctgggactgccgcatcccctgtctacgggcggtcttcccgtggcgtccgaggacggagccttgcgcgctccagaatctcaatccgtgacacctaaacccttggagaccgagccgtcacgagagaccacctggagcattggactgcaggtgacggtcccattcatgttcgccggattagggctttcatgggccggtatgctttag

SEQ ID NO: 241658 - DNA, 606 bp, synthetic construct
  misc_feature 1..606: note = Description of Artificial Sequence: Synthetic coding sequence
  source 1..606: mol_type = other DNA
atggacgggactgagactagacagcgcaggctggacagctgtggaaagcctggcgagctcggactgccacatccactttcgaccggaggactcccggtggctagcgaagatggagccctgagggcaccggaatcgcagtccgtgacacctaagcctctcgaaaccgaaccctctagggagacgacatggagcatcggactgcaggtgacagtcccatttatgttcgcgggacttggccttagctgggctggtatgctactggattactttcagcactggccagtgtttgtggaagttaaagacctgttaacgctggtgccaccactcgttggacttaagggtaatctcgagatgaccttggccagccgcttgtctacagctgcaaacaccggacaaattgatgacccgcaggaacagcacagagtgatcagtagcaatctggccctcattcaggtgcaagcaacggtcgttgggcttctcgcggctgtggcagcccttctgcttggggtcgtgtcccgcgaagaggtcgacgtggctaaggtagaattgttatgtgcaagcagcgttctgacggcattcctggcagcatttgcattgggcgagtag

SEQ ID NO: 241659 - DNA, 414 bp, synthetic construct
  misc_feature 1..414: note = Description of Artificial Sequence: Synthetic coding sequence
  source 1..414: mol_type = other DNA
atggatggaactgaaacgcggcaacggagactagacagttgcggaaaaccaggggagctagggctgccacaccctctgtccacaggtggtctgcctgtggcctcagaagatggagccctgcgcgctccggagtcccagagtgtcacacccaaacctctggaaactgaacccagcagagagactacttggtcgataggactgcaggtcacggtccccttcatgttcgctggtttgggcctgagctgggccggtatgctgttggattatttccaagccaacacagggcaaatcgatgacccacaggagcagcatagagtgatttctagcaatttagccctcatccaagtgcaggcgaccgtcgtggggctgctcgcggctgtggctgccctgctgcttggagttgtgtctcggtag

SEQ ID NO: 241660 - DNA, 459 bp, synthetic construct
  misc_feature 1..459: note = Description of Artificial Sequence: Synthetic coding sequence
  source 1..459: mol_type = other DNA
atggatggaacagaaacgagacaacgtaggctggactcctgtggtaaacccggtgagctggggctccctcacccccttagcacaggtggactccctgtcgctagtgaggacggcgctctcagggccccagaatcccagtctgtcacccctaaaccactagagactgagccctcaagggagaccacgtggagcattggacttcaagtgaccgtgccgttcatgttcgcaggccttgggctctcctgggccggaatgcttctggattatttccagcattggccggtgtttgtcgaagtaaaggacctactgaccttggtacctccactggtgggcctcaaggggaacctggagatgacacttgcatctagactgtccaccgcagccaacactggtcaaatcgacgacccccaggaacagcatcgtgtcatttctagtaacctagctctgatccaagtctag

SEQ ID NO: 241661 - DNA, 1680 bp, synthetic construct
  misc_feature 1..1680: note = Description of Artificial Sequence: Synthetic coding sequence
  source 1..1680: mol_type = other DNA
atggcccctactctccaacaggcttatagaaggagatggtggatggcatgcacagcagttctggaaaacctgttcttctctgccgtgctgcttggatggggctctctgcttataattcttaaaaacgaggggttttattccagcacatgtcccgctgagtcaagcactaacaccacacaggacgagcagcggcgttggcctgggtgcgaccagcaagatgagatgcttaacctcggtttcacaataggcagcttcgtgcttagtgccacgactctcccgttaggaatcctgatggacagattcggcccaagacccgtccgacttgtgggcagtgcatgcttcacagcttcatgtaccttaatggctctggcgtccagagacgtcgaagcgctctctccactgattttccttgccctgagcctgaacggcttcggcggaatctgtctgacatttacctctctgaccctacccaatatgtttggcaacctcagatccacactcatggcactcatgattggatcatatgcgagctccgctatcacttttcctggcataaaactgatctacgatgcaggagtagcctttgtggtcataatgtttacttggtccggacttgcgtgtttgatcttcctgaattgtacattgaattggcctattgaagccttccctgcgccagaggaggtgaactacaccaagaaaatcaaactgtccggactcgccttggatcacaaggtaactggtgatctgttctatacacacgttacgaccatgggacagaggttatcccagaaggctccttccctggaggatgggtctgatgccttcatgagcccccaggatgtccggggtacgtcagagaacctaccagagcgttcagtgcctcttcgtaagtcactttgctcccccacttttctgtggtcattgttgacaatggggatgactcagctgcggattattttctatatggcagccgtgaacaagatgctggagtatttagtgactggtgggcaagagcatgagacaaatgaacaacagcaaaaagttgcggagacggtgggtttttatagcagtgtttttggtgcaatgcagttgctgtgtttgctgacatgtccgctgattgggtatatcatggattggcgcataaaagattgcgtggatgctcctacccagggaaccgtccttggcgacgcacgagatggagtcgccacaaaaagcatacgacctcgatattgcaaaatacagaaactcactaacgcaattagcgccttcacacttacaaatctcctactggtggggttcgggataacctgccttattaataatctacacctgcagttcgtaacctttgtcctgcacacaattgtgagaggtttctttcacagcgcctgtggatctctgtacgcagcagtttttcccagcaatcatttcgggaccttgacgggactgcagtcgctgatctctgcggtgttcgcccttctccaacaaccgctgtttatggccatggtgggcccacttaaaggcgaaccattttgggtgaatttggggcttttgctcttcagccttctggggttccttctgcctagttatctgttttactatagagctagactccaacaggagtatgctgctaatggtatgggtcccttgaaggtgctgtccggcagcgaggtcactgcttag

SEQ ID NO: 241662 - DNA, 1680 bp, synthetic construct
  misc_feature 1..1680: note = Description of Artificial Sequence: Synthetic coding sequence
  source 1..1680: mol_type = other DNA
atggcaccaactctgcagcaggcatacagacgtagatggtggatggcatgcacagcagtactggagaatctgttcttttccgccgtgctgctgggctggggcagtctgcttatcatcctgaaaaacgaaggattttactcctcaacgtgccctgcagagtcttcaaccaatacaacacaggacgagcagcgcagatggccgggatgcgaccaacaggatgaaatgttaaacctaggcttcacgataggatcctttgtgctcagtgcaaccacgctaccattgggaatcctcatggaccgctttgggcctcgacctgtcagacttgtcggatccgcctgttttacagcctcatgcacactgatggccctagcctcccgcgatgtggaggccctgagccccttaatcttcctggctctgagcctgaacggctttggtggaatttgtctgacctttacttccctgaccctacccaatatgttcggaaatctacggtccaccttaatggcccttatgattggatcatatgctagtagcgctataacttttcctgggattaaactgatctacgatgcgggagtggcattcgtggtgatcatgtttacctggagtggattagcttgccttatctttctcaattgcacgctgaactggccgattgaagccttcccagcccctgaggaggtcaattataccaagaagataaaactgtccggcctcgcactagaccacaaggtcaccggggatttgttctacacccacgttaccacaatgggacagaggttgtcccaaaaagctcctagcctggaagacgggagtgatgcattcatgtcccctcaagacgtgcgaggcaccagtgagaacttaccggaacgcagcgtacctctacgcaaatctctctgcagtcccacgtttctgtggtctctcttgactatggggatgacccagcttcggattatattctacatggccgctgtgaataaaatgcttgaatacttagtgactggcggacaggaacacgaaacaaatgaacagcaacagaaggttgcagagacagtgggcttttattcgtccgtcttcggagccatgcagttgctttgcctcttaacctgtccacttatcggctacatcatggactggagaattaaggactgcgtcgacgctcccacccagggtacagtcctcggggacgcacgggatggtgtggccaccaaatccattagaccacggtattgcaagatccagaagctgactaacgcgattagcgccttcacactgactaacctgttgctcgtgggcttcggcattacctgcctgatcaataatctccacctgcagtttgtgacatttgtcctccatacgatcgtgagggggttcttccatagcgcttgcggctccctctacgccgcagtctttcctagtaaccacttcggaacactcaccgggttacagagcttgatctccgccgtcttcgcattactgcagcagcccctattcatggccatggtcggccctctgaaaggtgagcccttttgggtgaacctcggtctgctactcttttcccttttgggattcctcctacctagttacttgttctactatcgagcacgcctgcagcaggaatacgccgcaaatggtatgggccctctgaaagtgctatcgggctctgaagtcacagcatag

SEQ ID NO: 241663 - DNA, 333 bp, synthetic construct
  misc_feature 1..333: note = Description of Artificial Sequence: Synthetic coding sequence
  source 1..333: mol_type = other DNA
atggccccaacattgcagcaagcctaccgaaggcgttggtggatggcctgtaccgctgtgctggaaaacttgttcttttccgccgtgctgcttgggtggggctctctcttaattattcttaaaaatgagggcttttacagctcaacttgtccagccgagtcctctactaataccactcaggacgagcagaggcgttggccgggatgcgatcagcaggatgagatgctgaacctgggtttcacaattggatcctttgtgctaagtgctacaactctgcctctgggaattctgatggatcgtttcggtccacgacccgtgcgcctggtgggttag

SEQ ID NO: 241664 - DNA, 1710 bp, synthetic construct
  misc_feature 1..1710: note = Description of Artificial Sequence: Synthetic coding sequence
  source 1..1710: mol_type = other DNA
atggcccctaccctggccactgcccataggaggagatggtggatggcctgcaccgccgttttggagaacctcctgttctcagcagtccttttagggtgggggtcactgttaataatgctgaaaagcgaaggcttttactcgtacctttgcaccgaacctgagaacgttaccaatggaaccgtaggtggaaccgcggagcctggacacgaggaagtctcctggatgaatggctggctatcttgccaggcacaggatgagatgctgaacctcgcatttactgtgggctcctttctgctgagcgcgattaccctgccccttggcatcgttatggacaaatatggacccagaaagttgaggctgctcggaagcgcctgttttgctgtgagctgtctcttgatcgcctacggggcttctaagcccaatgctttgtccgtgcttatcttcattgctctggccctgaacggcttcggaggtatgtgtatgaccttcacctctctgaccctgcccaatatgttcggagatctcaggagcacatttatcgccctcatgattggctcttatgccagctccgcagtgaccttccctggcatcaagttaatttacgacgccggtgtgtcttttatcgtcgttctagttgtttgggcaggctgttcaggcctcgtgtttttaaattgtttctttaattggccgctcgaacccttccctggaccagaggacatggactactccgtgaaaatcaagttttcttggctgggctttgaccacaaaattacgggaaagcagttctacaaacaggtgaccaccgttggacggagactgagtgtgggcagctctatgcgatccgccaaagaacaggtggcactccaggaaggccacaaactttgcttatccaccgtagatctggaggtcaaatgtcaacctgatgctgccgtcgccccaagttttatgcatagcgtgttcagtcccatcttgctgctttcactcgtgacgatgtgtgtgacacaactgagactaatcttctatatgggcgcaatgaataatattctgaagtttctcgtgagcggggatcaaaagactgtgggcctctatacaagcatctttggtgttcttcagcttctgtgtctgttgactgccccagtgattggctatatcatggactggaggttaaaagaatgcgaggacgcctctgaggaaccagaagagaaagatgccaaccagggcgaaaagaaaaaaaagaagagagacagacaaatccagaagatcaccaacgccatgagagccttcgccttcactaacctgttgctggtgggcttcggtgtgacctgcttgattcctaatctcccacttcagatcttatctttcattctccacacaatcgtccggggatttattcactcggctgtcggcggtctctatgctgctgtctacccatccactcaattcggatctctgaccggactccagtccctcataagcgcactgttcgctttgctgcagcaacctctcttcctggccatgatgggacccttgcagggggatcctctttgggttaatgtgggtctgctgcttctttctctgctggggttctgtttgccactgtaccttatttgttatagaaggcagctcgaaaggcagctccagcagcgccaggaagacgacaagttgttcctgaagataaatggttcttcaaaccaggaggcatttgtttag

SEQ ID NO: 241665 - DNA, 1722 bp, synthetic construct
  misc_feature 1..1722: note = Description of Artificial Sequence: Synthetic coding sequence
  source 1..1722: mol_type = other DNA
atggccccaactctggccactgctcatcgaaggaggtggtggatggcttgtaccgctgtgctggaaaaccttcttttttctgctgtgttgctcggatgggggagcctgctgataatgctgaagtcagaaggattctatagctatctctgcaccgagcccgaaaatgttacaaacgggaccgtgggtggaacagcggaacccggacatgaggaagtcagttggatgaatgggtggctgtcctgtcaggcccaggatgaaatgttaaatctcgcattcaccgtgggaagctttttgctatctgcgattacactgccgctgggtatcgtgatggataaatatggccctaggaagttgcgcctgctggggagtgcctgcttcgccgtttcgtgcctcttaatcgcctatggtgcaagcaaacctaacgctctttcggtcctcatttttattgctttggcccttaatgggtttggcggaatgtgcatgactttcacctccttgaccctgcctaatatgtttggggaccttaggagtacgtttatcgcgctgatgatcggctcatatgcatcgtcagctgtcactttccccggtatcaaactgatttacgacgcaggggtctcatttatcgtggtgctggtcgtttgggccggttgcagtgggctggtgtttttaaactgtttcttcaactggcctcttgagccctttcccggtccagaggacatggactattcagtgaaaataaagtttagttggctaggttttgatcataagatcacagggaaacagttctacaagcaagtaacaactgtgggccgacgtctcagcgttggctccagcatgaggtctgccaaagaacaggtggccttgcaggaaggtcacaaactctgcctgagcaccgtggaccttgaggtaaagtgtcagcctgatgctgccgtggccccttccttcatgcatagcgttttctccccaatcctgctgttgagcctcgtgactatgtgcgtgacacagcttcggctcatcttctacatgggtgcgatgaataacattcttaagttcctagtgtcaggggaccagaaaacagcctcatccactgtgggactttatacctctatttttggagtactgcagctgctgtgcttgctgaccgctcccgtgatcggctatattatggattggagactgaaggaatgcgaggacgcctcggaggaacctgaagagaaggatgccaaccaaggggagaagaaaaaaaaaaagcgggacagacagatccaaaagataacgaatgcaatgcgagcctttgcgtttacaaatctgctgttagtgggtttcggggtcacatgcctgattcccaacctgcccctgcaaatactaagttttatcctgcacactatcgttcggggattcatacattccgcggtgggtggcctgtatgccgctgtgtatccctccacccagtttgggagccttaccgggctgcaatcactcatatctgccctcttcgcactactacagcagcccctcttcctggcgatgatggggcctctacagggagatccgctttgggtgaatgtcgggctgctcctgctgagcttgctgggcttctgcctcccactctacctgatatgctataggcggcaactggaaaggcagcttcagcagagacaggaggacgataagctattcctgaagatcaacgggtcttccaatcaggaggctttcgtttag

SEQ ID NO: 241666 - DNA, 1299 bp, synthetic construct
  misc_feature 1..1299: note = Description of Artificial Sequence: Synthetic coding sequence
  source 1..1299: mol_type = other DNA
atgacatatggttcaccccaagctaacgctagtccttccgacgcagtggctttggatcatggggaggtttctaggagacagcagcaggagctgcccaatatgttcggcgatctgagatcaacattcattgcgttgatgatcgggagctacgcctcttccgctgtcacctttccgggaataaagttaatctacgacgcaggagtgtcgttcattgtagtgctcgtggtctgggccggatgttcaggcttagtgtttctcaactgttttttcaattggcctctcgagccctttcccggtccggaagacatggactatagcgtgaaaattaagttcagttggctgggttttgatcataagatcactgggaagcagttttataagcaagttaccacagtgggacgtcgactttcggtgggatcctctatgcgcagtgccaaggaacaagtggcgctgcaggagggtcataagctctgtctgagcacggtcgacctggaagtgaaatgtcagccagatgcagccgtggctccttcatttatgcatagtgttttttcccccatactattgctgtccctggtgaccatgtgcgtcacacagcttcggctgatattctatatgggcgctatgaataatattttaaagttcctggtgtctggagatcaaaagacagttggattgtacacttcaatattcggtgttcttcagttattgtgtctcctcaccgcccctgtgataggttatatcatggattggcggttaaaagagtgcgaagacgcaagcgaggaaccagaagagaaggatgctaaccagggtgaaaagaagaagaagaaaagggatcggcagatccaaaagatcaccaatgccatgcgcgctttcgcatttaccaacttgctactcgtagggtttggtgtgacgtgcctgattcccaacctgcctctacaaatcttgtcttttatcctgcacaccatcgtgcgaggcttcattcattcagctgtcggagggctctacgcagctgtataccccagcacgcagtttggaagcctgacaggtctacagtccctgatctccgctctcttcgcattgcttcagcaaccattgttcctggccatgatggggcctctgcagggcgatccattgtgggtgaacgtaggcctgttgctgttgtccctgctgggcttctgtctccctctgtacctgatttgctataggcggcaactcgagcggcagcttcagcaacggcaggaggacgacaagctgttcttgaagataaacggcagctccaatcaagaggctttcgtctag

SEQ ID NO: 241667 - DNA, 1341 bp, synthetic construct
  misc_feature 1..1341: note = Description of Artificial Sequence: Synthetic coding sequence
  source 1..1341: mol_type = other DNA
atgacatctaaggaaattatcctcgggctctgcctgctgtcactggtgctgagtatgatactcatggtcattatccgttatattagccgcgttctagtgtggattctcactatacttgtcattctcggaagccttgggggaaccggggtgctgtggtggctttatgctaaacaaaggaggagtcccaaggagaccgtgacccccgagcaacttcaaatcgctgaggacaatcttcgcgcacttttaatttacgcaatttctgctactgtgttcaccgtgatcctcttcctgattatgctggttatgaggaagagagtcgccctgactattgcactcttccacgtggccggaaaggtgttcattcatctcccgttattggtctttcagccgttttggacctttttcgccctggtgctgttttgggtgtactggataatgactctcctgttcctaggcacaacaggcagtccagttcagaacgagcaggggtttgtggaatttaagatatccggaccactccagtacatgtggtggtatcacgtcgtcggactcatctggattagcgagttcatcctagcttgtcagcagatgaccgttgccggagccgtcgtcacttattattttaccagggataagcggaacctgccttttacgcctatcctggccagtgtgaatcggctgattcggtaccacctcgggactgtcgcaaaaggtagcttcatcatcaccctagttaagatccctcggatgattctgatgtacattcatagccaattaaaaggtaaggagaatgcatgcgcaagatgtgtactcaaatcctgtatttgttgcctgtggtgcttagaaaaatgcctgaattacctcaaccagaatgcctacactgccactgccattaactctactaacttttgtacatcagccaaggacgccttcgtcattctggtggagaatgctttgcgcgtggctaccatcaataccgtcggggatttcatgttgttccttggcaaggtgctgattgtgtgcagcaccggcctggccggtattatgctattgaattatcagcaggactataccgtgtgggttctccctttaataatcgtgtgcctcttcgcctttttggtcgcccattgctttctgagtatctacgaaatggtggtcgatgtactcttcctttgctttgctatcgacacaaaatacaacgacgggtctccgggtcgagagttctacatggacaaggtcctcatggagtttgtggaaaactcgagaaaggccatgaaagaggctgggaagggcggagtagccgactctagagaactaaaacctatgctgaagaagcggtag

SEQ ID NO: 241668 - DNA, 1974 bp, synthetic construct
  misc_feature 1..1974: note = Description of Artificial Sequence: Synthetic coding sequence
  source 1..1974: mol_type = other DNA
atgggctgctgctcttcagcctcctccgcagctcaatccagtaagcgcgagtggaagcccttagaggaccgaagctgcaccgacataccttggttgttactgttcattctgttctgcatcggcatgggatttatatgtgggttttctattgctactggcgctgccgcaaggcttgtttctgggtatgacagttatgggaacatctgcgggcagaaaaatacgaaactggaagcgatccctaacagcgggatggatcacactcagcgcaaatatgtattctttctggatccctgtaacctcgacctcataaatcgcaaaattaagtccgtggctctttgtgttgctgcgtgccctcgacaggaactgaaaactctgtccgatgtccaaaaattcgctgagatcaacggctctgctctgtgctcctacaaccttaagccatctgagtacacaacatctcccaaaagttcagttttgtgtcccaaattgccagtccctgccagtgctcctattcccttcttccaccgttgtgcccctgtcaacatttcctgttatgccaaatttgccgaggcgctgattacattcgtctccgacaatagcgtgcttcatcggctcatttccggcgtgatgacgtcaaaagagataatcctagggctctgccttctgagtcttgtgttgagcatgattctaatggtcattataagatatatcagccgggttctcgtctggatactcactatcctggtcatcctcggctcacttggaggcacaggcgtgttgtggtggctgtacgcaaagcagcgtcgctccccaaaggagacagttacccccgagcaactgcagatagccgaagacaatcttcgggcactgcttatatacgccataagcgctactgtcttcacagtgattctgttcctgattatgcttgtgatgcggaagagggtcgccctgaccattgcactgttccacgttgcaggaaaagtgttcattcacctgccccttctcgtgtttcagcctttttggactttttttgccctggttctgttctgggtctactggatcatgacactgctttttcttggaaccacgggatcccccgttcaaaacgagcaagggtttgtggagttcaagatatcggggccactgcaatatatgtggtggtatcatgtggtgggactgatttggattagcgaatttatccttgcctgccaacagatgacggtggctggagccgttgttacatattattttacgcgtgacaaacgaaacctgccgtttacgccaatcctggccagcgtgaaccggctgatccgataccacctgggaaccgtggctaaagggagcttcattatcaccctggttaagattccacgaatgattctcatgtatatacatagtcagctgaagggcaaggagaacgcctgtgctcggtgcgtcctgaagtcttgcatctgttgcctgtggtgtcttgaaaagtgcctgaattatctcaaccaaaacgcctacaccgccactgccatcaacagtacaaatttttgcaccagtgcgaaagacgctttcgtgattctggtcgagaatgcattgagggtggccactattaacactgtgggtgacttcatgcttttcctgggcaaagtcctcatcgtttgctctacaggcctcgcgggaattatgttattaaactaccagcaggactataccgtctgggtgctgcccctgataattgtgtgcctttttgctttcctagtagcacattgctttctaagtatatacgagatggtggttgatgtcttattcttgtgtttcgcgatcgacacaaagtacaatgacgggtccccagggagagaattctacatggataaagtcctcatggagttcgtggagaattctcgtaaagcaatgaaggaggctggcaaagggggtgtcgctgatagtcgggagttgaagccaatggcatctggagccagcagcgcctag

SEQ ID NO: 241669 - DNA, 1959 bp, synthetic construct
  misc_feature 1..1959: note = Description of Artificial Sequence: Synthetic coding sequence
  source 1..1959: mol_type = other DNA
atgggctgttgcagctccgcttcatccgcagcccagtcatccaaaagagagtggaagcctctggaggacagaagttgcaccgacataccatggctactgctatttatactgttttgcatcggcatgggattcatttgcggcttctccatcgctactggagccgctgctcgcctggtgagcgggtacgactcatatgggaacatctgcggccaaaagaataccaagctcgaggcgatccccaacagtggtatggaccacacccaacggaaatatgtgttcttcctggacccctgtaatttagatcttatcaataggaaaattaagtcagttgcactgtgtgtggccgcatgccctagacaggagctcaaaaccttgtcagatgtccaaaagtttgcagagatcaatggcagcgccctgtgttcatacaacctcaagcctagcgagtacaccacatccccaaaatcctcagtgctgtgccccaaactcccagttcccgcaagtgcaccaattcccttctttcaccggtgcgcccctgttaacataagctgttacgctaaatttgccgaggccctgattaccttcgtgagcgacaatagtgtactgcacaggttgatttcaggcgtcatgacatccaaagaaatcatactcggattatgtctgctctcactggttctatctatgatccttatggttataatcaggtatatctccagagtgttggtgtggattctgacaattctggtgattctggggagtttaggcggaaccggcgtgctgtggtggctctatgcaaagcaacgccgatcccctaaggagacagtcaccccggaacagttgcaaatcgccgaggataacctgagagccttgcttatatacgccataagcgccaccgtgtttacagtcatactttttctgataatgctagtgatgcgcaagcgggttgcactgaccattgcgttatttcacgtggccggtaaggtatttatccatctgcccctactggtgttccagcctttctggaccttcttcgccttagtgctcttttgggtatattggatcatgacccttctgttcctcgggacgaccggcagtcctgtacagaacgagcagggctttgtggagtttaagatttcaggcccactacagtatatgtggtggtatcatgtcgtgggtctgatttggatttctgagtttatattagcttgtcaacagatgacagtggccggtgctgttgtgacctactatttcaccagggacaagcgcaacttaccttttactcctattcttgcctctgtgaatcggttgattagataccatctgggcaccgtggccaaagggagtttcattatcaccctggtcaaaattccgagaatgatactgatgtacatccacagtcagctgaagggtaaagaaaacgcatgtgccaggtgtgttctcaagagttgcatttgttgcctctggtgccttgaaaaatgtctgaattatctgaaccagaacgcctacaccgccaccgcgattaactctaccaacttctgtacctccgcaaaggatgccttcgttatcctggttgagaatgcattgcgggtcgccaccataaataccgtgggagatttcatgctgttcctcggcaaggtcctcatcgtgtgctccaccggactggccggtattatgcttctcaactaccagcaggactataccgtgtgggtgttgcccctgatcatcgtgtgtctgttcgccttcctggtggcacattgcttcctctctatctacgaaatggtcgtcgacgtgctgtttctgtgcttcgcaatcgacacaaaatacaatgatggctcaccagggagagagttttatatggacaaggtcctgatggagtttgtggaaaacagtagaaaagctatgaaggaggccggaaagggcggagttgccgattccagggaacttaagcccatgataaaatag

SEQ ID NO: 241670 - DNA, 1965 bp, synthetic construct
  misc_feature 1..1965: note = Description of Artificial Sequence: Synthetic coding sequence
  source 1..1965: mol_type = other DNA
atgggatgttgtagctccgcctcctcagctgcgcagtcctcgaaaagggagtggaagccactcgaggaccgctcatgcacagacataccctggcttttgctcttcatcctgttctgcatcggtatgggtttcatctgtgggttctccatagcaacaggggcagcagccaggctcgtgagtggctatgatagctacggaaatatctgcggccagaaaaatactaagctagaagccattccaaacagtggcatggatcacacgcagagaaaatacgttttctttctggacccttgcaatctcgatctgataaaccgaaaaatcaagtccgtggctctgtgcgtggccgcttgtcccagacaggagctgaaaacactgtcagatgtgcaaaaattcgccgagataaatgggagtgctctttgcagttataaccttaaaccatccgagtatactacttcacctaagtcttcagtcctctgccccaaactgccagtgccagccagcgctcccatcccctttttccacagatgcgcgcctgtgaatatctcatgctatgctaaatttgcagaggctctgatcacattcgtatcggataactcggtgctccatcggctgatcagcggcgttatgacctctaaagaaatcattctaggcctgtgtctattgtccttggttctgagcatgatcctgatggtcattatccgatatatctccagagtgctggtgtggatccttactattcttgttatactgggatctctggggggaaccggggttctttggtggttatacgcgaagcagaggagatcacctaaggaaacggtgacacctgaacagctccagattgccgaagataacctccgggcattgctgatctacgccatcagtgcgaccgtcttcacagtgatcctctttctgatcatgcttgtgatgcgaaagcgagtcgctctgaccatagctttgtttcacgtggcaggtaaggtattcattcatctgccactgctcgtatttcagcctttctggaccttcttcgctctagtgctattctgggtctattggattatgaccctcttgttcctgggaacgaccggtagcccagtgcagaatgaacagggtttcgtcgaatttaagatctccggaccactccagtacatgtggtggtatcacgtcgtggggctgatctggatcagcgagttcatactggcctgccagcagatgacagtggccggagcagtcgtcacgtactattttacccgcgacaagcggaatctccctttcacccccatattagcgtcggtaaatcgtttaatccgttaccacttaggcacggtggctaagggaagttttataattacgcttgtcaagattcctcgcatgatcctcatgtacattcattcacaactgaagggcaaagagaatgcctgtgcacgctgtgtactgaagtcgtgtatctgctgcctatggtgccttgagaaatgtctgaattatctaaaccagaacgcctataccgccactgccattaattctactaatttctgcacaagcgctaaagacgcgtttgtcatcctcgttgaaaacgctctgagagtagccaccatcaataccgtaggagacttcatgctctttctcggaaaggtgctcatcgtttgttccacggggctggccggtatcatgctgctaaactaccagcaggattacacagtgtgggtgctgcctttaatcatcgtatgcctgtttgctttcctggttgcacactgctttttaagcatttacgagatggttgttgatgttctatttctgtgctttgctattgataccaaatacaatgacggttccccaggacgagagttttatatggacaaagttctgatggagtttgtggagaacagccgcaaagcgatgaaagaggctggaaagggaggtgtagctgacagccgtgaattgaagcccatgttgaagaagagatag

SEQ ID NO: 241671 - DNA, 1974 bp, synthetic construct
  misc_feature 1..1974: note = Description of Artificial Sequence: Synthetic coding sequence
  source 1..1974: mol_type = other DNA
atgggctgctgttcctcggcaagcagtgcggcacagtccagtaaaagggagtggaagccacttgaagaccgctcttgcacagatatcccctggctgcttctgttcatcctattttgcatcggcatggggtttatctgcgggttttcaatagccaccggcgctgctgcccgtctggtgtccggatacgactcctacggcaatatttgtggccaaaagaacacgaaactggaggcgatccctaacagtggcatggatcacacccaacgcaagtacgtgttctttttggacccatgtaacctagatcttattaatcggaagatcaagtccgttgctttgtgtgtggcagcatgccccaggcaggaattaaaaacccttagcgatgtccaaaaatttgcagagattaatgggtcagccctttgcagctataacttaaagccgtcagagtatactacttctcccaagagctccgtgctctgtcccaaactccctgtgcctgccagcgcccctattccgtttttccaccggtgtgcccctgtcaacatttcctgctacgcaaaattcgcagaggctctgattacatttgtgtctgacaacagtgtcctgcatcgcctcattagcggcgtcatgacatctaaggaaatcattctcggcctttgcctgctgagcctagttctgtctatgatcctaatggtgatcatacgctacatatccagggtgctggtttggatcctcaccatattggtgattctcgggtccctaggagggacaggggtgctttggtggctctacgcgaagcagcgtagatctcctaaggaaactgtgacccccgagcagctgcaaatcgcagaggacaacctgagagccctgctgatctacgcaatcagcgcaaccgtcttcaccgtaatcttgtttctcattatgcttgtcatgcggaaacgggtcgcacttacaatcgccctattccatgtagccggaaaggttttcatccacctccccctgctggtttttcaacctttttggacatttttcgccctggtcctgttctgggtttattggattatgacactcctgtttttagggacaaccgggtctcctgtgcagaacgagcaagggtttgtggagttcaaaatctccggaccactgcaatacatgtggtggtaccatgtggtggggctgatctggattagcgagttcattttggcttgccagcaaatgaccgttgctggagccgttgtgacgtattatttcacccgggataagaggaatctgccatttacacctattctggcgagtgttaaccgtctgatcagatatcacctgggcaccgttgctaaagggagttttataattacactcgttaagatcccaaggatgattctaatgtatatccattcccaattgaaagggaaggaaaatgcctgtgctcgatgcgtgctcaagtcctgcatctgctgcttgtggtgtctcgagaagtgcttgaactatctaaatcagaatgcatatacagcaactgccattaactccactaatttttgtacttctgcgaaggacgcattcgtaatattggtggagaatgcccttcgggtggccacaatcaataccgtcggagactttatgctgttcctggggaaggtgctgatcgtgtgctcaacagggctggccggaatcatgctgctcaactaccaacaggattacacggtgtgggtgctgccacttatcatcgtctgtttgtttgcattcctggtggcacactgctttctgtctatttatgagatggtcgtggatgtactgtttctgtgttttgctatagataccaaatacaacgatggaagtccagggagagagttctatatggacaaggtcctgatggagttcgtcgagaactcgagaaaggctatgaaggaggccggaaagggaggcgtggcagattcacgggagctgaaacccatggcatcaggcgcatctagcgcctag

SEQ ID NO: 241672 - DNA, 2121 bp, synthetic construct
  misc_feature 1..2121: note = Description of Artificial Sequence: Synthetic coding sequence
  source 1..2121: mol_type = other DNA
atgggcgatgagcgccctcattattatggaaagcatggaactccccagaagtatgacccaacctttaaggggcctatttacaataggggatgtacagacatcatctgttgtgtattcctactcctggccattgtgggttacgtggccgtggggatcatcgcctggacgcatggcgatcccaggaaggtaatatatcccactgattcccgtggagagttctgcggccaaaaaggcactaagaatgagaataagccttacctgttctattttaacatcgtgaaatgcgcatcacccttggttctgttggaatttcagtgccccacccctcaaatatgcgtggagaaatgtcccgataggtacctgacatacctaaatgctaggtcctcacgggacttcgaatactacaagcagttctgcgttcctggtttcaagaataataagggagttgccgaggttttacaggatggtgattgcccagccgtcttgattccctccaaacctctcgccaggaggtgcttcccggcaattcatgcatataaaggcgtgttgatggtggggaatgagacgacctacgaggatggacatggaagcagaaagaatattaccgacctggtggaaggtgctaagaaggccaatggggttctggaagcaaggcagctagccatgcggattttcgaggattacaccgtaagctggtactggatcatcatagggctggttatcgcgatggctatgagcttgctgtttattattctgctacgatttctggccggaattatggtatgggtgatgatcatcatggtcatcctggttctaggttatggtatttttcattgctatatggagtatagtcgcctgcgcggagaggctgggtcagacgttagtctcgtggacttgggcttccagacagacttcagggtgtacctgcatcttcgccaaacctggctcgcatttatgataatcctgtctatcctggaggttatcataattctacttctaatctttcttcgcaaaaggatacttatagctatagccctcatcaaagaggcaagtagagcagtgggctacgtgatgtgctcgctcctgtacccgctagttacatttttcctgctgtgtctctgcattgcatactgggcgagtacggcagtgttcctgtcaactagtaacgaggccgtgtacaagatctttgacgatagtccatgcccgttcactgcaaaaacttgcaatcctgaaacctttccctccagtaacgagagcagacagtgcccgaatgcccgatgtcagtttgcattttatgggggagaatcaggataccatagagctctcctcggtctccagatcttcaacgcgtttatgttcttttggttggccaactttgtgctggcactggggcaggtgacgctggccggagccttcgccagttactattgggccttgaggaaaccagacgatctgcccgcatttcccctgttctctgcctttggacgtgcgctccgctaccatactgggtccctggcttttggtgcactcatcttggctattgtgcaaatcattcgtgtgattctggagtatctcgaccaacgtctgaaagccgcagagaacaagttcgctaagtgcctcatgacttgtttgaaatgctgtttttggtgcctggagaagttcatcaagtttctgaacaggaatgcgtatattatgatcgcaatctacggaacaaacttttgtacatctgctaggaacgctttttttctgctgatgcgcaacatcatcagggttgctgtgctcgataaggttaccgattttctcttcctgcttggtaagctgcttatcgttggaagtgttggaatccttgcattctttttcttcactcataggatccgtattgtacaggatacggcacctcccttgaactattactgggtgcctattttaaccgtgatcgtcggctcgtacttaatagcccacggcttcttctctgtgtacggtatgtgtgtggatacactgttcctgtgttttctggaggatctggaacgcaatgatggctctgctgagcgcccttattttatgagtagcacgctgaagaagctcctgaacaagacaaataagaaggcagccgagtcgtag

SEQ ID NO: 241673 - DNA, 2121 bp, synthetic construct
  misc_feature 1..2121: note = Description of Artificial Sequence: Synthetic coding sequence
  source 1..2121: mol_type = other DNA
atgggggatgaaagaccccactactacggaaaacacggaacccctcagaaatatgaccccaccttcaaaggcccaatctacaatagaggctgtaccgacataatatgctgcgttttcttgttgttggccattgtcggttacgtcgcagtgggcatcattgcttggacacacggggacccacgcaaggtgatctatcccaccgacagtaggggggagttctgtgggcagaaaggcacaaaaaatgaaaacaagccctacctgttttattttaatatcgtcaaatgcgcatctcccctcgttctgctggagtttcagtgccccacaccccagatttgcgtcgagaaatgtcccgacagatatctgacatacctaaacgcacggagttctcgagactttgagtactataagcagttctgcgtgccaggcttcaagaacaataagggtgtggccgaggtattgcaggacggagactgccccgctgtgctgatcccatcaaaaccattggccagaagatgcttccctgctattcatgcttataaaggggttctgatggtgggcaatgaaacaacctatgaagatgggcatggtagcagaaaaaacatcactgatctggtagagggcgctaagaaagctaacggcgtcttggaagcgcgacagctagcaatgagaatatttgaggattataccgtaagctggtattggattataattggtctggtgattgccatggccatgtcccttctcttcataatccttctaagatttctcgcaggaattatggtctgggttatgattattatggtgattctggttctgggttatggcatttttcactgttatatggaatatagcaggctgcggggtgaagcaggctctgacgtatcattggtggatctgggcttccaaacggacttcagggtgtacttgcacttacggcagacctggctggcatttatgattatcctgagtatcttagaagtgattatcatactgttactgatcttcctacggaaaaggattctgatcgcgattgcgttaatcaaagaggctagccgggcagttggttacgtaatgtgctcactgctgtacccccttgtcacgtttttcttgctgtgcctgtgtattgcttactgggctagtaccgccgttttcctgtccacaagtaacgaggctgtgtacaaaatttttgacgattcgccgtgcccatttactgctaaaacttgcaaccccgagacatttccgagttcaaatgagagccgacagtgcccaaacgccaggtgccagtttgctttttatgggggagagtcaggataccaccgcgctcttttagggcttcagatcttcaatgccttcatgtttttttggttggctaatttcgtgcttgccctgggccaggtaaccttagccggagctttcgcctcgtattactgggccttgcgcaagcccgatgatcttcctgcctttccactgttctccgcttttggtcgggcactaaggtatcataccggaagtctggcattcggagctctcattctagcaatcgtgcaaatcattcgggttatcttagaatacctggaccagagacttaaggcagccgagaacaaattcgccaaatgtttaatgacatgtctgaaatgttgtttctggtgtttggagaagttcattaagttcctgaatcgaaacgcatatattatgattgctatttacggcacgaatttctgtacctctgccaggaacgctttttttttgctgatgcgtaacattattagagttgccgtgctggacaaggtcactgactttctgtttttgcttggtaagttgctgatcgtcggaagtgttggtattctggcatttttttttttcacccacaggatcagaatcgtgcaggatacagccccacccctaaactactattgggtgcccattttaacagtgatcgtcggcagctatcttatagcacatggtttcttctccgtatatgggatgtgcgtggacactctttttctctgcttctgtgaagaccttgagcgcaacgacgggtctcaggagagaccatatttcatgtcccctgagttacgggacatccttcttaagggaagcgctgaggagggtaagcgttag

SEQ ID NO: 241674 - DNA, 2115 bp, synthetic construct
  misc_feature 1..2115: note = Description of Artificial Sequence: Synthetic coding sequence
  source 1..2115: mol_type = other DNA
atggaggacgagcggaaaaacggcgcatacggcacccctcagaaatacgatccgactttcaaggggccaatctataatcgcggatgcactgatatcatatgctgcgtttttctgctgctggcaatcgttggatacgtggcagtcggaattatagcttggacccacggggacccacggaaagttatctacccgacggactccaggggagagttctgtggccagaaaggaacaaagaacgaaaacaaaccatatctgttttacttcaacatagtgaaatgcgccagtccgctagtgctcctcgagttccagtgcccaacaccccaaatctgtgtagaaaaatgtccagaccggtatctgacctacttgaacgccaggagctctcgagattttgaatattataaacaattttgtgttcccggattcaagaacaacaagggcgtagccgaagtgctacaggacggcgattgcccagctgtgctgataccatcaaagccgctggccagacggtgcttcccagctattcatgcctataagggagtgctaatggtggggaacgagactacctatgaggatgggcacggtagcaggaagaatatcacagatcttgtggagggagctaagaaggctaatggcgtattggaggctcgtcagcttgcgatgagaattttcgaggactacactgtgagctggtattggattattattggtttggtgattgccatggcaatgtccctgttattcatcatcctgctgaggttccttgcaggtataatggtatgggttatgataattatggtgatcctggtcctcggttacgggattttccactgttatatggagtattcaagactgagaggtgaggctggctccgacgtgagcctcgtcgatttaggcttccagaccgattttagggtgtacctgcacctgcggcagacctggctcgcttttatgatcattctctcaattctggaggtgataattatcctgctgttgatttttctgaggaagcggattctaatcgcaatcgctttaatcaaggaggcctcgcgggctgttggctatgtcatgtgcagcctgttgtatcccctcgtcacatttttccttttatgcctttgcatagcctactgggcctccaccgccgtctttctgtcaaccagtaacgaggccgtctacaagattttcgatgacagcccctgtcccttcacagctaagacctgcaaccctgaaaccttcccgagctcaaacgaaagccgccagtgcccaaatgctagatgccagttcgcattctatgggggtgagtccggatatcatcgggcactactggggctgcaaattttcaacgccttcatgttcttctggctggcaaactttgtcttagctctggggcaggttacactagccggagccttcgcaagctactattgggccctccggaagcctgatgacttacccgcatttcctctgttttctgctttcggcagggcactgcgataccacacggggtctttggccttcggggctctcatactcgctatcgtccaaatcatcagggtcattctggagtacctcgaccagcggctgaaggccgctgaaaacaaatttgcaaagtgtttgatgacttgtctcaaatgctgtttctggtgcctcgaaaaattcataaaatttctgaaccgaaacgcttacattatgatagctatctacgggaccaatttttgtacatctgcacggaacgccttcttcctactcatgcgaaatatcatccgggtggccgtactcgataaggtgaccgattttctctttctactgggcaaactgttgattgtcggctccgtgggtatccttgccttttttttcttcacacacaggatccgtattgtacaagatacagctccgcctctgaactactattgggtcccaattctcacagtgattgtgggtagttacctgatcgctcatggatttttttctgtgtatggaatgtgcgtggatacgcttttcctgtgcttcttagaggacctggagagaaatgatgggtctgctgaaagaccttacttcatgagcagcaccctcaaaaaactgctcaacaaaactaacaaaaaggccgcagagagttag

SEQ ID NO: 241675 - DNA, 1248 bp, synthetic construct
  misc_feature 1..1248: note = Description of Artificial Sequence: Synthetic coding sequence
  source 1..1248: mol_type = other DNA
atgacgggcgaacgcccttccacagcgctgcctgacaggcggtggggacccaggattcttggcttttggggaggctgtagagtctgggtcttcgctgccattttcctcctattgtccctggctgcctcctggtcaaaggctgagaacgactttggccttgtgcagccccttgtaaccatggagcagctattgtgggtctcaggcagacagatcggctctgtcgataccttcaggattccgctgatcaccgcgacgccccgaggcaccctcctggccttcgccgaggctcgtaaaatgagcagctccgacgaaggggctaaatttatcgcccttcgacgcagtatggaccagggctcaacttggtccccaaccgcattcatcgtgaatgacggagatgtcccagatggactaaatctgggcgctgtagtcagcgacgttgaaacaggggtggtcttcctgttttactcactgtgcgcccataaggccggttgccaggtggcttcaactatgctagtgtggtcaaaagacgacggggtgagctggtccacgccccgtaacttgtccttggacatcggcactgaggtgtttgctcccggacctggctccggcattcagaaacagagagaacccaggaagggcaggctgattgtgtgcggccatgggaccctcgagcgtgatggagtgttctgcttactgtcagatgaccacggagcctcctggagatatggaagcggtgtatccggaatcccgtacggccagccaaagcaggagaatgacttcaatcctgacgagtgccagccttacgagctgccggacggttctgttgtgattaacgcccgtaaccaaaacaactatcattgccattgccgtatcgtgttaagaagctacgatgcttgtgatacgctgcgcccaagggatgtcacatttgatcctgagctggtggatcctgtcgtcgcagcaggcgctgttgttacatccagtggcatcgtgttcttttccaatccagcgcaccctgaattcagggtgaacctgacattgcgctggagttttagcaatggcacatcttggaggaaggaaaccgtgcagctgtggcctgggccttccggatactcctccctggccaccctggaaggctctatggatggcgaggaacaggccccacagctttatgtgctgtacgagaaaggaagaaaccactacaccgagtctatcagtgtcgctaaaattagcgtttacggcactctttag

SEQ ID NO: 241676 - DNA, 2007 bp, synthetic construct
  misc_feature 1..2007: note = Description of Artificial Sequence: Synthetic coding sequence
  source 1..2007: mol_type = other DNA
atggggggaaaacagcgagacgaggatgacgaggcctacggtaagcctgtcaagtacgacccatccttcagaggacctattaagaaccgtagctgcactgacgtgatttgctgcgtccttttcctgcttttcatcctgggttacattgtcgtaggcatcgtggcatggctgtacggcgatccacgtcaagtgctgtatcctaggaactccaccggggcatattgcggcatgggcgagaacaaagacaagccgtacctcctttactttaatatttttagttgcattctgtcatcaaatatcatctcagtcgcagaaaatggtctccagtgccccacgcctcagaccgtaattacctccttgcaacaggaactctgtcccagcttcctcctgccttctgccccagctctggggagatgttttccttggacgaatgtcactcctccagctctcccaggcatcaccaatgacacgactattcagcaggggattagtgggcttatcgatagtctgaatgcccgtgatatttccgtcaaaatcttcgaggacttcgcgcagtcgtggtactggatattggttgccttaggcgtagcccttgtcttgagcctgcttttcatactgttgctgagacttgtggccggaccattagtgctcgttctgatcttgggcgtactaggagtgctcgcatatggcatctattactgctgggaagaataccgcgtcctgcgggataaaggcgcttctatatcccaactgggattcactaccaatctgtctgcctaccaaagcgtgcaggaaacctggctcgctgcactgatagtgctggccgtcctggaggccatcctcctactgatgctcatattcctgagacaacgaattcggatcgccatcgcgctgctgaaggaggccagtaaggccgtaggccagatgatgagtactatgttttacccactggtgacgtttgtgctgcttctaatatgtatcgcatactgggcaatgaccgccctctacttggccacctctggtcagccacaatatgttctttgggcttctaatatttcctccccagggtgcgaaaaagtccccataaacacttcttgtaacccaactgctcatcttgtaaatagttcatgccccggtcttatgtgcgtgttccagggatactctagcaagggccttatacaacgtagtgtgttcaacctgcagatatatggtgtgttgggcctgttttggacactcaactgggtcctcgctcttgggcagtgcgtgctggctggcgctttcgcctccttctactgggcctttcataagccacaggatataccaacttttcccctgatttccgcttttatcagaacactgcgatatcatacaggatccctagctttcggagctcttatactgaccctcgtgcagattgccagagttatattagaatacattgatcataaattaaggggagtacaaaatcctgtggcccgttgcattatgtgctgtttcaagtgttgcctctggtgcttggagaaatttataaagtttctcaacagaaatgcatacatcatgatcgccatctacggtaaaaatttctgcgtcagcgccaaaaacgcctttatgctgctgatgaggaatattgtgcgtgtggtggtgcttgataaagtcactgaccttctgctgttttttggcaaactcctcgttgtcggcggagtaggggtgctgagcttctttttctttagcggtaggattcccggactgggtaaagacttcaaatctccccacttaaactactactggctgcccatcatgacctctatcctcggcgcatacgtaatcgcatctggtttcttttctgtgttcgggatgtgcgtggacactctttttctatgcttcctcgaggacttagaaagaaacaacggctctctggaccgcccttattacatgtccaaaagtctcttgaagatccttggcaaaaagaatgaggctccccctgacaacaagaaaaggaaaaagtag

SEQ ID NO: 241677 - DNA, 2133 bp, synthetic construct
  misc_feature 1..2133: note = Description of Artificial Sequence: Synthetic coding sequence
  source 1..2133: mol_type = other DNA
atgggcggaaaacagcgggacgaggacgatgaggcttacgggaagccagtgaaatatgaccctagcttcaggggacctatcaagaataggtcctgcaccgatgtgatctgttgtgtcttgttcctcttattcatactgggttatattgtggtcggcattgtggcttggctctacggcgatcccagacaggtgctctatccacgaaacagtaccggagcctattgcggaatgggcgagaacaaggataagccgtacctcctgtacttcaacatcttcagctgcatcctgagcagcaatataattagcgtggccgagaatggacttcagtgccctacaccccaggtgtgtgtgtcaagttgtcccgaagacccttggactgtgggaaagaacgagtttagtcagactgtgggtgaggtattttacactaagaacaggaacttctgcctccctggcgtgccctggaatatgacagtaatcactagtctacaacaggagctttgcccctcctttctcctgccatcggctcctgcccttggacgttgtttcccttggacaaatgtgacacctcctgctcttcctggaattacaaatgacacaactattcaacagggaatttctgggctgattgactctctgaatgccagagatatctctgttaagattttcgaagattttgcccaatcttggtattggatcttggtggccttgggcgtagccctcgtcctgtctcttctctttattctgcttttgcgcctcgtagctggacctctggtattggtactaatcctgggggtgctaggcgtgcttgcctatggcatatactactgttgggaagagtacagggtgttacgtgacaagggagccagcatctctcaattggggttcaccactaacctgagcgcttaccagagcgtccaggagacctggctagcagcgctgatcgtactggctgtgctggaggcaatcctgttgttaatgttgatattccttcgtcagcgaatacggatcgccattgccctgctaaaagaggcatccaaagccgtcgggcagatgatgtcaacaatgttttaccctttggtgacatttgtgttattgcttatctgcattgcatactgggctatgaccgccctctatctggccacaagcggacagcctcaatacgtgttgtgggcctccaatatcagcagccccggttgcgagaaggtgcccattaacacttcgtgcaaccccacagcccacctcgttaactcctcttgccctggcctgatgtgcgtttttcaagggtactcttctaaagggttgatccagcggtctgtctttaacctccagatatatggcgtcctcggtctgttttggactctcaattgggtgttagccctcggacagtgtgttctagccggagcgtttgcgtcgttctactgggcattccataagcctcaggatatacccacattcccgttgatttccgccttcatcagaacccttcgctatcacacagggtccctggcattcggtgctctaatcctgacgctggtgcagatcgctagagttatactggaatacatagaccacaaactccggggagtgcagaatcccgtcgcgaggtgtatcatgtgctgttttaagtgctgtctctggtgcctcgaaaagttcataaaatttctgaacagaaatgcctacatcatgattgccatatatggtaagaatttctgtgtgagcgctaagaacgctttcatgttgctgatgcgaaacattgtgagggtcgttgtactagacaaggtcactgatctgctgctgtttttcggcaagctcctggttgtcggaggcgtcggggtgttgagctttttcttcttctctgggagaataccaggtctgggcaaggactttaaatctccccatctcaactactattggctgcctattatgacttccatcctgggagcttacgttattgcctccggattcttttcggttttcgggatgtgcgttgatacactgtttctgtgttttctggaggacttggagagaaacaacgggagcctggacagaccgtactatatgagtaagagcttgttaaagatcctgggcaagaagaatgaagccccaccagataacaagaagcgaaagaagtag

SEQ ID NO: 241678 - DNA, 1236 bp, synthetic construct
  misc_feature 1..1236: note = Description of Artificial Sequence: Synthetic coding sequence
  source 1..1236: mol_type = other DNA
taacgggacgaggacgatgaagcttacggcaagccagtgaaatacgacccatccttccgcggtcccattaaaaatagaagctgtaccgacgtcatctgttgcgtcttgttcctcttatttattttggggtacattgtagtaggcattgtggcctggttgtatggcgatcccaggcaagtattataccctagaaattccacaggagcttactgcgggatgggagagaacaaggacaagccctatctcttgtattttaatatattttcctgcattctatcgagcaacataatctccgtggccgagaacggcttacagtgtccaacccctcaggtgtgcgtgagttcatgtccggaggatccatggaccgtaggaaaaaatgagttttcccagacagtgggtgaggtgttctacacaaagaacaggaacttctgtctgcccggagtgccttggaatatgaccgtgatcacttccttgcagcaggagctttgccctagcttcctattaccctctgcccctgccctaggacgatgctttccttggacaaatgtcacaccacccgctctaccgggaatcaccaatgacaccaccattcagcagggaatctccggtcttatcgactccctgaacgcacgagacatttccgttaagattttcgaagactttgcccagtcttggtactggatcctggttgccgtgggacagatgatgagtactatgttctatcccctggttaccttcgtgctgctgctgatctgtattgcctactgggccatgacggctctttatctagccacctccggccaaccgcagtacgtcttgtgggcttcgaatatttcatcccctgggtgtgaaaaggttccgattaacaccagttgtaaccccaccgcacatttggtgaattcatcatgccctggtttgatgtgcgtgttccaagggtattcaagtaaaggactaattcagcgctctgttttcaacctccagatatacggagtcctgggcctgttttggaccctgaattgggtgctcgcgctcggtcaatgcgtgctggcgggagccttcgccagcttctattgggcttttcataagccccaggatatcccgacttttcccctgatcagtgcgtttatccgaacgctgcgatatcacactggcagtttggcctttggagcactgatacttactctcgttcaaatagcccgagtgatcctcgaatacatcgaccacaagctgagatag

SEQ ID NO: 241679 - DNA, 1236 bp, synthetic construct
  misc_feature 1..1236: note = Description of Artificial Sequence: Synthetic coding sequence
  source 1..1236: mol_type = other DNA
tgacgggacgaagatgacgaggcttatggtaaacctgtcaagtacgatccctcttttcgtggacccataaagaaccgatcttgtacagacgtgatctgctgtgtcctgtttcttctatttatcctcgggtatattgtggtagggattgtggcttggctgtacggtgaccccagacaggtgctctaccctcgcaatagtaccggtgcctactgcggtatgggcgagaacaaagacaagccttacctcctctatttcaacatcttttcgtgtattttatccagtaacatcatatcagtggcggagaacggcctacagtgccccacaccacaggtatgcgtgtcttcatgccctgaagatccctggacggtgggaaaaaatgagtttagtcagactgtgggtgaagtcttttacacaaagaatcgcaacttttgtctccccggagtaccctggaacatgacagtgattacctccctccagcaggagctttgcccatcttttcttctcccatcggcgcctgcgctgggcaggtgctttccctggactaatattaccccacccgcacttcctgggatcacaaatgacactaccatccaacaaggaatcagcggcctgatcgacagtctaaatgcccgtgacataagcgttaagatcttcgaggattttgcccagtcatggtattggattctggttgccgtgggacagatgatgtccaccatgttttaccctcttgtgacgttcgtgctgctattgatctgtattgcgtactgggccatgacagccctgtaccttgccacaagcgggcagccccagtacgtcctctgggccagcaatatctcttctccaggttgtgagaaagtcccaatcaacacgagctgcaatcccactgctcacctggtaaactcctcctgtccagggttgatgtgcgtgttccaggggtatagttctaaggggctcatccagcgcagcgtcttcaatctccagatttacggagtgctgggactgttctggactctgaactgggttctcgcattaggccagtgcgtcctggccggtgcctttgccagcttttactgggccttccataagcctcaagatatcccaacatttcccctcatttctgcttttatccgcacactgcgatatcacaccggttctctggccttcggcgctctgatccttacactggtgcagatcgccagggtgatccttgaatacattgatcataagttgcgttag

SEQ ID NO: 241680 - DNA, 2133 bp, synthetic construct
  misc_feature 1..2133: note = Description of Artificial Sequence: Synthetic coding sequence
  source 1..2133: mol_type = other DNA
atgggtggaaagcaaagggacgaggacgatgaggcctatggaaagccagtgaaatatgacccaagcttcagagggccaatcaaaaaccgtagttgtaccgatgtcatttgctgtgtcctcttcttgttgttcatcctaggctatatcgtcgtcggcatcgtggcctggctctatggcgatcctcggcaggttctctatcccagaaacagtaccggggcatattgtggaatgggcgagaacaaggacaaaccctatctgctgtatttcaatatcttcagctgcatcctctcctctaacatcataagtgtggccgagaacggcctccagtgcccgacccctcaggtctgtgtgagcagctgcccggaggatccttggaccgtagggaagaatgagttctcccaaacggttggcgaggttttctataccaaaaaccgaaatttttgcctccctggagtcccttggaatatgaccgtgatcacctccttgcaacaggagctgtgcccgtcatttctgctgccatccgcaccagctctgggtaggtgcttcccttggaccaatattaccccccctgctctgcctggaataacgaacgatactactatccagcagggaatttcagggctgattgattctctcaacgccagagatatttcagtgaagattttcgaggattttgcccaaagttggtattggatccttgttgccctaggagttgccttagttctatcgctgctgttcattttgctcttgcgtcttgtggccggtcccctagtcttggtgctgattttgggtgttttaggagtcctggcttacgggatatactattgctgggaggaatacagggtgctgcgagataaaggcgcatctatttcccagcttggattcaccactaacctgtcagcataccaaagcgtgcaagaaacctggctcgccgctctgatcgttctagccgtgctggaggcaatactcctgctcgtcctcatttttttacggcaaaggattagaattgcaattgcactgctcaaagaagcctcaaaagcagttggccaaatgatgtccaccatgttctatcctctggtgaccttcgttctgctgctaatatgcatagcttactgggccatgaccgcattataccttgcgacgtccggccaaccccaatacgtcctttgggcgtccaacatctcaagtcccggttgtgaaaaggttcctatcaacacgtcttgcaatccgactgcgcatctggttaactccagttgccccggtctcatgtgcgttttccaggggtatagctccaaggggctgatccaacgttcagtgtttaacttacagatctatggagtcctcggactgttttggaccctgaattgggtgctagccctgggacagtgtgtgctcgcaggcgcttttgccagcttttactgggcattccacaaaccgcaggatataccgactttcccgcttattagtgctttcatccggacactgagataccatactggctccttagcctttggtgctttgatactgacccttgttcagatcgcacgagtgatattggaatacattgatcacaaattaaggggcgtccagaaccccgttgccaggtgcatcatgtgttgtttcaaatgctgtctttggtgcctggagaagttcatcaagttcctgaataggaatgcgtacataatgattgcgatatacggcaaaaacttctgtgtgtctgccaagaacgcctttatgcttctgatgaggaacatcgtccgagtggtggtgcttgataaggttacggacctgctgttattcttcggtaagcttctggttgtgggtggcgtgggcgtgctttcatttttcttcttctcgggcaggatcccaggactcggaaaggacttcaagagcccccacctgaactattactggttgccaatcatgacctccatcctcggggcatacgtgattgcttccggatttttctcagttttcggaatgtgcgtggataccctttttctttgcttcttggaagatctcgaacgaaataatgggtccctggacagaccttattacatgagcaagtccctcctgaaaattctgggcaaaaagaatgaggcaccccctgataataaaaagaggaagaaatag

SEQ ID NO: 241681 - DNA, 2133 bp, synthetic construct
  misc_feature 1..2133: note = Description of Artificial Sequence: Synthetic coding sequence
  source 1..2133: mol_type = other DNA
atggggggaaaacagcgagatgaggacgacgaagcctacgggaagccagttaaatatgaccccagcttccggggacccatcaaaaataggtcctgcaccgacgtcatctgctgcgtgctgtttcttctgtttatcctcggttacatcgtcgtgggcatcgttgcttggctttatggtgaccctcgccaggtgctctatcctagaaactccacgggggcatactgcgggatgggggagaataaggacaaaccatacctcctctattttaacatcttctcatgcatactgagcagcaatattatctcagtggccgagaacggcctgcagtgtccaaccccccaggtgtgcgtctcctcctgccctgaagacccttggaccgtcggaaagaatgagtttagtcagaccgtcggggaggtgttttatacaaagaaccgaaacttttgcttacccggagtcccgtggaacatgactgttatcaccagcctgcagcaggagctgtgcccaagcttccttctccccagcgctcccgctttgggtaggtgtttcccttggaccaatataacaccacctgccctcccgggtatcacaaatgacactaccatccagcaaggcatttccggtctgattgattccctcaacgccagggacatctcagtaaagatcttcgaggacttcgcacagagttggtactggatcctggtggcccttggtgtggctctggtgttgtcactactctttatcctgttgctgcgcctggtggccggacctctcgtgcttgtgcttattctgggcgtgcttggtgtgctcgcatacggcatatactattgctgggaggagtacagagtactcagagacaaaggcgcatcaatctctcaattggggtttaccacaaatctctccgcgtatcagtcagtgcaggaaacatggctggcggcactgattgtcctggccgtgcttgaggcaattttgcttcttgtgcttatcttcctccggcagcgaatccggatcgcaatcgctctattaaaggaggccagcaaggccgttgggcaaatgatgagtactatgttttatccccttgtgaccttcgtgctgctgctgatttgcattgcctactgggccatgactgccctgtacttagccacttccggccaaccccagtacgtcctatgggctagtaacatttcctcgccgggatgtgaaaaggtaccaataaacacgtcgtgcaatcctacagctcaccttgtgaattccagttgcccaggtctcatgtgcgtgttccagggctacagcagtaaaggtttgattcagagaagcgtctttaacttgcagatctatggcgtactgggcctgttttggaccctcaactgggtattggcactcggacagtgtgttctagccggagcgttcgcgtccttctactgggcgttccacaagcctcaggatatacctacattcccgttaattagcgccttcatcagaacgctgaggtaccatactgggagcctggctttcggggcactgatactcactcttgtgcagattgcccgagtcatcttggagtacatcgaccacaagctgcgcggtgtgcagaatcccgtcgccagatgtatcatgtgctgtttcaagtgctgcctgtggtgtctcgagaaatttattaaatttcttaaccgcaacgcatacatcatgattgcaatctatggcaaaaatttttgtgttagtgcaaagaatgcctttatgctgctcatgaggaatattgtgcgggtggtcgtgctcgacaaggtgactgatctcctcctctttttcggcaaattactcgttgtagggggagtgggggtgctctcctttttcttctttagtgggcgtatccctgggctaggtaaggattttaagtccccgcacttgaactattattggctgccaattatgacatccattctgggggcttacgttattgcatccggcttcttctccgttttcggtatgtgcgttgacaccctgttcctgtgttttctggaggacctggaacggaataacggttctctggatcggccatactatatgtctaaatccctgctcaagattcttggaaaaaaaaacgaagcccctccagacaacaaaaaacgtaagaagtag

SEQ ID NO: 241682 - DNA, 2133 bp, synthetic construct
  misc_feature 1..2133: note = Description of Artificial Sequence: Synthetic coding sequence
  source 1..2133: mol_type = other DNA
atgggagggaagcaacgtgatgaagacgatgaagcatacggaaaaccggtcaagtatgatcctagctttcgcggacccatcaaaaataggagctgcactgatgtgatatgctgcgtgttgttcctgttatttattttagggtacatagtggtcggcatcgtcgcgtggctttacggggaccctagacaggtgctctacccacgcaactctactggcgcttactgcggcatgggagaaaacaaagataaaccttatcttctctattttaacatcttctcttgcatactgagtagcaatatcattagcgtcgcagagaacggcctccaatgtcctaccccacaggtgtgtgtctccagttgtccggaggatccttggacagtgggtaagaacgaattctcccagaccgtgggagaagtattctatactaagaatcggaatttctgcctccctggcgtgccatggaacatgacagtgattacatctctccagcaggaactttgtccatcatttttgctcccatccgccccagccttgggaagatgcttcccttggacaaacgtcactcctcctgccctcccgggaatcacgaatgacactaccatacagcagggcataagcggacttatcgattctcttaatgctcgggacataagcgtcaaaattttcgaagacttcgcacaaagctggtactggatactggtcgctttgggtgttgcattagtgcttagtcttttgtttattctcttactccgcttggttgccggaccactggtactggtcctgattctcggcgtgctcggagtcttagcttatggcatttattattgctgggaggagtatcgcgtcctgcgagacaagggtgccagtatatcccagctgggctttaccaccaatctctcagcatatcagtccgtgcaagagacctggctggccgcattaatcgtactggccgtgctcgaggcgatccttctgctcatgcttatttttcttaggcaaaggatccgaatcgccattgccctcctcaaagaggctagtaaagcagtggggcaaatgatgtctaccatgttttatcctctggtcacattcgtccttttacttatctgtatcgcgtactgggcaatgaccgctttatacctggccacttccgggcagccccagtacgtcttgtgggccagtaacatctcaagccctggctgcgaaaaggtcccaatcaataccagttgtaatcccacggcccatctggtgaactcctcatgccccggacttatgtgcgtgtttcaggggtactcctccaagggattgatccagagaagcgtgtttaacctgcaaatctatggcgtgctcgggctattctggactctgaattgggtactcgccttaggacaatgtgtgctggccggagcttttgcttccttctactgggcctttcacaagccacaagacatacccacctttcccctgatttcagccttcatccgaactctgcggtatcacactggtagtctcgctttcggtgcactgatcctcacactggtgcaaatagcacgggtgatcctggagtacatagatcacaaactccgcggagtccaaaatcctgtggcacgctgcatcatgtgctgcttcaaatgttgtctctggtgcctggaaaagtttatcaagttcctgaacaggaacgcatacattatgatcgctatatacggaaagaatttctgtgtgagcgcaaagaatgccttcatgctgctcatgagaaacattgtccgcgtagtggtcctggataaggttaccgatctgcttttgttctttgggaagctgctggtcgtggggggtgtgggtgttctcagcttttttttcttctcaggccgtatcccagggctgggaaaagacttcaaatccccacacctaaactactattggctgcccatcatgactagtatcctgggggcttatgtgatagccagcggcttcttcagcgtctttggtatgtgcgtggacacactgtttctatgcttccttgaagacctcgagaggaacaacggaagtctcgacagaccatactacatgtcaaagtccctactgaagatattggggaagaagaacgaggcacccccagataataagaagaggaaaaagtag

SEQ ID NO: 241683 - DNA, 1236 bp, synthetic construct
  misc_feature 1..1236: note = Description of Artificial Sequence: Synthetic coding sequence
  source 1..1236: mol_type = other DNA
tgaagagacgaagatgatgaggcctatgggaagcctgtgaagtacgatccgagctttaggggacccatcaagaacaggtcatgcacagatgtcatatgctgtgttttatttctgctgtttatacttggttatattgtcgtcggcattgtggcttggctgtacggcgatccgagacaggtgctgtacccccgtaactctaccggcgcttattgcggtatgggcgagaacaaggataaaccttatcttttgtattttaacattttctcatgtatcctatcctctaacattatatctgtcgctgagaacggcctgcagtgcccaaccccgcaggtgtgtgtgagcagctgtcctgaagatccatggactgtcggaaagaatgaattttcacaaaccgttggagaggtgttttataccaagaataggaatttttgcctcccaggcgtaccttggaacatgacagtaattacaagccttcagcaggagctctgtccctcattcctcctgccctccgccccagccttgggacgctgcttcccttggactaacgtgacacctcccgctctgcccggaatcacaaatgacaccaccatccagcaggggatctctggtctgatcgatagcctaaatgctcgcgacatctccgtgaaaatatttgaagacttcgctcagagttggtactggattcttgttgctgttggacagatgatgagcactatgttttaccctctggtgaccttcgtcctgctgctcatttgtattgcctattgggcaatgaccgctctgtaccttgcgactagcggacagccgcagtacgtgttatgggcatctaacattagctctcctggttgcgagaaggtgcctatcaatacgagctgcaatcccacggctcacctcgtcaacagcagctgtcccggactcatgtgcgtcttccaggggtatagctcaaaaggacttattcagagatctgtctttaatctgcaaatttacggtgtgctgggactgttttggaccctgaactgggttctggcccttggacagtgtgtactcgcaggcgctttcgcttctttttattgggcctttcacaagccacaggacattcctacctttcccttgatttccgccttcatccgcacattgagataccatacaggtagcttagcctttggtgccctcatcctgaccctcgttcaaattgcaagagtaatcttagagtacattgaccataaactaagatag

SEQ ID NO: 241684 - DNA, 1236 bp, synthetic construct
  misc_feature 1..1236: note = Description of Artificial Sequence: Synthetic coding sequence
  source 1..1236: mol_type = other DNA
taaagggatgaggatgacgaagcgtacggcaaacctgtaaaatatgatccatcattccgcggtccgatcaaaaatcgcagttgcactgacgttatctgctgtgtcctgttcctgcttttcatattgggctatatcgtggtggggatcgtggcctggctgtacggagatcctcggcaggtgctttacccaagaaattccacaggcgcatattgtggtatgggggaaaataaggataagccatacctgctgtatttcaatatcttcagctgcattctcagcagtaatatcatatccgtggcagagaacgggctccagtgcccaacaccacaggtgtgcgtgagttcctgtcccgaagacccttggactgtgggaaagaatgaatttagccaaacagtgggagaagtgttttataccaagaatcggaacttttgtcttccaggcgttccttggaacatgaccgtgataacaagcctacagcaggaattgtgcccatcctttcttttgccctctgctcccgctctgggaagatgtttcccctggaccaacgtcacccccccagccttgccgggaattactaacgataccacgattcagcaaggaatttctggactaatcgacagtttgaatgccagagacatcagcgtgaagatatttgaggattttgctcagagctggtactggattctggtcgccgtggggcagatgatgagcacaatgttctatccactcgtgacgttcgtgctgctgctaatttgtatcgcatactgggcgatgaccgccctgtacctggcaacaagcggccagcctcagtacgtgctgtgggccagcaacatatctagccctggctgcgagaaggtgccgattaacacctcatgcaatcccaccgcccatttggtgaacagtagttgccccggactcatgtgtgtgtttcaggggtacagcagcaaaggcctcattcagagaagtgtgttcaacctgcaaatatatggtgtactcggcttgttttggacactcaactgggtgctggctttgggtcagtgtgtcctagctggagccttcgcgtctttttactgggcttttcacaaacctcaggacatccccaccttccccctcatctctgcctttatcaggactctcaggtaccacaccgggagtcttgctttcggcgctctgatccttactctagtgcagatcgctagagtcattcttgaatacatcgatcataagcttcggtag

SEQ ID NO: 241685 - DNA, 1236 bp, synthetic construct
  misc_feature 1..1236: note = Description of Artificial Sequence: Synthetic coding sequence
  source 1..1236: mol_type = other DNA
tagagggatgaagatgacgaggcatatggaaaaccagtgaagtatgatccctccttccgcggtccaatcaaaaaccgttcttgtacggacgtgatttgctgcgtcctttttctgctatttatcctgggttacatagtggttggtattgtggcttggctctacggcgaccccaggcaggtactctaccccaggaattctaccggagcctattgtgggatgggtgaaaacaaggacaagccctacctactgtacttcaacatcttttcatgtatcctgtctagcaacatcatctccgtcgctgagaacgggttacaatgtcccaccccacaagtatgtgtgtcatcttgtccagaagatccatggaccgtcggcaaaaacgaattctctcagaccgtgggtgaagtgttctatactaagaatagaaatttctgcctgcccggagtgccctggaatatgacagtgatcacgtcactgcaacaggaactgtgccctagctttttgttaccatctgccccagctctgggacggtgctttccatggacaaatatcacccctccagctcttcccggaattacgaatgacacgactattcaacaagggatctcaggactaattgattcactcaatgcacgagatatttccgtcaagatcttcgaggacttcgctcagtcgtggtactggatcctggtggctgtggggcaaatgatgtctaccatgttttatcctctcgtgacgttcgttcttctcctgatctgtatagcatactgggcaatgaccgcactatatctggctacctcagggcagcctcagtacgtgttgtgggcaagtaacattagttctccgggatgcgagaaagtgcccatcaatacaagctgcaatccgacagcccatctggtcaactcttcctgccctgggctgatgtgcgtctttcaaggatattcaagtaaagggttaatccagaggtcggttttcaacctccagatctacggggtgttggggctgttttggaccctcaactgggtcctcgccttagggcagtgtgtcctcgctggggcatttgcctcgttctattgggcctttcacaagccacaggacattccaaccttccctctaatctcagccttcatccgcaccctgagatatcacactggaagcctcgcctttggggctctcattctgactctagtgcaaatcgccagagtgatcctggaatatatagaccacaaactgaggtag

SEQ ID NO: 241686 - DNA, 2133 bp, synthetic construct
  misc_feature 1..2133: note = Description of Artificial Sequence: Synthetic coding sequence
  source 1..2133: mol_type = other DNA
atggggggaaagcagagagatgaggacgacgaagcctatgggaagccagtcaaatacgatccatcctttagggggcctattaagaaccgatcttgcacggatgtgatttgctgcgtgctgttccttctcttcattctaggatacatcgtggtcggcatcgtggcctggctgtatggggacccgaggcaggtactttaccctagaaatagcactggcgcatactgcggtatgggcgaaaacaaagataagccttacttgttatatttcaacatattctcttgcattcttagttctaatataatctctgtggccgaaaatggtctgcagtgccccacacctcaggtctgcgtgtcaagttgccccgaggatccctggactgtagggaagaatgaattctcccagacagtgggcgaggtattttacaccaaaaatcgcaacttttgcctgccaggggtcccatggaatatgaccgtgattacttcactgcagcaagagttgtgtcctagcttcctgctcccctcagctcccgctctgggtaggtgcttcccttggactaacattaccccaccagccttgcccggaatcaccaacgacacgactatccagcagggtatttctgggctgatagacagtctgaatgctcgcgatatttcagtgaagatttttgaagacttcgcacagagctggtattggatactggttgccctgggcgtggccctggttcttagtctcctgttcatcttgttgttgagattggttgctggcccactggtactggtgcttattttgggagtccttggagtgctggcctatgggatttactattgttgggaggaataccgggtgctgagggacaagggagcatccatctcccagctgggcttcaccacaaatcttagcgcttatcagagcgtgcaagaaacttggctggcggctttgattgtcctggccgtcttagaggccattcttctattagtcctgatattcctgcgccagcgtattcggattgctatcgctctcctgaaggaggcgagcaaggcagtggggcagatgatgtcgaccatgttctatccgcttgtcaccttcgtgttattactcatttgcattgcttattgggcgatgacggcactatatctggcgaccagcgggcaaccgcagtacgttctgtgggctagtaacatctcctcccccggttgcgagaaggtgcctataaacacttcatgcaaccccaccgctcaccttgtcaacagcagctgccctggactcatgtgtgtgttccaaggttacagttcgaaaggactgattcaacggagcgtatttaatctacaaatctacggcgttctcggactgttctggaccttgaactgggtcctcgcacttgggcaatgtgtgctggctggcgctttcgcgtcattctactgggcattccacaaacctcaggacattccaaccttcccacttattagcgcgtttataaggaccttgcgctatcacactggaagcctcgcttttggggcattgattctcaccttggtgcagatcgcacgcgtgatcctcgagtacatcgatcacaagcttcgaggtgttcagaacccggttgccagatgcatcatgtgttgctttaagtgttgtctctggtgtctggaaaaatttatcaaattcctgaatcgaaacgcgtatatcatgatcgccatctatggaaagaacttttgcgtttcagctaaaaatgcctttatgctgttaatgcgcaatatcgtgcgcgtcgtcgtgctggataaagtcacagatttgttgctgttcttcggtaagttgcttgtggtggggggagtgggagtacttagcttctttttcttttctggacgcatccccggtctgggtaaggatttcaaaagcccgcacctgaactattactggctccccatcatgactagtatccttggcgcatacgtgattgcgtcgggcttttttagtgtgtttggcatgtgcgtggacacccttttcctgtgcttccttgaagacctggaaaggaataacgggagcctggaccgaccctactacatgtcaaagtcactgctgaagattttggggaagaaaaacgaagccccaccagacaataaaaaacggaagaaatag

SEQ ID NO: 241687 - DNA, 1236 bp, synthetic construct
  misc_feature 1..1236: note = Description of Artificial Sequence: Synthetic coding sequence
  source 1..1236: mol_type = other DNA
tgacgcgatgaagatgatgaagcatatgggaagcccgtgaagtacgatccttcttttagaggacccattaaaaaccggtcctgtactgatgtcatatgctgtgtactgtttctgctgttcattctgggatacattgttgtcggcattgttgcatggctgtatggcgacccaaggcaggtactatatcctcgcaactcaacaggtgcctactgtggaatgggagagaacaaggacaaaccctacctcctgtacttcaacattttttcttgcattcttagcagtaatatcattagcgtggcagaaaacggtttgcaatgtcctacaccgcaagtctgtgtttctagctgccccgaggacccgtggacggttggcaagaatgaattctcccagactgttggtgaggtcttttataccaaaaacaggaacttctgcttgcctggagtaccctggaatatgaccgtgataacaagtctgcagcaggaattgtgccctagtttcttgctgccaagtgccccagctctcggacgctgttttccatggaccaacatcactcccccagctctgcccggaattacaaatgacacgacgattcagcaggggatcagcggattgatcgatagtctcaatgccagagacatttcagtaaagatattcgaagactttgctcaatcctggtactggattctcgttgcagtggggcagatgatgtcgactatgttctaccccctggtgacctttgtcctgcttttgatctgtatcgcgtattgggcgatgacggccctctacctggccaccagtggccagccacagtacgtactttgggccagtaacatatcatctcctggatgcgagaaggtccctatcaacacctcctgtaatccaaccgcccatcttgttaatagcagctgtccgggactgatgtgcgtgttccaaggctattcttctaaaggcctcatccagcgttctgtttttaatctccagatttacggtgtcttgggcctcttctggacactaaactgggtgctagcacttggccaatgtgtgttggccggagccttcgcgtcgttttattgggccttccataagccccaggacatcccgacattccccctcattagtgcctttattcggactctccgctaccataccgggtctctggcctttggggcactgatcctgactctggtgcagatagctagagtcattctggagtacatcgaccataagctacgttag

SEQ ID NO: 241688 - DNA, 2133 bp, synthetic construct
  misc_feature 1..2133: note = Description of Artificial Sequence: Synthetic coding sequence
  source 1..2133: mol_type = other DNA
atgggcggaaaacagcgagatgaggacgatgaggcttatggcaagccggtgaagtacgatccgagctttcgcggacccatcaagaatcggtcctgtacagatgtgatttgttgcgtattattcttgctgtttatcctgggatacatagttgttgggatcgttgcttggttgtacggcgacccacgacaggtactttatcccaggaattccaccggagcctattgcggcatgggagaaaataaagataaaccgtatcttttgtacttcaacatcttttcttgcattcttagcagcaacattatctcagtcgctgaaaacggattgcagtgtccaactccgcaagtgtgtgttagtagttgccctgaggatccctggaccgttggaaagaacgagttttcccaaaccgtcggggaagtattctatacaaagaaccggaacttctgtcttcctggcgttccctggaacatgactgtcatcacctccctgcaacaggagctgtgcccctccttcttacttccctcagctcctgccctgggccgttgtttcccttggacgaacgtgaccccccctgcactgcccggtattaccaacgatacaactatccagcaaggcatctcaggcctgatcgacagccttaacgcgcgagacatctcagtgaaaatcttcgaagactttgcccagagctggtattggatactcgtggcccttggggtcgccttggtgctgagcctactctttatactgctgctgcggttagttgccggtcccctcgtgctcgtgctgatactgggggtgctgggagttctggcctatggaatttactactgttgggaggagtaccgcgtgctaagagacaaaggcgcatccattagccagctgggattcaccactaatctgtccgcctaccagtctgtgcaagagacctggctagcagccctgattgttttggctgtacttgaggcaatcctattattgatgcttatttttttgcggcagaggatacgcatagccatcgccctcctaaaagaagcaagtaaggccgtaggtcagatgatgtccactatgttttatcccttagtcacgtttgtcctcctgttgatctgtattgcttattgggcgatgactgccctctacctggcaaccagcgggcagccccagtatgttctgtgggctagtaatatcagctcgccaggctgtgagaaggttccaattaatacgtcatgcaatcctacagcccacctagtaaattccagctgtccaggtttgatgtgcgtcttccaaggctacagtagcaagggcctgatccagcgcagtgtctttaacttgcaaatctacggtgtactcggcctcttttggactctcaattgggtcctcgctttgggccagtgtgtgctcgccggagcattcgcctctttctactgggcattccacaaacctcaggatataccaaccttcccccttatctcagcgtttatcaggacactgagatatcacacaggtagtctggcctttggggctcttatcctgactttggtacagattgccagggtcattctcgagtacatcgaccacaagctgaggggggtgcaaaaccccgtagcccgatgcataatgtgctgtttcaagtgctgcctctggtgcctggagaagttcattaagttcctgaacagaaacgcttacatcatgatcgcgatctacggtaagaacttctgtgtatcagccaaaaatgcattcatgctcctcatgagaaacatcgtgagggtggtcgtgcttgacaaggtgaccgatctgctgctgttcttcgggaaattgctggtagttgggggtgtgggtgttctgtctttttttttcttttcgggtagaatccccggactcggaaaagacttcaagagccctcatttgaattattattggctgccaatcatgactagcattctgggagcttacgtgattgcgtcaggctttttctccgtgttcggcatgtgtgtggacacccttttcctctgcttccttgaggacctcgagagaaacaatgggtctctggaccgaccatattacatgtccaagtccctgctcaagattctcggtaaaaagaatgaggcccctcccgacaataagaagcgcaagaaatag

SEQ ID NO: 241689 - DNA, 1236 bp, synthetic construct
  misc_feature 1..1236: note = Description of Artificial Sequence: Synthetic coding sequence
  source 1..1236: mol_type = other DNA
tgacgagatgaggacgacgaagcatacggcaaacccgtgaagtatgatccttcctttcgcggtccaataaagaatcgttcctgcaccgatgtaatttgctgcgtcctgtttctcctcttcatccttggatacatagttgtgggaatcgtcgcctggctttacggcgatccccgacaggtcttgtacccaagaaattctactggcgcatattgcggaatgggtgagaacaaagataaaccctatctgctatacttcaatattttctcttgtatcttgagttccaacattatctcggtggcagagaacgggctccagtgtcctaccccccaggtctgtgtttcctcctgccccgaggacccatggacagttggaaagaatgagttcagtcagacagtgggtgaggtcttctacacaaaaaacaggaacttttgtctccctggagtgccctggaacatgaccgtcattacgtccttacaacaggaactgtgcccttcatttctactgccatctgcaccggctcttggaaggtgcttcccttggaccaacgtgacaccacctgccctcccaggcattactaacgacaccactatccagcaaggcataagtgggctgatcgactcactcaatgctagggacatttccgtgaagatcttcgaggactttgcgcagtcttggtattggatccttgtcgctgtgggtcaaatgatgtcgacaatgttttatcccctggtgacatttgtgctgttgctgatttgtatcgcttactgggcaatgaccgccctgtaccttgccacatcaggtcagccccagtatgtactgtgggccagtaatatcagttcaccaggctgcgagaaagtgccaatcaacacctcctgcaaccccacagcccacctggttaactcatcttgcccagggctaatgtgcgtgtttcaaggctactcctcaaagggtctgatccagcggtcagtgtttaaccttcagatctatggggtgctgggcctattttggaccctcaactgggtgttggcactggggcagtgcgtactagcaggcgctttcgccagcttttactgggcattccacaagccacaggacattcctacattccccctgattagtgcttttattcgcacactgagataccacactggtagcctcgcctttggcgcactcattctgacactggtccaaatcgctcgtgtgattctggaatatatcgaccacaagcttaggtag

SEQ ID NO: 241690 - DNA, 1905 bp, synthetic construct
  misc_feature 1..1905: note = Description of Artificial Sequence: Synthetic coding sequence
  source 1..1905: mol_type = other DNA
atgggcgagaataaagataaaccctatctgttatactttaacattttctcctgtatactttcttcaaatattataagcgtggcggagaatgggctgcagtgtcccactccgcaagtctgtgtgtcatcatgccccgaagatccctggacggttggcaagaacgaattttcccaaactgtgggtgaagtgttctatactaagaatagaaacttttgtctgcctggggttccttggaatatgactgtgatcacttccctccagcaggagctgtgccctagcttcttgcttccgtctgcacccgctctgggcagatgcttcccttggaccaatgtaactcctccggctctgcctggtattacgaacgacacaactattcaacaaggcatttctggacttatcgatagcttgaacgcaagagacattagtgtgaagatcttcgaagactttgctcaatcctggtattggatcttggtcgcactgggcgtggccctcgttctgtctctgttgttcatcttactgctgcgccttgtcgctggccctctggtgctggtactgattctgggagtgctcggagttctcgcctacgggatctattattgctgggaggagtatcgagtcctgagggataaaggcgcatccattagccagttgggatttacaactaacctgagtgcatatcagtcggtccaggaaacctggctggccgcactgatcgttctggcagtcctggaggccatcctgcttctcatgctgatcttcttaaggcagcgcattcgcatcgccatcgcacttctcaaggaggcctccaaagctgtgggacagatgatgagtactatgttttaccccctagtgactttcgttctactgttgatctgtattgcttactgggccatgaccgccctttatctggccacaagcggacagccgcagtatgtattatgggccagcaacattagttctccaggatgcgaaaaagttcccattaatacctcctgtaaccctacagcccaccttgtcaactcatcctgccccggactgatgtgtgtgttccagggttatagttcaaagggactgatccagcggtccgtgtttaatctgcaaatatatggtgtcctggggctgttttggaccctgaactgggttctagcgctcggtcagtgtgtgctcgccggtgcatttgcctctttttactgggcgttccataagccacaagatatccccacattccccctgatttctgctttcatccgcaccctgcgctatcatacgggatcgctggctttcggagctttgatactgaccttggtgcagattgccagggtgattcttgaatatatagatcataagttgagaggggttcagaaccctgtggccagatgtattatgtgttgcttcaaatgctgcctctggtgcctggaaaaatttataaagtttttgaacagaaatgcttacataatgatcgctatctacgggaaaaatttttgcgtgtccgccaaaaatgctttcatgctgctcatgcgcaacatagttagggtcgtagttctggataaggtgaccgatcttctgctttttttcggcaagctcctcgtggttggcggagtcggagtgctcagcttttttttcttcagtgggaggatccccggactggggaaagactttaaatctcctcacttgaattattattggcttccaataatgactagcattcttggcgcatacgtcatcgcaagcgggtttttcagcgtgttcgggatgtgcgtggataccctgtttctgtgcttcttagaggacttggaaaggaacaatggctctctggaccgtccttactatatgagcaaatcactgctaaagattctaggaaagaaaaacgaagcccctcccgataataagaagagaaagaaatag

SEQ ID NO: 241691 - DNA, 1905 bp, synthetic construct
  misc_feature 1..1905: note = Description of Artificial Sequence: Synthetic coding sequence
  source 1..1905: mol_type = other DNA
atgggcgagaacaaggacaaaccatacctgctgtatttcaatattttctcctgcatcttaagctccaatattatcagcgttgcagaaaatgggcttcagtgtcccacaccacaggtctgtgtatcaagttgccctgaggatccatggaccgtcggaaaaaatgagtttagccagactgtaggggaagtcttttacaccaaaaaccgcaacttctgcttgcccggtgttccatggaatatgacagtcattacatccttgcagcaggagctgtgcccctcattcttactgccttccgcaccagctttgggaagatgcttcccttggactaacgtgaccccaccagccctgcccggaattactaacgataccaccattcagcagggcatttccgggttgatcgacagcctcaatgcccgtgatatttccgtcaagatattcgaggacttcgcccagagctggtattggatacttgtcgccctgggtgtcgctctggtactgtccctgctattcattctgcttcttcgactcgtcgcaggccctttggttttggttctgatcctcggcgttctaggggtgctggcgtatgggatttattattgctgggaagagtatcgcgtgcttagggataaaggtgcttccatttctcagttaggctttacaacaaatctatccgcttatcagagcgttcaggaaacatggctagcagccttgatcgttctggcggtcctggaagccattctacttctgatgctgatcttcctccgccagcgcatcagaatagccatcgctctcctgaaggaagcaagcaaagctgtggggcaaatgatgagcaccatgttttatccgcttgtgacgttcgtgctccttctgatctgcattgcctattgggccatgactgccctatacctcgccacaagcgggcagcctcagtacgtcctgtgggcctctaatatctcgagcccgggatgcgaaaaagtcccaatcaacacctcttgtaaccccaccgcacacctagtcaactctagttgtccaggcctgatgtgtgtgttccagggctactcaagtaagggactgatccagcggagcgtgttcaatctccagatttacggtgtattgggcctattttggactctgaattgggtgctggcactggggcagtgtgtgttagcaggcgcttttgccagtttttactgggccttccataagccccaggacatcccgacattcccccttatttcggcttttatacggacccttcggtatcatacaggcagtctcgcatttggagccttgattcttactctggtgcagattgccagggtaattttggaatacatcgatcacaaactgcgcggagtgcaaaaccctgtagcacgctgcattatgtgctgtttcaaatgttgtctctggtgcctcgagaaatttataaagttcctgaaccgaaatgcctatataatgattgcgatatacgggaagaatttctgcgtctcagccaagaatgcttttatgctgttgatgaggaacattgtgcgcgttgttgtactcgataaggtcacagacctcctgcttttcttcgggaagctgctcgtggtcggcggagtgggagttctgtctttcttttttttctctggcagaatacccggactgggcaaggactttaagtcaccccatcttaattactattggttgcccatcatgactagcattttgggtgcctatgttatagccagtggtttctttagtgtcttcggtatgtgtgtcgacactctgtttttgtgctttctagaagacttagagcggaacaacggcagcctcgacaggccgtactatatgtccaagtctctgcttaagatcctcggaaagaagaacgaggcccctcccgacaacaagaaaagaaagaagtag

SEQ ID NO: 241692 - DNA, 1905 bp, synthetic construct
  misc_feature 1..1905: note = Description of Artificial Sequence: Synthetic coding sequence
  source 1..1905: mol_type = other DNA
atgggcgagaacaaggacaaaccttatcttctttacttcaacatttttagttgtatccttagttccaatatcatttctgtcgcagagaatggtctgcaatgcccgaccccccaggtgtgcgtgagctcatgtcctgaggacccatggactgttggaaaaaacgagttttctcaaactgtcggcgaagtattctacacaaagaacagaaacttctgtctgcccggagttccatggaatatgactgtcattactagcctgcaacaagagctttgcccctcttttttactgccttcagccccagctctggggaggtgctttccatggaccaacatcacccccccagctttgcccggaatcaccaatgacacaactatccagcagggcattagcggcctgattgacagcctgaacgctagagacataagcgtcaagatcttcgaggacttcgctcaaagctggtattggatccttgtcgccttaggcgtcgcactggtgctgtccctcctattcattcttctcctgagattggtagctggacccctggtgttggtgctgattctgggcgtgctcggtgtcctggcctacgggatctattactgctgggaggagtacagggtcctgcgggataaaggggcaagcatttctcagttggggttcactacaaacctgagcgcctaccagagtgtgcaggagacgtggctcgctgccctcattgtcctggctgttctcgaggctatcctcctgctagtgcttatttttctgcgccagaggatccggattgctatcgcacttttaaaggaagcaagcaaggccgttgggcagatgatgagcaccatgttttatcctctggtcaccttcgtcctcctactaatctgtatcgcctattgggcgatgacagcgctgtacctggccacctccggacagcctcaatatgtgctgtgggctagcaatattagctctccaggctgtgaaaaagtgcccataaatacaagctgcaatcccacagctcatctagtcaactcctcctgcccgggtcttatgtgcgtcttccagggctactcctctaaaggtctgattcagaggtctgtcttcaacctgcagatatacggagtgctgggtttgttttggaccctgaattgggttttggcccttggccagtgcgtgctcgcaggcgcttttgccagtttctactgggcttttcataagcctcaagacatcccaacctttcccttaatctccgcctttattagaactctacggtatcacaccggttcccttgcctttggtgcccttattctcacattggtccaaatcgcccgtgtgattcttgagtacattgaccacaaacttcgtggtgtgcagaatcccgtggcaagatgcattatgtgttgctttaagtgttgcctgtggtgcctggagaaatttattaaattcctgaacaggaacgcctacattatgatcgcaatctacgggaaaaatttctgcgtatcagccaaaaatgccttcatgcttcttatgcggaatatcgtccgcgtcgtggtgttagataaggtgacagacttgctgttgtttttcggcaaactactagtggttggcggtgtcggagtgttgtctttttttttcttctcagggagaattcccggtcttggcaaggatttcaagtcaccacatctcaattactattggctgcctatcatgaccagcattctcggggcttacgtcatagcctccggattcttctcagtgtttggaatgtgcgttgacacgctgttcctgtgtttcctagaagacctggaacgcaacaatgggtcgctggacaggccttattatatgagcaagtcactcctcaagattttggggaaaaagaatgaggctcccccagataataagaagcgcaagaagtag

SEQ ID NO: 241693 - DNA, 2007 bp, synthetic construct
  misc_feature 1..2007: note = Description of Artificial Sequence: Synthetic coding sequence
  source 1..2007: mol_type = other DNA
atggggggtaagcagcgcgacgaggacgatgaggcatacgggaagccggtgaagtacgatccttcattccgaggccctattaaaaataggagttgtacagatgtcatctgttgcgttctcttcctgttgttcattctgggatacattgtggtgggtatagtcgcttggttgtatggcgaccctaggcaggtgctgtacccaaggaacagcaccggagcatactgtggcatgggggaaaacaaagataaaccatacttgttgtattttaacatattcagctgtattctgtcatcgaatatcatctcggtggccgagaatggacttcagtgccccacaccacaaaccgttatcactagcctacagcaggagctgtgcccttctttccttctgccttctgctcccgctctaggtcggtgtttcccttggaccaatatcacaccccctgcgctacccggtatcacaaatgatacaactattcagcagggaatcagtgggctgattgacagcctgaatgcacgggatatttccgtgaaaatttttgaggattttgctcagtcctggtattggatattagttgccttaggcgtggcacttgtcctatcgctgctttttatcctactcctgcgcctggtggcgggaccgctggttcttgtgctcatcctgggggtcctgggagtactggcgtatgggatctactattgctgggaagaatatagggttctaagggacaagggggcttcgatttcccagctgggcttcacaactaacctttccgcctaccagtcagtgcaggaaacctggctcgcagccctgatcgtgctggcagtgctggaagcaatccttctcctggttctcatttttcttcgccagaggatacgtattgcgattgccctgctgaaggaggcttccaaagcggtgggacaaatgatgagcacgatgttctacccactggtgacctttgttttgctacttatctgcatagcctactgggccatgacagcactatacctggcaaccagtggccaacctcagtatgtcctgtgggccagcaatattagcagccccggatgcgagaaggttcctatcaacaccagctgtaatccgaccgcacacttagtgaatagttcctgtcctggattgatgtgcgtcttccagggttactcatcaaaaggcctgatacaaagaagcgtttttaacctgcagatctacggtgtgctgggactattctggaccctgaattgggtgcttgctcttggccagtgcgtgctggccggagcgttcgctagtttttattgggcatttcacaaaccccaggacatccccacttttcccctgatcagtgcgttcatccgcacgctgcggtatcacacaggttcgctggcctttggtgcactcattttgacactcgttcagatagctcgggtcattcttgagtatatcgaccataagctgcgcggtgttcagaaccccgtggcacgctgcattatgtgctgtttcaaatgttgcctctggtgcctggagaagtttatcaagttccttaaccgaaacgcatatatcatgatagctatttacggaaaaaatttttgcgtgtcggctaaaaatgcgttcatgctgctgatgagaaatatcgtgcgcgtcgtggttctcgacaaagtaaccgacctgctcttgttctttggcaaacttctagtggtaggcggagtcggggttttgagtttctttttcttttcaggccgtattcctgggctgggcaaggatttcaagtccccacacctaaattactactggctgcctatcatgacgagtatactgggcgcatatgtcattgcatctggcttcttttctgtgttcgggatgtgcgtcgacaccctgtttctatgcttcctggaagatttggaacggaacaacggaagtctcgatcgaccctactacatgtccaagtccctgttgaagattctgggcaaaaaaaatgaggctcccccagacaacaaaaaacgtaagaaatag

SEQ ID NO: 241694 - DNA, 1905 bp, synthetic construct
  misc_feature 1..1905: note = Description of Artificial Sequence: Synthetic coding sequence
  source 1..1905: mol_type = other DNA
atgggcgagaataaggacaaaccttaccttctctactttaatatattctcctgtatcctaagttcgaacattatttcagttgccgaaaatggcttgcagtgtcctacacctcaggtttgtgtatcttcatgccccgaggatccctggacagttggaaagaatgaattcagccaaaccgtcggcgaggttttttatacgaagaatcgcaatttttgtttacccggtgtgccttggaacatgaccgtcatcactagcctgcaacaagagctgtgtccctcctttctactgccttctgctcccgctctaggccgatgcttcccttggacaaacgtgacacccccagccctgcctggaataacgaatgacaccacaattcagcaggggatctcaggactcatcgattccttaaatgcacgagatatcagcgttaagatttttgaggactttgcacagtcctggtattggatcctcgtggctttgggggtagcgttggtgctgtctctgctgttcattttgctcttaaggctcgttgcaggtcctctggtcctcgtgttgatcttgggagttctcggggttctggcctatggtatctactactgctgggaggaatatcgtgttttgcgagataaaggtgcctctatttcgcagttgggtttcacaactaatctaagtgcctatcagtccgtgcaagaaacctggctggcagctttgattgtgttggccgtcctggaggccatcttactgttaatgctcatttttctgagacagagaattcggatcgctattgctctactcaaggaggccagcaaagctgtgggccagatgatgtcaaccatgttctaccccctcgtaacttttgtcctgctcctgatttgcatagcatattgggctatgactgctctttacctcgccacatccgggcagcctcagtacgtcttatgggcctctaatatcagtagccccggatgcgaaaaggtgccgataaatacttcatgcaacccaacggcccatctagtcaacagttcctgcccaggcttaatgtgcgtgttccaagggtactcctccaagggactcattcaaaggtcggtatttaatctgcagatttatggcgttctgggtcttttctggacactcaattgggttctggccctcggccaatgcgtgctcgccggagctttcgctagcttttactgggccttccacaagccccaggatatcccaacattccctctcatatccgcattcattcgaaccctacgctatcataccggttctttggcctttggcgctctgatcctgacactggttcagatcgccagggtgattttggaatatatcgatcataagctgcgcggagtgcagaaccctgtcgcacgctgcatcatgtgctgctttaaatgctgcctatggtgtctggagaagttcattaaatttctgaatagaaatgcctacataatgatcgcaatttatggcaaaaacttctgtgtttccgcaaagaatgcgtttatgctcctcatgaggaacatcgtccgagtcgtagtgttggataaagtgacagatcttcttttgttttttgggaaactcctcgttgttggaggggttggtgtgctctcattcttcttcttttccggccgtatccccggactcggtaaggactttaagtctcctcatctgaactattattggttgccgataatgacttcaattctcggcgcttacgtgatcgcttcgggcttcttttcagtgttcggcatgtgtgttgacactctgttcttgtgtttcctggaagacctggaaagaaacaacggttctctggatagaccttactatatgagcaagtcactcctgaaaatactcggcaagaaaaatgaagctcccccagacaacaagaaacgaaaaaaatag

SEQ ID NO: 241695 - DNA, 1905 bp, synthetic construct
  misc_feature 1..1905: note = Description of Artificial Sequence: Synthetic coding sequence
  source 1..1905: mol_type = other DNA
atgggtgagaataaggacaagccatacttgttgtacttcaatatctttagctgcattctgagcagcaatataatttctgtggccgagaacgggctgcagtgccccacgccccaggtgtgcgtgagcagttgtcctgaagatccttggactgtcgggaagaacgagttctcacagacggtcggggaggtcttctacactaagaatcgcaatttctgtctgcctggggtgccctggaatatgacagtcatcacttccttacagcaggaactctgcccatcttttttgcttccttctgcccctgccctggggcgatgctttccctggaccaacgttacgccgcctgcattgcctggcatcaccaatgacacaaccatccaacaaggcattagtggtctcatagattcactcaacgccagggacatttccgtgaaaatttttgaagattttgcccaaagctggtactggattctggtcgctctgggagtggctctcgtcctttctttgctcttcattcttctattgcggctggtggcgggacctctggtgttggtgctgatcctcggggttctcggggttctggcctacgggatttattattgttgggaagaatacagagtgctacgcgacaagggcgctagtatctcacagctcggcttcacaactaatctttccgcctaccagagcgtgcaggaaacctggctggcagctttgatcgtgcttgcagtactggaggcaatcctgctcctgatgttaattttcctgagacagcgtatccgaatcgctatcgccctgctcaaagaggctagtaaagcagtagggcagatgatgagtaccatgttttatcctttggtcacctttgtgttgctgctcatctgcattgcatactgggccatgactgctctgtacctggccacttctggtcagccccagtatgtgctttgggccagtaacatttcttctccgggatgcgagaaagtacccatcaatacatcctgcaaccctaccgcgcacttggtaaattcttcttgtccagggctgatgtgtgtgtttcagggctatagttccaaaggactgattcaaaggagcgtgttcaatctgcagatctatggagtgttgggactcttttggacactaaattgggtcttagcactgggacagtgcgtcctggctggagcattcgccagtttctattgggcctttcataagcctcaggatatacctacgttccctctcatctccgcatttatcaggacactccgctatcacacgggatcactagcttttggtgccctgatcctgacactggttcagatcgccagagttatactagagtacattgaccacaaattgcgcggtgtgcagaacccagtggcccgatgtattatgtgttgtttcaaatgttgcctatggtgtctggagaagttcattaaattcctgaatcgcaacgcctacattatgatagccatctacggtaaaaacttttgtgtttctgcaaaaaatgcatttatgcttctaatgagaaacatcgtgcgcgtcgtagtgctagacaaggtcacagacctgcttctcttcttcggcaagcttctggtggtgggcggagtcggggtgctcagttttttctttttcagcggcagaatcccaggtcttggcaaggatttcaaaagcccgcacctgaattattattggctgcctattatgacttctatacttggcgcttacgtgatcgcctctgggttcttctcagtgttcggcatgtgcgttgacactttgttcttatgcttcttagaagatctggagaggaacaacggttctctggacagaccttactatatgtctaagtcgttgctgaagatccttggcaagaagaacgaagcaccgcctgacaacaagaagaggaagaagtag

SEQ ID NO: 241696 - DNA, 2007 bp, synthetic construct
  misc_feature 1..2007: note = Description of Artificial Sequence: Synthetic coding sequence
  source 1..2007: mol_type = other DNA
atgggtggtaagcagcgagacgaagatgacgaagcatatggtaagccagttaaatacgatccctcattcaggggtcccattaaaaatcggtcctgcaccgacgtgatctgctgcgtgctttttctgctatttatactcgggtacatagtggtcggtattgtcgcttggctgtatggagatccacggcaggtactgtatccaaggaattcgactggggcttattgtggtatgggggaaaataaagataagccctacctgttatattttaatatctttagctgcatcctgagttccaatatcatttccgtggccgagaacggtttacaatgtcctacaccccagactgtgatcaccagtctgcagcaggaactctgtccttcgtttttgctgcccagcgcaccggctcttggacgatgttttccgtggaccaacgtgacccctccagcactccccggaattacaaacgacacgacaattcagcagggtattagcggtctgattgacagtctgaatgcaagagacatttcagtcaaaatctttgaagacttcgcacagtcctggtactggatccttgtcgccctaggggtagccctggtgctgtccctcctcttcatcttgcttctgagactcgttgccggacctctggtgcttgtcctaatcctcggggtcctgggggtgctggcatatggcatctattattgttgggaggagtacagagtactgagggacaagggcgcttcgatttcccagctcggattcaccacaaatctcagtgcttatcaatctgtgcaggaaacatggctggcagcgctaatcgtacttgctgttttggaggcaattctgcttctgatgctgatcttccttagacaaagaatcaggattgccatcgccctcctaaaggaggcttcgaaggcagtcggccagatgatgagcactatgttttatccactcgttaccttcgtcttactgttgatatgtattgcctattgggccatgacagctctgtatttagcgacctctggtcaaccccaatatgttctctgggctagcaacatctcctcacctggttgtgagaaggttcctattaataccagctgtaaccccaccgcccatcttgttaattcttcatgccccggactcatgtgcgtctttcaggggtacagtagtaaagggctcatccagaggtcagtgtttaacctgcagatttacggagtgctcggacttttttggaccctgaattgggtgttagccctggggcagtgtgtgctggctggcgcattcgcaagcttctattgggccttccataagccccaagatattcctactttccctctcatcagcgcatttatccgaaccctgagatatcacacgggcagtctggcattcggggcactcatcctaactctcgtgcagatcgccagagtgatcttggaatatatcgatcacaaactgaggggcgtgcagaaccccgtagcgaggtgtattatgtgctgtttcaaatgctgcctctggtgtctggaaaagttcatcaaattcctcaaccggaacgcgtacataatgattgccatctatggcaaaaacttctgtgtatctgctaagaacgcgttcatgttgttaatgaggaatatcgttcgcgttgtggtgttggataaggttactgacctgttactctttttcggcaaactactggtggttggtggagttggcgtactgagcttctttttctttagcggcaggatcccaggcctgggaaaggacttcaaaagtccgcaccttaattactactggcttccaatcatgacttccatcctgggagcgtatgtgatcgccagtggatttttttcggtgttcgggatgtgcgtggataccctgtttctgtgcttcctggaagatttggagcggaataacgggagccttgaccgaccttattatatgtccaagagcctgctcaagattctcggcaagaagaacgaagccccacctgataacaaaaagcgcaagaagtag

SEQ ID NO: 241697 - DNA, 2007 bp, synthetic construct
  misc_feature 1..2007: note = Description of Artificial Sequence: Synthetic coding sequence
  source 1..2007: mol_type = other DNA
atgggcggaaagcaaagagacgaggatgacgaagcgtacggaaagcccgtaaagtacgaccccagctttcgcggtcctatcaaaaacaggtcttgtaccgacgtgatatgttgtgtgctgttcctgttgttcatcctgggctatatcgtcgtagggatcgtggcctggctgtacggggatcctagacaggtcctctaccccagaaactcaaccggcgcatactgcgggatgggggaaaacaaagataagccttatcttctttacttcaacattttttcgtgtatactgtctagtaacatcatttccgtggcggaaaatggacttcagtgccccacccctcagaccgtgatcaccagtttgcaacaagagttatgcccctcattcctgctgccttcagcgccagctctgggacgctgttttccatggacaaacgtcactccccctgctcttccagggattaccaatgataccacaatccagcaggggatcagtggactcattgatagtctcaacgcccgtgacatcagtgtaaaaatattcgaggattttgctcaaagttggtattggatactagttgcactaggcgtggcgctggtgttgtccctcctctttatcctgctgctacgactggtggccggacctctggtgctggtgctgatcctaggggtcctgggtgtacttgcctatggcatctattattgttgggaggaatatcgggtgctaagggacaagggggcaagcatctcgcagctcggatttacaacaaatcttagtgcctaccaatcagtgcaggagacatggctggctgcattgattgttctggcggtgttggaggcaatcctgctcttgatgctgatcttccttcgccagcgcatccgcattgctatcgcactgttgaaggaggcatctaaggcagtcgggcagatgatgtccaccatgttttaccccctcgtcacttttgttctgctgcttatttgtattgcctactgggcaatgacagctctgtatctagccacgtccggccagccgcagtacgtgctctgggcatctaacatttcctctcccggttgcgagaaggtgcctatcaacacctcttgcaaccccaccgcacacctggtcaacagctcttgtccaggccttatgtgtgtgttccaaggctattctagtaaaggtctcatccagagatccgtgttcaaccttcagatctacggggtcctcggactcttctggactctgaattgggtgctcgccctgggccaatgcgtgctcgccggtgcattcgcctccttttactgggcttttcataaaccccaggatattcctacattcccactgatctcagcatttatcagaactctgcgatatcatactgggtcacttgcattcggcgcactgattctgacactcgtccaaatcgccagagtgatcctcgagtacatagaccacaagcttaggggggtgcagaatccagtcgcccgatgtattatgtgctgctttaaatgctgtctgtggtgtctggagaaatttataaaattcctgaatagaaatgcctacataatgatcgcgatttacggtaagaacttttgtgtgtccgcgaagaatgctttcatgttactcatgcggaatatagtgagggttgtggtcctcgataaagttacagacctccttctgttttttggtaaactgctggtggtcggaggtgtgggtgtgttgtcctttttcttcttttcggggagaatcccaggattgggaaaagacttcaagtcaccacacctgaattactactggctccctatcatgacaagcattttgggagcgtacgtgattgcatcgggctttttctctgtctttggtatgtgcgtcgatacgctgttcttatgctttctcgaagacttggaacgaaataacggatccctggacaggccatattatatgagtaaatccctgctgaaaattctgggaaaaaaaaacgaggccccacctgataataaaaagcgaaagaagtag

SEQ ID NO: 241698 - DNA, 2007 bp, synthetic construct
  misc_feature 1..2007: note = Description of Artificial Sequence: Synthetic coding sequence
  source 1..2007: mol_type = other DNA
atgggtgggaaacagcgagatgaagatgatgaggcctacggtaagcctgtgaagtacgatcccagtttccgcggacccatcaaaaacagaagttgtactgacgtaatctgttgcgttctctttcttttattcattttggggtacattgtcgttgggatcgtggcgtggctgtatggcgaccccagacaagtgctctatccaaggaattcaacaggagcttactgcggaatgggtgaaaataaggataagccttacctgctgtacttcaacatcttttcatgcatcctgtcttccaacataattagcgttgcagagaatggcctgcagtgccccactccccagacggtgataactagtttgcagcaggaactgtgccccagtttcttacttcctagcgccccagcgctgggtcggtgcttcccctggacaaacatcaccccccctgcgttaccaggtataacaaatgacaccacaatccagcagggtatctccggtctaatcgattccctgaacgcaagggacatcagcgtcaaaattttcgaagacttcgcacaaagttggtactggatcttagtggctctgggagtcgcactcgtgttatcactgctctttatccttctgctacggctggtcgccggtccactcgtgctggtattaatcttgggagtactgggcgtgctagcctatggcatatattactgctgggaggaatatagggttctccgcgataaaggagctagcatatctcaacttggttttacgaccaatttgagtgcctatcagagtgtccaggagacctggcttgccgctctcattgtcctcgccgttctggaggcaatcctcctgcttgtcctgatatttctgcgccaacgcattaggattgctattgcactgctgaaggaagcctccaaggccgtgggccaaatgatgtccaccatgttctatcctttggttacatttgtgcttctcctgatctgcattgcctactgggccatgacggccctgtacctggcgacctctgggcagcctcaatacgttctctgggcctcaaacatcagctcccccggatgtgaaaaggtgcccattaatacaagctgtaatcctaccgcccacttggttaactcttcatgccctggcttaatgtgtgtcttccaggggtactcgagcaaggggctgattcagaggagcgtttttaaccttcagatctacggggtgctgggcctgttctggaccttgaattgggtcctggcactgggccagtgtgttctagctggcgcattcgcatccttctactgggccttccataagcctcaggatatacctactttcccattgatttctgcattcatccgtaccctccggtatcataccgggtcactcgcgttcggggctctcattctcacactcgtgcagatcgctcgcgtgatcctggagtatattgaccacaagctgcgtggggtccagaaccctgtggccagatgcataatgtgctgtttcaagtgctgtctgtggtgcctggaaaaatttattaagtttctaaatcggaatgcttacatcatgatcgccatttatgggaaaaatttttgcgtgtctgccaaaaatgcttttatgctgctgatgcggaatatcgtgcgggtggtggttcttgataaggtcacagatctcttgctgttttttggaaagctcctggtggtggggggtgtgggcgtactgagcttcttctttttctccgggcgaatccctggtttggggaaggactttaaaagtcctcacttaaattattactggctcccaatcatgacatctatactgggcgcatatgtgatcgcgagcggattcttctccgtttttgggatgtgcgttgacaccctgttcctttgtttcctcgaggacctcgaacggaataacggaagcttagaccgcccatactacatgtcgaaatcactccttaagatactaggtaagaagaacgaagcacctcccgacaataagaagcgcaagaaatag

SEQ ID NO: 241699 - DNA, 1905 bp, synthetic construct
  misc_feature 1..1905: note = Description of Artificial Sequence: Synthetic coding sequence
  source 1..1905: mol_type = other DNA
atgggagaaaataaagacaaaccatacctgttatattttaacatcttctcttgcattctaagcagcaatatcatctccgtggctgaaaatggacttcagtgtcccacacctcaggtttgcgtgagcagttgtcccgaggatccctggactgtgggcaagaacgagttttctcagacagtgggggaagtgttttatacaaaaaacaggaacttttgtctgcccggagtaccctggaacatgaccgttattacgtccctccagcaggaactgtgccccagttttctgttgccctccgctcccgctctaggcaggtgttttccgtggacgaacattacgccgcctgctctccccggaatcaccaacgacaccacaattcaacagggaatctctggcttgatcgacagcctcaacgccagagacatttctgtaaaaattttcgaggacttcgctcagtcctggtactggattctggttgcgttaggagtagctcttgtgttatccctgctgttcattctgcttttacggctcgtagcaggacctttggtgctcgtgctcattctcggggtactgggcgtgcttgcatacgggatctattattgctgggaagagtaccgcgttctgcgagacaagggcgctagcatttctcaacttggatttactactaatctctcggcctaccagagcgtacaggagacctggctggcagccctgatcgtactggctgtcttagaagccattctgttattggttttaatctttcttcgccagcggatacgaattgcgattgccctgctgaaagaagcaagtaaggctgtgggccaaatgatgagcaccatgttctacccgctagtcacattcgtcctgctcctgatctgtatcgcttactgggctatgacggccttgtacctggcaacatccgggcaaccccagtatgtgctgtgggcatctaacatctcttcccccggatgtgaaaaagtccccataaatacttcatgcaaccctactgcgcatttggtgaactcaagctgccctggcctcatgtgtgttttccagggatacagctctaaagggttgattcaacgctccgttttcaatctgcagatttatggagtgctaggattgttctggacactaaactgggttctagctcttggccagtgtgtcctggccggtgccttcgcgagcttctactgggcgtttcacaagccccaggacatcccaacattcccacttatcagcgcgtttatacggactctgcggtaccacactgggagcctggcatttggggctttaattcttaccctcgtacagattgcacgggtgattctggaatacatagatcacaagctgagaggggtccaaaatcccgtcgcccgatgtatcatgtgttgcttcaaatgctgcctttggtgcttggaaaaatttataaaatttctgaataggaacgcttatattatgatagcaatctatggcaaaaatttttgtgtcagcgcgaaaaacgccttcatgctgctgatgcgaaatattgtgagggtggtcgtgttggacaaagttactgacttgctcctcttctttgggaaacttctggtcgtcgggggtgttggggttctaagctttttttttttctccggcagaattccagggcttggtaaggattttaaaagtccccatctaaactactactggctcccgatcatgacatcgatcctaggggcttacgttatcgccagtggcttctttagcgtttttgggatgtgtgtcgacactctgttcctctgtttcctcgaggatctggagcgcaacaatgggagcctggatcgaccttactatatgtctaagagtttactcaagatcctgggcaaaaaaaatgaggccccaccggacaacaaaaagagaaaaaagtag

SEQ ID NO: 241700 - DNA, 2007 bp, synthetic construct
  misc_feature 1..2007: note = Description of Artificial Sequence: Synthetic coding sequence
  source 1..2007: mol_type = other DNA
atgggcggtaagcaacgtgatgaagatgatgaagcatacggtaaaccagttaagtacgaccctagctttcggggtcccatcaaaaaccgatcttgcacagacgtcatttgctgcgtgcttttcttgttgtttatcttggggtatattgtggtcggcattgttgcgtggctgtatggggatccgaggcaggtgctgtaccccagaaattcaaccggtgcgtactgtggcatgggcgaaaataaggacaagccctatctcctgtattttaacattttctcctgtattctgagttccaacataatctcagttgccgaaaacggcttgcaatgtcccacccctcagactgttattactagcctgcaacaggaactgtgtccatcttttctgctgccttctgcgcctgctctgggcagatgcttcccatggacgaatgtgaccccacccgctctgccaggaattacaaatgatacaaccatccagcagggaatttccgggctgatcgattcattaaatgcccgtgacataagtgtgaaaatcttcgaggatttcgcccagtcatggtattggatactggtcgccctgggagtggccttggtcctctccctcttgtttatcctgttgctccggctagttgctgggccactcgtgttagtgttgatcttaggggtgctgggggtgctagcttatggcatttattactgttgggaagagtaccgggtgctgagggataaaggcgcatcaattagtcaactagggtttacgaccaacctctccgcataccagtctgtccaggaaacctggcttgcggcactgattgtcctcgctgtcctcgaagcaatacttcttttgatgctgattttcctcagacagcgcatcaggatcgccatcgctcttctgaaagaggcttctaaggccgtcggtcagatgatgagcacaatgttctatccgcttgttacctttgtgctgctgctgatttgcatcgcatactgggccatgaccgccctctatttggccacgagcgggcagccacaatatgtgttatgggccagcaatattagctcgcccggatgcgaaaaggtgcccatcaatacatcatgcaatcctactgcgcacctcgtcaactcttcctgccccggactcatgtgcgtgttccagggctacagcagcaagggcttgatccaacggagcgttttcaacctgcagatttacggcgtcctggggctgttctggaccttaaactgggtacttgcactcggccagtgtgttttagcaggcgcttttgcgtcattctactgggccttccataagccacaagacataccgacctttcccctcatatccgcatttatccgaacgctgcgctatcacaccggcagtctagcgtttggagcccttatccttaccctcgtccagattgcaagggtgattctcgagtatatcgaccacaagctgagaggagtacagaacccagtcgcaagatgtatcatgtgctgcttcaagtgctgtttatggtgcctggagaagtttatcaagtttctgaaccggaatgcgtacatcatgatcgcaatctatggaaaaaatttctgtgttagtgccaagaatgccttcatgttgctgatgcgtaatatagtccgtgtggtggtcctggataaggttactgacctcctgctcttctttggaaaattgctcgttgtggggggagtaggcgtgctgagtttcttcttttttagcggtagaattcccggtctgggcaaagactttaagtccccacacctcaactattactggctcccaattatgacctcgattcttggagcatatgtgattgcctccggcttcttctcggtttttggaatgtgcgtggataccctgttcctgtgctttttggaggatctggagaggaacaacggaagcctggaccggccttactatatgagcaagagtctcctgaagattctcggtaaaaagaatgaagcaccaccagataacaagaaaagaaagaagtag

SEQ ID NO: 241701 - DNA, 2007 bp, synthetic construct
  misc_feature 1..2007: note = Description of Artificial Sequence: Synthetic coding sequence
  source 1..2007: mol_type = other DNA
atgggcggaaaacaaagagacgaggacgatgaagcttatgggaaaccagtgaaatacgacccaagctttagaggtcctatcaaaaatcgcagctgcactgacgtgatctgctgcgtgcttttcctgctctttattttggggtatatcgtcgtgggcatcgttgcctggttgtacggtgacccgcgtcaggtgctgtaccccagaaactccacgggagcatactgcggcatgggagagaacaaagacaagccatatctcttatatttcaacattttttcctgcatcctgtcctcaaatatcatctcagtggcggaaaacggactacaatgtccaacgcctcagacagttattaccagtctccaacaggaattatgcccaagtttcctcctcccttccgcacctgctctggggaggtgcttcccatggacaaatatcaccccccctgcactgcctggaatcacgaacgacaccacaatacaacagggaatctcaggtttaatcgactccctgaatgctagagacatatcagtgaaaattttcgaagacttcgcccagtcttggtactggattctggttgccctgggcgtggccctggtcctctctctactctttatcctgctgttgcgtttggtcgctgggcctttggtgttagtgcttattctgggggtgttgggggtgctggcctatggcatttattattgttgggaagaatacagagtcttaagggataagggggcatctatatctcagctgggatttaccacaaatctctccgcctaccaatccgtgcaggagacctggctcgctgccctgatcgtgttggcagtcctggaggccatactgctgctggtgctgatcttcctgagacagcgtatccgaatcgcaattgccttgctcaaagaagcctccaaagccgttgggcagatgatgagcaccatgttctacccccttgtgaccttcgtgctccttcttatttgcattgcctactgggcaatgaccgccctgtacctcgcaacctccggacaacctcagtacgtgttgtgggctagtaatatctcctcgccaggttgtgagaaagtgcccatcaatacgagctgcaaccctacggcacacttagtcaactcaagttgtcctggactgatgtgcgttttccaagggtactcttcaaagggcctgattcagagaagtgtgttcaacctgcaaatatatggcgtgctggggctattctggacactaaactgggtgctggctttgggacagtgcgtactcgccggagcttttgcctccttctattgggccttccataaaccgcaggacatccctaccttccccttgataagtgcattcatccggaccctgcggtatcacacaggctccctcgcttttggcgcattgatcctaacattggtgcagatcgcacgggtcatactagagtacatcgatcacaagcttcgcggtgtgcagaatccagtcgcacggtgtattatgtgttgcttcaaatgctgcctatggtgcctggagaagttcatcaaatttttaaatagaaacgcatatattatgatcgccatctatggcaagaacttttgcgtttcggcgaaaaacgcatttatgttgttgatgcggaacatcgtgcgagtggtggttttggataaggtgaccgatctgctgcttttctttgggaaacttctggtggtgggcggagtaggcgtgttatcctttttcttttttagcggccgtatcccaggcttagggaaagatttcaaatctccgcacctcaactactattggctgcctatcatgacaagtattctgggggcatacgtgattgccagcggctttttctccgtgtttggaatgtgtgtggacaccctcttcctgtgcttccttgaggatttagaaaggaacaatggcagcctggatcgaccttactatatgtctaagtctctgctgaagatcctcggaaagaagaatgaggcacctcctgacaataaaaagcgaaagaaatag

SEQ ID NO: 241702 - DNA, 1905 bp, synthetic construct
  misc_feature 1..1905: note = Description of Artificial Sequence: Synthetic coding sequence
  source 1..1905: mol_type = other DNA
atgggtgagaataaagataaaccctatctattatactttaacatcttctcttgtatcctaagcagcaacatcatctctgtcgcggaaaacggtttgcagtgccccacccctcaagtttgtgttagcagctgcccagaagatccatggactgtaggaaagaacgaattctctcagacggtgggagaggttttctacacaaaaaatcgaaacttctgcttaccaggcgtgccatggaacatgaccgtgatcaccagtctgcaacaggagctctgcccgtcctttttattgccctctgctcccgctctgggaaggtgttttccatggacgaatataactccccctgccctaccagggattactaacgataccaccatccagcagggcatctctggtctgatcgactctcttaacgcaagggacattagtgtgaagatattcgaggacttcgcccagagttggtactggatcctggtggcactcggcgtggccttagtactgtccctcctcttcattcttctccttcggctagtcgctggtccacttgtccttgtgctgatcttgggagtcttgggtgtcttggcttacggaatctactattgctgggaggagtacagggtgctgcgagacaaaggggcttcaatttcccagttaggttttactacaaatctgtcagcttaccagtcggtacaggagacatggctggccgctctcatcgtgttagctgtcttggaggctatcctcctcctggtgctgatcttccttagacagagaattcgaatcgccatcgctcttctgaaggaggccagtaaagccgtagggcaaatgatgtccaccatgttctacccactggtgacatttgtgctactcttgatatgcattgcgtattgggcgatgacggccttgtatttagctactagtggacagccccagtacgtgttgtgggcttcgaatatcagcagtcctggatgcgagaaggtacctatcaataccagctgcaacccaactgcccacctcgtgaattcctcctgtcccggacttatgtgcgtctttcaaggctatagctcaaaaggtctgattcagaggtctgtattcaaccttcaaatttatggcgtgctggggctgttttggactctgaattgggtgctggccctcggacaatgtgtactcgcaggggcttttgcctcattctattgggccttccacaagccgcaagatattcctacctttccgttgatttcggccttcatcagaaccctgaggtatcatactggaagtcttgcctttggagcactgatattaactctagtgcaaatcgctcgagtgattctcgagtacattgaccacaaactgagaggcgtacagaatcctgttgctagatgcataatgtgttgtttcaagtgctgcctctggtgcttggaaaagtttatcaaattcctaaatcggaatgcctacatcatgatagctatctacggaaaaaacttttgcgtgagcgcaaagaatgctttcatgctgctgatgagaaatatagttagggtggtcgtgctcgacaaagtgaccgatttactcctcttctttggtaaacttttagtggtgggaggcgtgggcgtgctgtctttcttttttttttctggcaggattcctggcctaggaaaagactttaagagcccccatctaaactactattggctgccgattatgacatccattcttggagcctacgtgattgctagtgggttttttagcgtgttcgggatgtgcgtggacaccctgtttctctgttttctcgaggatcttgagcgaaacaatgggtccttggacaggccctattatatgtccaagagcttactcaagatcctaggcaaaaaaaatgaggcgccacccgacaacaaaaaacgaaagaagtag

SEQ ID NO: 241703 - DNA, 2247 bp, synthetic construct
  misc_feature 1..2247: note = Description of Artificial Sequence: Synthetic coding sequence
  source 1..2247: mol_type = other DNA
atgatacccgctgcctccagtactccaccaggcgacgcccttttcccgtcagttgcccctcaggacttttggcggtctcaggttaccggttattctggaagtgtgacccggcatctttcacacagagctaataatttcaaacgccacccaaaaagacgcaagtgtattaggccttcaccacctcccccaccaaataccccatgccctctcgaactagtagacttcggtgacttacatccccaacgctcttttcgggagctgctttttaacggctgcatactgttcggtatagaattctcatacgccatggagaccgcatatgtcacccctgtcctcctccagatggggctgccggaccagctttactctctggtgtggtttatctctcctatcctgggatttctgctgcagccactcctgggcgcttggtctgaccgatgtacatcccggttcggccgaaggcgtccattcatattagttctcgcaatcggcgctctgctggggctttcacttttgctcaacgggagagacattggaattgctctggccgacgtgacaggcaatcacaaatgggggctcttgctgactgtgtgcggagtagtcttgatggatttctcggccgatagcgcagataacccctcacatgcctacatgatggatgtttgctcaccagctgatcaggaccgcggactgaatattcacgccctgttggcgggtctcggtgggggatttggctacgtagtgggtgggattcactgggataaaactggtttcggccgagcgctgggaggccagctgcgcgtgatctacctttttactgctgtgaccctttctgtcacaactgtgcttacactcgtgtctataccagaaaggcccctgcggcctcccagcgagaaacgagcagccatgaagtctcctagtctgcctcttcctccctcccctcctgtgcttcctgaggaaggacctggagactctctgccatctcatactgccacaaacttttcctcccccataagtcccccttcgcccctcaccccaaagtatggcagttttatctctagagacagctccctaaccgggatatccgagtttgccagcagcttcggaactgccaacatcgactcggttctgatcgattgctttactggcggacacgactcatatctggctatccctggctccgtccctcggccaccgatctctgtttcctttcccagagctcctgacggcttctacagacaggaccgagggctgctggagggtagggaaggtgccttgacctccggatgcgatggggacattctaagagtgggttcgctggatacttccaaaccccgtagttcaggaatcttgaaacgacctcagactttggctattcccgacgctgcaggcggaggcggacctgagacctcaagacggaggaacgtcactttctctcagcaggtggctaatattctgctgaatggcgttaaatatgagagcgaactcaccgggtcttcagaaagagcggagcaaccgctgagcgtcggacgtttgtgctcaaccatttgcaacatgccaaaggcattgaggaccttgtgtgttaaccactttcttggctggcttagcttcgagggtatgctgcttttttacacagattttatgggcgaggttgtgtttcaaggggacccaaaggcccctcacacctccgaagcttatcaaaagtacaatagcggcgtcactatggggtgttggggtatgtgcatctacgcattctccgcagctttttactctgccatactggagaaactcgaggagtttctgagtgtgagaacactctattttattgcctacctggcattcgggctcggaacaggattggccacactgtctaggaatctctacgttgtgcttagcctttgcattacctatgggatactcttctcaacgttatgcacacttccctattccctcctgtgcgactattaccagtcaaaaaagtttgcaggaagcagcgccgatgggacaagacggggaatgggagtagatatctctcttctgtcgtgccaatactttttagcacagatcttggtttcgttagtcttgggacctcttacctcggcagtggggtcggctaatggcgtgatgtattttagcagtctggtgagcttccttggctgtctgtattcctcattgttcgtaatttatgaaattcccccatcagacgcagccgatgaggaacaccgtcccttgctgttaaacgtctag

SEQ ID NO: 241704 - DNA, 2349 bp, synthetic construct
  misc_feature 1..2349: note = Description of Artificial Sequence: Synthetic coding sequence
  source 1..2349: mol_type = other DNA
atgctacagcagcctggaccacgaccaggccgacagcagccctccggggacagggacgcatgtcggctgcacccccagggcaggccaccagccctacccacaatgattccagcagcctcatctacaccccctggggacgcactcttccccagcgtcgccccacaggacttctggaggtcacaagtgacaggctactcagggagtgtcacaagacacttgtcacaccgagcgaataatttcaagcgccatcccaaaaggcgtaagtgtattaggcctagtccacctccgcctcctaataccccttgcccgttggaactggtggactttggagacctccatccgcagcggagttttcgtgaactgctgttcaacggatgcatactctttggaatagagttctcatacgccatggagaccgcctatgtcacccccgtgctgctgcagatgggcctacccgaccagctgtattctctggtgtggttcatttctccaattctcggcttcctccttcaacctcttctgggcgcttggagcgacaggtgtacttctaggttcggcagaagacgacccttcattctggtgttggccatcggcgctctcctcggattaagcctcctgcttaacggtagggacatcggcattgcgctcgctgacgttaccggcaaccataagtgggggctcttactgacggtgtgcggcgtcgtgctcatggacttcagtgcggactcagcagataaccccagtcatgcttacatgatggacgtgtgctctccggcagaccaggatcgtggcctaaacattcatgcactcctggcgggactagggggtggatttggctacgtggttggtggcattcattgggacaagaccggcttcggtcgggctctagggggacagctcagagtgatttatttgttcactgcagtaaccctatccgtgactactgtcttgactcttgtctctattcccgagcgtcctctgcgcccacccagtgaaaagagagccgctatgaagtccccttctctccctctgccgccatcccctccagtgctccctgaggaaggtccaggggattccctgccctcgcacaccgctacaaatttttcctcgcccatttcaccgccatctcctctgactccgaagtatggatcttttatttcccgggattcctcactgaccgggatttcagagtttgcgagcagtttcggtacagccaacatcgactcagtactcattgattgtttcaccgggggacatgactcttatcttgcgattcccggtagcgtccccagacctccaatttctgttagtttccccagggcacccgacggattctatcgccaggatcggggacttctggaagggagagagggtgccctgacttccgggtgcgacggcgacatcctcagggtaggttcacttgacacaagcaagccaagatccagcggcatattaaagcggcctcagactttggctatccccgacgcagccggaggcggaggaccggaaacatctcggaggagaaatgtgacctttagccaacaagtggcaaacattctactcaacggtgtgaaatacgaaagcgaactgaccggatcctctgagcgcgctgagcagcccctgtccgtcggcagattgtgcagtaccatttgcaatatgcctaaggctctgcggaccctgtgcgtgaaccacttcctcggctggctttcttttgagggcatgcttctgttttatactgattttatgggggaagttgttttccagggtgatcctaaagctccacatacctccgaggcttaccagaaatacaacagcggggtgacgatgggttgttggggcatgtgtatctatgctttttctgccgctttctatagcgccatcctggaaaaacttgaggaattcttgtccgtgagaactctgtatttcatcgcctacctcgcctttggcttaggcacaggtctggccacactgtctcgcaacctgtatgtcgtcctgtcactttgcataacctacggaattttgttcagcactctgtgtaccctgccatattccttgctttgcgattattatcagagtaagaagttcgctggaagttcagccgatgggactcggaggggaatgggggtcgacatcagtctgctgagttgccagtactttctggcacagatactcgttagcttagtcctgggacccttgacctccgccgtgggttccgccaatggcgtaatgtacttttccagcctcgtcagttttctggggtgcctctacagctccctttttgttatttacgagatacctccaagcgacgctgcagacgaggaacaccggccacttctactgaacgtttag

SEQ ID NO: 241705 - DNA, 2247 bp, synthetic construct
  misc_feature 1..2247: note = Description of Artificial Sequence: Synthetic coding sequence
  source 1..2247: mol_type = other DNA
atgattcctgccgcatcttcgacgccccctggggacgctctatttccatcagtcgccccacaagacttctggagatctcaggtgaccgggtatagtggcagcgttaccagacacctgtcacaccgcgcaaataacttcaaaagacaccctaaacgccgtaagtgcatcagacctagcccccctccccctccaaatacgccatgcccacttgaattggtggattttggggatttgcatccacagagatcattccgcgaactgctctttaacggttgcatactgtttggcatcgagttttcctatgctatggagacggcctacgtgactccggtgcttctgcagatggggcttcccgaccagttgtatagcctggtctggttcatctcacctattttggggtttctgctgcaacctctcttgggagcatggtccgaccgctgtacctcaagattcggtcgcaggcgccctttcatcctggtcctggccattggcgctctgttgggactcagcctgctgctcaacggcagagacattggcattgccttggcagacgtcactggcaaccacaagtgggggctcctactgactgtgtgcggcgtcgtgttgatggatttcagcgccgactcagcggataatcccagtcacgcgtatatgatggatgtgtgctctccagctgaccaggacagagggctgaacatccacgcactcctggctggcctgggcggtggcttcggctacgtggtcggcggtatacattgggataaaacagggttcggccgtgcacttgggggacagctccgggtcatttacctctttactgcagttactctcagcgttacaactgttctcaccttagtaagtattccagaaagacctctacgccctccaagtgaaaagcgagccgcaatgaagagcccatcgttgcctcttcctccatcaccccctgttctgcctgaagaagggcctggcgacagccttccatctcacacagcaactaacttttcatcacctatctcaccacccagtcctcttacacctaagtatggctcttttatatccagggattcttctctcaccgggatttctgaatttgcgagctccttcggaaccgcgaacattgattccgtcctaattgactgctttaccgggggacacgacagttatctcgctatccctggctccgtccccagaccaccaatttctgtatctttcccgcgagccccagatggattctatcggcaggatcgaggtttactcgaaggacgagaaggggctctcacaagcgggtgcgacggggacattttacgcgtcggtagcctcgataccagtaagccgaggagtagcgggatcttgaaacgcccacagaccctggcaatacctgacgctgccggaggcggaggccctgaaacgagccggcgacgtaacgtcaccttcagccaacaggtggctaacatccttctcaatggggtcaagtacgagtccgaactcactgggtcgtccgagcgtgcagagcaaccactgtccgtggggagactctgtagcaccatatgcaacatgccgaaagcactgaggacactttgtgtgaatcacttcctcggctggctgtcattcgaggggatgctgctcttctatacggactttatgggcgaggtcgtatttcagggcgaccccaaggcacctcacacaagtgaagcttatcagaagtataatagcggagtgactatgggttgttggggaatgtgcatttacgctttttcagccgctttttactcagcgattcttgagaaactggaggagtttctgtctgtccgcacactttactttattgcctacttagcctttggtttgggcacaggactcgccacactctctcgcaacctatacgtggtgttgagtctgtgcataacctatggaatcctgtttagcactctctgcacactgccttacagtttgctgtgtgattattaccagtctaaaaaattcgctggctcctcagccgatggtacacgacgaggcatgggcgttgatataagcctcctgtcctgtcagtacttcttagcccagattttggtgtctctggtgctgggccctctgacaagcgcagtgggcagcgcgaacggcgtcatgtacttttcttcattggtatcattcctgggctgcctgtacagctctcttttcgtcatttatgaaatccctccgtcagatgccgcagacgaggagcatcggccattgctcttgaatgtatag

SEQ ID NO: 241706 - DNA, 1593 bp, synthetic construct
  misc_feature 1..1593: note = Description of Artificial Sequence: Synthetic coding sequence
  source 1..1593: mol_type = other DNA
atggggagcaattccgggcaggccggtcgtcacatttataagtcactcgccgatgacggcccttttgacagcgtagaaccccctaagcggcctacatccaggttgataatgcacagcatggcgatgtttggtcgggaattctgctatgcggtcgaagcggcttacgtgacccctgtgctcttaagtgtcggactgccatcgagcctgtattcgatcgtatggttcctgtcccctatcctggggtttctactgcagcccgtggttggtagcgcatctgaccactgtcgcagcagatggggacggcgtaggccctacatcttgaccctcggcgtcatgatgctcgttggcatggcactgtatttgaatggcgctactgtggtcgctgcacttattgcgaatccgagaagaaagttagtttgggcgatcagtgtcactatgatcggcgtcgttcttttcgactttgccgcagactttatcgatgggcctatcaaagcgtacctgtttgatgtgtgttctcaccaggacaaagagaaagggctgcactaccacgctctgtttactgggtttggcggtgctctggggtacttactcggagccatcgattgggcacacttagagctgggaaggctactgggaacagaatttcaggttatgttctttttctccgccctcgtactaacactgtgtttcacagtccacttgtgcagcatctcagaggctccattgaccgaggtggcaaagggcattcccccacaacagactccgcaagacccacctcttagctccgacggcatgtacgaatatggatctattgagaaagtcaagaatggctatgtgaatccagaactggcaatgcagggcgcaaagaataagaatcacgcagagcaaacccgccgagctatgactctgaagtcattgctgcgggctttggtgaatatgccaccccactaccggtacctctgtatttcacatctgatcggatggacagccttcttgtcaaacatgctattttttacagattttatgggacagatcgtgtacaggggagacccctactctgcgcataattctactgagttcctgatttatgaacgtggcgtggaggtcgggtgctggggtctgtgtattaattcagtgttctcatcactgtattcctacttccaaaaggtgctggtctcctacattggactcaaggggctgtactttaccgggtacctgctcttcggactgggtaccggatttattgggcttttcccaaacgtctattcgaccttagtgctgtgttcactttttggggtgatgtcctcaactctgtacacggttccattcaaccttatcaccgagtaccaccgggaagaggagaaggaacgccaacaggcccctggaggtgacccggacaacagtgtgcgaggaaaaggtatggattgtgcaacactgacttgcatggtgcagctggctcagattctagttggtggcggactgggatttctggtcaacactgccggtacagttgtagtggtcgtcataacagcttccgcagtagcgttgattgggtgttgcttcgtggctctattcgttcgctatgtcgattag

SEQ ID NO: 241707 - DNA, 1416 bp, synthetic construct
  misc_feature 1..1416: note = Description of Artificial Sequence: Synthetic coding sequence
  source 1..1416: mol_type = other DNA
atgggctccaactccggacaggcgggaaggcacatttataagtccctcgctgacgatggccctttcgattccgtagagcctccaaagcgacctacctcaaggctaatcatgcactctatggccatgttcggccgtgaattctgctacgccgttgaggcagcctatgtgaccccagtgctcctgagcgtggggctaccttcaagcctgtactcaatagtgtggtttctcagtccgatcttggggtttcttcttcagccagtcgtcggttccgcctcagaccactgccggtctagatggggaagacgacggccttatatacttactctgggcgtcatgatgcttgtgggaatggccctgtatctaaacggggctacagtggtcgccggattcggcggtgccttggggtatctgctcggagcaatcgactgggcacatcttgagctgggaagactattggggacggagttccaagtgatgttctttttctccgccttggtcttgacgctgtgcttcacggtgcatctatgcagtatctccgaggcaccactgacagaggtcgcgaagggtatccccccacagcaaaccccccaagatcctcccctgagctcagatggaatgtacgagtacggttccatcgagaaggtgaaaaacgggtatgtgaaccccgagctggcaatgcagggtgcaaagaacaaaaatcacgcagagcaaacgcggcgagccatgaccctcaaaagtctactgcgagcgttggtgaacatgccgcctcattatcgctatctgtgcatcagccatctgatcggttggactgcttttctgtcaaacatgttgttctttaccgattttatggggcagatagtttataggggagatccttactccgctcacaatagtactgagttcctcatttatgagaggggggtggaggttgggtgttggggactgtgcatcaacagcgtgttttctagtttatattcatatttccagaaagtccttgtctcatacattggcctaaagggcctttattttactgggtatctgttattcggcctgggcaccgggtttataggactctttcctaatgtgtattctactttggttctttgctccctctttggagttatgtcctcaacactttacacagtgccctttaacttgatcactgagtatcatcgggaggaagaaaaagagagacaacaggctccgggtggggaccccgataattccgtcagaggcaagggaatggactgcgctacgttaacctgcatggtccaactggctcagattttagtcggcggaggactgggattccttgtgaacacagcagggactgtcgtggtagtggtcatcacggctagcgccgtcgcccttataggctgttgttttgtggcgctgttcgtgagatatgtggattag

SEQ ID NO: 241708 - DNA, 897 bp, synthetic construct
  misc_feature 1..897: note = Description of Artificial Sequence: Synthetic coding sequence
  source 1..897: mol_type = other DNA
atgggatcgaacagtggtcaggcaggacgccacatctacaaaagtctcgccgatgatggaccatttgatagcgtggagcccccaaagcgaccaactagcaggcttattatgcatagtatggccatgtttgggagggaattttgttacgccgtggaagctgcatatgtgacccccgtgctgctcagcgtgggcctacctagtagcctatactcaattgtctggttcttaagtcctatcctggggtttcttttgcagccagttgtaggtagcgcttcggaccattgcaggtcccgctggggacgcagacgaccttacatcctgactctgggcgtcatgatgcttgttggcatggctctctatttgaatggggctaccgtcgtcgccgcattaattgccaacccacggagaaaactggtgtgggccatttctgtgacaatgattggagtcgtccttttcgactttgcagccgatttcatcgatgggcctatcaaggcctatctattcgatgtatgcagccaccaggacaaggaaaagggcctacattaccatgccctgtttacaggaactcgcagagcgatgaccttgaaaagtctgcttcgtgccctggtcaatatgccccctcactataggtatctttgcatcagtcatctgatcgggtggacagctttcctgtctaatatgctgtttttcactgactttatgggacagattgtgtataggggagacccttactcagcccacaattctactgagttcctgatctacgagcgcggtgtcgaggtggggtgctggggcttatgcatcaactcagtttttagcagtctctactcatgtaagtctttcagcctgctgagaatgtccagtaagagtttttggtctagcactacttggatctag

SEQ ID NO: 241709 - DNA, 1383 bp, synthetic construct
  misc_feature 1..1383: note = Description of Artificial Sequence: Synthetic coding sequence
  source 1..1383: mol_type = other DNA
atgggaagcaattctggccaggctggtagacacatctataagagtttggccgatgatggcccattcgacagcgttgagccacctaagcgacctacaagccgattgattatgcactctatggctatgtttgggagagaattctgctatgctgtggaggccgcatatgtgacccccgtgctgctgagcgtcggcctgccttccagcctctattctatcgtctggtttctttctccaatcctggggttcctcttacagcccgtggtggggtccgcctcagatcattgccgtagcaggtggggcagaagacggccatatatcttaacactgggagtcatgatgctagttgggatggcactgtacctgaacggcgctactgttgtggcagcattaattgctaacccccgacgcaagctggtgtgggccattagtgttacaatgatcggcgtcgtactgtttgattttgccgcagatttcatcgatggcccaattaaagcatatcttttcgacgtgtgctcacaccaggataaggagaaagggctgcattatcacgccctgttcacaggatttggaggagctctgggatatctgcttggggctattgactgggcccacctggagctcggcagactactgggtacagagttccaggtaatgttctttttctccgcactcgtgctaacactgtgctttacggtacatctgtgctcaattagtgaggctccattaaccgaagtcgccaaagggatcccaccacagcagacccctcaggacccccctctgagcagcgacggaatgtacgagtacggatctatcgagaaggtgaagaatggctacgttaaccccgaactcgcgatgcagggcgcaaagaacaagaatcacgcggagcagactcgtcgggcaatgactctgaagtccctgctgagggctctggtcaacatgccccctcattacagatacctctgcattagtcacctgattggatggacagcgttcctcagcaacatgttgttcttcaccgattttatggggcagatagtttaccgcggtgacccatattccgctcataactcaaccgaattcctgatttacgagcggggtgtggaagttggctgttgggggttgtgtatcaatagtgtgttctcctcactctactcttattttcaaaaggtcctggtgtcatacatcggcttgaaaggactgtattttacggggtacctgttgtttgggctgggaaccggctttatcggactcttcccgaacgtctacagtacccttgtgctgtgctcactcttcggagttatgtcctctaccttgtataccgtcccgttcaatttgatcaccgagtaccatcgggaggaagaaaaggaagtctgctgccactag

SEQ ID NO: 241710 - DNA, 732 bp, synthetic construct
  misc_feature 1..732: note = Description of Artificial Sequence: Synthetic coding sequence
  source 1..732: mol_type = other DNA
atgggttctaattcaggccaggcagggaggcacatctataaatccctggccgacgatggcccttttgacagcgtcgaaccacctaaaagacctacctcacgacttattatgcatagtatggcaatgttcggacgcgagttctgctatgccgttgaggctgcttatgtaactccggtactgttatccgtgggcctccctagctcattatactcaatagtctggttcttgtcgcctatcctgggatttctcttacagccagtagtgggctccgcctccgaccattgcaggtcccggtggggacgtagacgtccatacatactgactctcggcgtgatgatgcttgtcggtatggctctctacctcaatggagccaccgtggttgccgctctgatcgctaatccgcgtaggaagctcgtctgggcgatcagtgtaaccatgattggcgtggtgctgttcgattttgctgctgatttcattgacggacccataaaggcttacctctttgacgtctgttcacatcaagacaaggagaagggactccactatcacgctctgtttaccgattcacagggcaatgacatcaaggtcacagccgagtcaactggtgagcatgctagctctctccccctgccccttcaccaacctccgcactggatggatagtctccctgttcagcacgctgtattacacaggtttcacgggccagactgtgtcccaaggggctccctatag

SEQ ID NO: 241711 - DNA, 741 bp, synthetic construct
  misc_feature 1..741: note = Description of Artificial Sequence: Synthetic coding sequence
  source 1..741: mol_type = other DNA
atggcgttgtacttaaacggggctacggtcgtcgccggatttggaggtgcactgggatacctgctcggtgctattgattgggcccacctggagcttgggcgactgctaggaacagaatttcaagtgatgttcttcttcagtgccctcgtgttgactctgtgcttcactgtgcatttgtgttcaattagcgaagcccctcttacagaagttgccaagggcatccctcctcaacagacccctcaggatcccccattgtcaagtgatggcatgtacgagtacggcagcatcgagaaagttaagaacgggtatgtgaaccctgagctcgctatgcagggagctaaaaacaaaaaccatgctgagcagacccggagagccatgactctaaagagtttattgagagccctggtcaacatgccaccccactataggtatttatgcatttcacatttgatcgggtggaccgcctttctctccaatatgctctttttcaccgactttatgggccagatcgtctacaggggcgacccttattccgcacataattctactgagttcttgatatatgagcgaggcgtggaggtggggtgctggggattgtgcatcaactctgtatttagtagcctctattcttatttccaaaaggtcctagttagctatattggtctgaaggggctttatttcaccggatacctcctgttcggcctcggcactgggtttataggcctattccccaacgtgtag

SEQ ID NO: 241712 - DNA, 1662 bp, synthetic construct
  misc_feature 1..1662: note = Description of Artificial Sequence: Synthetic coding sequence
  source 1..1662: mol_type = other DNA
atggtgcaaagactctgggtttctcggctgctgaggcacagaaaggcgcagctattgttggtgaatcttctcacctttggtctcgaagtttgcctggccgctggcattacctatgtcccccctctgctcttagaggttggcgtggaggagaaatttatgacgatggtgctgggcattggtcccgtcctcggactagtctgcgtgcccctcttggggagtgcgtctgaccattggagaggccgttatggccgtcgcagaccctttatttgggcactgtcacttggcatcctcctgtccctgtttctgatcccccgtgctggatggctggctggccttctgtgccccgatcccagacctctggaactggccttgttaattttaggtgtcggcctgctggatttttgcggacaagtgtgttttacacccctcgaagccctgctctctgatttgtttagggatccagaccactgtagacaggcttacagcgtctatgccttcatgatctccctcggaggttgcttaggttatctgctcccagctattgactgggatacttcagcattggctccctacctcggtacccaggaggaatgtctcttcggcctactcacacttattttcttaacgtgtgttgcagcaacgttgctcgtggccgaggaagcagctctaggacccaccgagcctgctgagggcctgtctgccccatctctgtcaccccattgctgtccttgccgcgcacggttggcatttcgtaacctgggggctctgctgcctcgcctgcatcagctttgttgcaggatgccgaggactctgaggcgattgttcgtcgccgagttatgctcatggatggcactaatgacctttactcttttctatacggactttgtcggagaggggctgtatcagggcgtaccacgggctgagcccggaaccgaggctcgacggcattacgatgaaggtgtgcgcatggggagcctggggctttttctgcagtgtgcaatcagcctggtattttcattagtgatggataggttggtgcagaggttcggtacacgtgctgtatatctggcatctgttgccgcttttccggtcgctgccggagcaacatgcctgtcccacagcgtggcagtggttacagcatcagccgctcttactggcttcaccttttcagctctccagatcttgccttataccctggccagcttgtaccacagggaaaaacaggtgtttctgcctaagtatcggggagatacagggggagcttcttcagaagacagcctgatgacctcattcttgcccggaccgaagccgggagctcccttccctaatggccatgttggagctggaggctcaggcctcttgcctcctccccctgctctctgcggcgcatccgcatgcgacgtgtcagttagggtggtcgttggagagccaaccgaagctagagttgtccccggaagagggatttgccttgacctggctatcctcgactctgcgtttctgcttagccaggtggcaccctccctgtttatgggaagtattgtgcagctctcccaatccgtgaccgcatatatggtgtctgcggctggtctcggcctagtggctatttacttcgccacccaggtcgtgttcgacaaatcggaccttgccaagtacagtgcctag

SEQ ID NO: 241713 - DNA, 1293 bp, synthetic construct
  misc_feature 1..1293: note = Description of Artificial Sequence: Synthetic coding sequence
  source 1..1293: mol_type = other DNA
atggaaggatcagcatctccccctgaaaaaccacgcgctagaccagcagccgctgtattgtgccgaggcccagtggagcccttggtgtttctggctaacttcgccctggtgttacaaggcccactgacaacccaatacctttggcataggttcagcgcggaccttggctacaatggaactcgccagcgaggaggctgcagcaatagatctgcagaccctacaatgcaggaagtggagacgctgaccagccactggactctgtacatgaatgtgggaggcttcctcgttggccttttttctagtaccctgctcggcgcatggagcgattcagttggcagacggccactgctggtgctggccagcttaggcttgttgctccaggcccttgtgtccgtattcgtagtgcaattgcagctccacgttggctactttgttttgggccgaatcctatgcgccctcctgggtgattttggaggactcctggcagcctcattcgcgagtgttgctgacgtctcgtcttccaggtcccggacttttagaatggcgctcctggaggcctctattggggttgcaggcatgttggcctccctcctggggggacactggttgagagcacaggggtacgccaatccgttttggctcgctctcgctctgctgatcgctatgactttgtacgctgccttttgctttggcgagacgctgaaagaaccaaagtccacaagactgtttactttcaggcatcatcgctccatcgttcagctatatgtagcacccgctcccgagaagtcccggaaacatctcgcactatattcccttgctatcttcgttgtgatcaccgtgcactttggagcacaagacatacttactttatatgagctgagcacacctctgtgctgggattctaagctgatcggttatggtagcgctgctcagcatctgccctatctaacttctctcctcgctctgaaactcctccaatactgtcttgccgacgcttgggtggcggaaatcggtctggcctttaatatcctcggcatggtagtttttgctttcgccaccatcacgcccctgatgttcacaggggctctttttagtgccgtggcatgtgtgaattctcttgcaatgttgaccgcctcaggttttaatagcctgtacccagccacactcaactttatgaaggggttcccatttttacttggagccggactcctgctgatcccagcagtgctgatcggaatgctggaaaaggccgatcctcacctagagttccaacagttcccacagagcccttag

SEQ ID NO: 241714 - DNA, 1380 bp, synthetic construct
  misc_feature 1..1380: note = Description of Artificial Sequence: Synthetic coding sequence
  source 1..1380: mol_type = other DNA
atggagggctctgcctcgccccctgagaagcccagagcccgtcccgctgcggcagtgctgtgtcggggacccgttgaacccctagtgtttttagccaacttcgcattggttcttcaggggcctttgacgacacaatatctttggcatcgctttagcgctgacctggggtacaatgggacaaggcagcgaggagggtgctccaataggtctgcagaccctaccatgcaggaggttgagactcttacatcccattggaccttatacatgaacgtcggtgggtttctggttgggctgtttagcagtaccttgctgggtgcctggtcagattccgtaggaaggcgcccactgctggtgctggcctccctgggactactccttcaggctctggtctccgttttcgtggtgcaactgcagctgcacgtggggtacttcgtactggggcgaattttgtgtgctctcttgggtgattttggagggctactggccgcttccttcgcgagtgtggctgatgtcagttcgtcgcggtctagaacttttcgtatggcgctgcttgaggcatctataggagtggcagggatgttagcctcgttacttggtggccactggctgagggcccagggctatgccaatcctttttggttagccctcgcactattgattgcaatgactctttacgccgctttctgctttggggagacacttaaggaacctaagtctacgagactgtttacgtttcgccatcataggagtattgtgcagctgtatgtcgctcccgcacccgagaaatctaggaagcacctcgccctctacagcctggccatttttgtggtcattactgtccatttcggggcacaagacattctgactctgtatgagcttagcacacccttgtgctgggactctaagcttatcggctacggatccgccgcacagcacttgccttacttaacatcgctgctggcattaaagttgttgcagtattgcctggctgacgcttgggtcgcagagatcgggctggcctttaacatactggggatggttgtgtttgccttcgcaactattactccgctgatgtttaccgggtatgggctcttatttctaagtttagtaataacccccgtgatcagggctaagctgagcaaactggtgcgggagactgagcagggcgcactgttctcagccgtcgcgtgcgtcaacagcctagctatgctgaccgcgtcaggcatcttcaattctctttaccccgctaccttgaacttcatgaagggcttccctttccttttgggcgcaggattgttgttgattcctgccgtacttatcggaatgctcgaaaaagcggatccccatctggagtttcagcagttcccacaatccccatag

SEQ ID NO: 241715 - DNA, 1428 bp, synthetic construct
  misc_feature 1..1428: note = Description of Artificial Sequence: Synthetic coding sequence
  source 1..1428: mol_type = other DNA
atgtcgcccgaggtgacgtgtccgcgacgaggacatctgccacgctttcaccccagaacctgggtcgagccagtcgtcgccagttctcaggtggcagcatctttatatgacgctgggcttcttctcgtggttaaagcatcatatggaactggcggatcgagtaaccattctgccagtccatcacctagaggggcactggaagaccagcagcagcgtgccatttctaacttctacattatctataacctagtggtgggactctccccccttctcagcgcgtatggcctgggctggctcagtgaccgttatcaccggaagattagcatttgcatgtcgttgctcggattcctgctaagtcggcttggcctgctcctcaaagtcttattggattggcccgtcgaagtgttgtacggggcagcggctttaaatggcttgtttggcggtttcagcgccttctggagcggcgtcatggccctcggcagtctcgggtcctccgaaggcaggagatccgtcagactcatcctaatcgacttaatgctaggcctggcaggcttttgtgggtctatggcctccggacacctgtttaaacaaatggccggacactctggccagggcctaatcctgaccgcctgttccgtatcgtgcgcttcgtttgccctgctctattcactattagtacttaaggtaccggaatcagtagccaagccgtcccaggaacttccggctgtggacacggtctcaggcacagtcgggacttaccgcactcttgatccagatcaactcgaccagcagtatgcggtcgggcacccaccatcacccggaaaagccaaaccacataagaccaccattgccttgctgttcgttggcgctatcatctacgacctcgcggtcgtcgggactgtagacgtgatcccgctgttcgtcttaagagaacccctgggctggaatcaagtccaagtggggtatggcatggcagcaggctataccattttcatcacctcttttctcggtgtgttggtgttctccaggtgcttcagggacaccacgatgatcatgattgggatggtctcattcggtagtggggctctgttgctggcttttgtcaaggaaacctacatgttctatatcgccagagccgtgatgcttttcgccctgatccctgtgacaaccatccgttccgccatgagcaaactcatcaaggggtccagttatggcaaagttttcgtcatattgcagctgtcccttgccctcacaggggtcgtcacctctacactgtataacaaaatctaccaactgaccatggacatgtttgtggggagctgcttcgccctgagctcatttctcagttttctggctatcatcccgatctccatagttgcatataaacaagttcccctgtctccttacggcgatattattgagaagtag

SEQ ID NO: 241716 - DNA, 1713 bp, synthetic construct
  misc_feature 1..1713: note = Description of Artificial Sequence: Synthetic coding sequence
  source 1..1713: mol_type = other DNA
atggaagcccctgaggaacccgctcctgtgcgcggaggcccagaggccaccctagaggtccgtgggagcaggtgcctgcgcttgtcagctttcagggaggagttgcgagcacttctcgtgctagcaggcccagcattcttagtgcaactgatggtgtttctgattagtttcatttcaagtgttttttgcggccatttggggaagctggagctggatgcggtaaccctcgctatcgcggttatcaatgttacaggagtttctgtgggattcggcctgtcaagtgcctgtgataccctgatatcccagacctacgggagccaaaatctgaagcacgttggagtgatccttcagcgctcagcactcgtgctgctgctgtgctgctttccgtgttgggccctgtttctgaacacgcagcacatcctgctgctatttcggcaagaccccgatgtctcacggctaacacaaacgtacgttaccattttcattccggcactgcccgcaacttttctgtatatgctccaggtgaaatatctcctaaatcagggcatagtgctgccccagatcgtaacaggcgtggctgcaaacctggttaatgcgctggcgaattacctctttcttcatcaacttcatctgggcgtgatcgggagtgctctagctaatctgataagtcagtacacactagccctgttacttttcctgtacatccttggcaaaaagctgcaccaggcaacatggggcggttggtcgctcgaatgtttgcaggattgggctagcttcctgagacttgctatccccagcatgttaatgctgtgcatggaatggtgggcctacgaagtgggcagcttcttaagcggcatcctgggaatggtcgagctcggcgcacagtcaatcgtctacgaactggctattatcgtctacatggtccctgctgggttctccgtcgccgcttcggtcagagtaggaaacgctttaggggcaggcgatatggaacaagcaagaaaatcctcgacggtgtcccttttgattaccgtgctctttgccgtggcattctccgtacttcttctaagttgtaaggatcatgtcggttacatattcacgactgatagggatattataaatctagtggcacaggtcgtgccgatatatgctgtgtcccacctgtttgaggcccttgcttgtacaagcgggggtgtgctgcgcggtagtgggaaccaaaaggtcggcgctattgtgaataccattggctactacgttgttgggctgccaatcggaattgcgctgatgtttgcaacgactctgggagtcatgggattatggtctggaataattatatgtactgtgtttcaagcagtgtgcttccttggctttattatccagctaaactggaaaaaagcatgccagcaggctcaggtgcacgccaacttgaaggttaacaacgtcccaagatctggtaattccgcccttccacaggaccctttgcaccccggttgtcccgagaacctggaaggaatcctcaccaatgatgtcggcaaaaccggagaacctcagagcgaccaacagatgcgtcaagaagagcccctgcctgagcatccgcaggacggggcaaagctttccagaaagcaactcgttcttcggagaggcctgctgctgctgggagtgtttttgattctgttggttggtatcttggtccgcttctacgtccggattcagtag

SEQ ID NO: 241717 - DNA, 1761 bp, synthetic construct
  misc_feature 1..1761: note = Description of Artificial Sequence: Synthetic coding sequence
  source 1..1761: mol_type = other DNA
atggaagctcccgaggagcctgccccagtccgcggagggccagaagccaccctggaggtgcgcggtagcaggtgcctccgacttagcgctttcagggaagagctgcgtgccttacttgtgctggccggacctgcattccttgtgcagttgatggtgtttctcattagctttatctcctcagtgttttgcgggcacttgggaaaactggagttggatgccgttacattagccatcgccgtgattaatgtgacgggcgtcagtgtgggcttcggcctgtcgagcgcttgtgacacgctaatttcccaaacctacggatcgcagaacctgaagcacgtcggggtgattttgcaaagaagtgccctcgtcctgctattgtgctgcttcccctgttgggccctgtttcttaacactcagcacattctactgctctttagacaggatccagatgtgagtaggctcacccaaacttacgttacgatctttatccctgccctgccagccactttcctgtacatgctacaggttaagtatctcttgaaccaggggatcgtcctgccacagatcgtcactggcgtcgcagccaaccttgtgaacgcgctggccaactacctgtttctgcaccaacttcaccttggggtaattggctctgccctggctaacctcatttctcagtacacgctggccctgctgctgttcttgtacatcctgggaaaaaagctccatcaggcaacttggggcggatggagtctcgagtgcctgcaggattgggcatcgttcctgcggctggccatcccttcaatgctgatgctatgcatggagtggtgggcttatgaggtcgggtccttcctcagtggaatccttggcatggtagaattgggggctcagtcaattgtatacgagcttgctataattgtctacatggtgccagccggtttttctgtcgctgcatccgtgcgggttggcaacgcactgggggctggggatatggagcaggcaagaaagtcttcaacagtgagtttactgattaccgtcttgttcgccgtagctttcagcgtcttgttgctaagctgcaaagaccacgttggttacatcttcactactgatcgagatataataaatctagttgctcaggtggtcccgatttatgccgtcagccatcttttcgaagccttggcctgcacatccgggggagtgttacggggaagcggcaatcaaaaagtgggagctattgtgaatactattgggtactacgttgtaggcctgcctatcggaatagccctgatgtttgccacgacactcggagtaatggggctgtggtccgggatcataatttgtaccgtcttccaggctgtctgctttcttggatttatcattcagctgaactggaaaaaagcttgccagcaggcccaggttcacgccaacctaaaggttaacaatgtgcctcgttccggaaattcagccctgccccaggatcccctccatccgggatgccccgagaacctggaggggattctaacaaacgatgtcgggaagacaggagagcctcagtctgaccaacaaatgcgacaggaagagccccttccagagcacccacaggatggggctaaactgtctcgcaagcagctggtgttaagaagggggctgctcctgctcggagttttcctcatactgttagcaggggttagatggtgtgaccactcctctctgcagcctagaacactgggcctccaggcaatcttactatgccagccccctgagtag

SEQ ID NO: 241718 - DNA, 849 bp, synthetic construct
  misc_feature 1..849: note = Description of Artificial Sequence: Synthetic coding sequence
  source 1..849: mol_type = other DNA
atggtcgagctaggtgcccagtcgattgtgtacgagctcgccatcatagtttacatggttcctgccggtttttctgttgctgcatccgtgcgggtaggcaatgcactcggtgctggtgacatggagcaggccaggaagagctccaccgtctctcttcttattaccgtgctgttcgccgtggcattttccgtgcttctactgtcctgtaaggaccatgtaggttatatctttacaactgaccgggatattatcaacctcgtggcccaggtagtaccaatttatgctgtctcccacctgttcgaagccttagcttgcacctctggcggtgtgctcaggggctcagggaaccaaaaggtcggtgcaattgtgaatactattggttattatgtcgttggtcttcccataggcattgcgctgatgttcgccaccacactgggcgttatgggcttgtggtcaggtattatcatctgcaccgtttttcaggctgtgtgcttcctaggctttattatccaactcaattggaaaaaggcatgccaacaggcccaagtccacgctaaccttaaagtgaataatgtcccacgaagtggcaattctgcgctgccccaggaccccctacacccaggatgcccggaaaatctggagggtatcttaaccaacgatgtcgggaagactggggagccccagtctgatcagcagatgagacaggaagagcccttaccagaacatccccaggatggtgcaaagctttcacggaagcaactcgtcctgcgtaggggcctactcttgctgggggtgtttctgatcctactagtcggaattctcgtgcgattttatgtgcgcattcaatag

SEQ ID NO: 241719 - DNA, 1332 bp, synthetic construct
  misc_feature 1..1332: note = Description of Artificial Sequence: Synthetic coding sequence
  source 1..1332: mol_type = other DNA
atggaggcccctgaagaacctgctccagtgagaggtggtcccgaggcaaccttggaggtgcggggaagccggtgcctccgactgtctgcattcagagaagagcttagagccttactcgtgttggcgggtcctgcctttctagtccagctgatggtgttcttgatctcattcatcagcagcgttttctgcggacaccttgggaagctggagctggacgccgtgaccttggcaattgccacatacgggagccaaaacctcaaacacgtgggggtgattctgcaaagatcggcactcgtgttgttgctgtgctgcttcccttgctgggcactctttctgaatacacagcacattttattgttattccgccaagacccggatgtaagcaggctcacacagacctacgtgaccatatttatccccgcattgcctgctacctttctctacatgctccaggtaaaatatcttttgaatcagggcatcgtcctgcctcagatagtcacaggcgtggccgcaaacctggtaaatgccttggctaattacttatttttacaccagttacatttgggggtgattggatcagccctcgcgaacctgatctctcaatataccttagcgctgctgctgtttctgtacattttgggtaagaagctgcaccaagccacatggggcggatggtcattggagtgtctgcaggactgggcctctttcttacgattagccatacccagcatgcttatgctgtgcatggaatggtgggcgtacgaagtgggctcttttctgagcggaattctcggtatggtagaacttggcgctcaaagtattgtctatgagctggctattatcgtttacatggtcccagcgggattcagcgtcgccgctagtgtccgcgtgggtaacgcactgggagcaggagacatggagcaggccaggaagagtagcaccgtatccctcctgattacagtgctgttcgctgtagcattctctgtgctgctcctgagttgtaaagatcacgtgggttatatatttaccaccgatagagatatcatcaacctggtggcacaggttgtgccaatatatgcagtcagccacctgttcgaggcccttgcttgtactagtggcggagttctcaggggctccggcaaccagaaggtgggggcaatcgtaaatactatcggctactatgtggttggtctgcccatcggcattgctctgatgttcgccaccaccctgggcgtgatggggtccgggacacgccagtttgagtcaaagcagcgcgcaagcgaatgggagttttgttccccctcgggctctgctagcccccgtgtaccctag

SEQ ID NO: 241720 - DNA, 738 bp, synthetic construct
  misc_feature 1..738: note = Description of Artificial Sequence: Synthetic coding sequence
  source 1..738: mol_type = other DNA
atgctcatgctgtgcatggagtggtgggcttatgaagtcggctcattcctgagcggtatactggggatggtcgagcttggggctcaatccatcgtgtacgaattagctatcatagtatacatggttccggctggtttctccgtcgcagcttctgtcagggtcggaaatgctttaggcgcaggcgacatggagcaggcgaggaaatcttctactgtaagtcttttgattaccgtgctgtttgccgtggcattttcagtgcttcttctctcctgcaaggaccatgtgggttacatctttacaacggacagagatatcattaatcttgtcgcccaagtggtgcccatttacgcagtgtcccacctgtttgaagccctggcatgtacaagcggcggtgttcttcggggatcagggaatcaaaaagttggcgctatcgttaatacaattggctactatgtcgtcggcctaccaatcgggatagcactgatgtttgcgacgacactcggtgtcatggggtgccctgagaatctggaggggatcttaaccaatgatgtgggaaaaactggggagccccagtctgatcagcagatgaggcaggaagaacccctgccagaacaccctcaggatggcgcaaagttgtcacggaaacaattggtgctaagacggggactcttgctgcttggcgttttcctcatcctgttggtcggaattctggtgcggttctacgtaaggatccagtag

SEQ ID NO: 241721 - DNA, 1761 bp, synthetic construct
  misc_feature 1..1761: note = Description of Artificial Sequence: Synthetic coding sequence
  source 1..1761: mol_type = other DNA
atggaggccccagaagaacctgctcccgtccggggaggaccagaagccactcttgaggtgcgtgggtctaggtgtttacgtctgtccgcattcagggaggagttgcgagctctgctagtgctggccggacccgctttccttgtgcagctcatggtctttctaatctcattcattagcagtgttttttgcggccacctgggcaaactcgagctcgatgcggtgactttggctatcgccgtgatcaacgtaactggggtttccgtgggctttggattgtctagtgcatgcgacacgctaatcagtcagacttacgggtcccagaatttaaagcacgtgggcgtgattcttcagaggagcgcgcttgtgctcttattatgttgctttccttgttgggcgctctttttgaacacccagcacatattgttattgtttcgacaggaccccgacgtctcccgccttacccagacttatgtgacaatcttcatcccagccctaccggcaacatttctgtacatgctgcaggtgaaatacctactcaaccagggaatcgtgttaccccagatcgtgaccggggtcgcagcgaatctggtgaatgctttggcaaattatctcttcctgcatcagttacatttgggagtcatcggaagcgctctagccaacctgatatctcaatatacgttagctctgttgttgtttctctacatcctgggcaagaaacttcaccaagcaacctggggagggtggagtctggagtgcctgcaggattgggcctcttttctccggctcgctattccttctatgctgatgctatgcatggaatggtgggcttatgaggtgggtagctttctgagtggtattcttggcatggtggagctgggtgcccaatccatcgtgtatgagctggccattatcgtctatatggtgcccgctggcttttccgtcgccgcttcagttcgcgttgggaacgcattgggcgctggtgacatggagcaagccaggaagtcgagtactgtaagcctgctcatcactgtcctgttcgctgtggcctttagcgtgctcttgctgtcctgcaaggatcacgtaggttatattttcactaccgaccgggatattattaacctcgtggcccaggtagtgccaatctacgcagtgagccacctttttgaggccctggcatgtacaagcgggggagtcttgagaggctcggggaaccaaaaagtgggcgcaatcgtcaacaccatcgggtattacgttgtcgggctgcctatcggaatcgccctgatgttcgcaactaccctgggcgtgatggggctgtggtccgggatcattatctgtactgtcttccaggctgtctgctttctgggcttcattatacagttaaactggaagaaggcttgtcagcaggctcaggttcatgcgaatctgaaggtgaataacgttcctcggagcggcaatagcgcattgccgcaagatcctctgcaccccggttgtcccgagaatctagaggggattctgacaaatgatgtgggaaagaccggggaaccacagagtgatcagcagatgaggcaggaggagcctcttccagagcacccacaagatggggcaaagctgtcccggaaacagctcgtgcttcggagaggattgctattgctcggtgtgttcctgatcttactggctggcgtacggtggtgtgatcacagctcgctgcagcctcgcaccctggggctgcaggccattcttctgtgtcagcccccagagtag

SEQ ID NO: 241722 - DNA, 735 bp, synthetic construct
  misc_feature 1..735: note = Description of Artificial Sequence: Synthetic coding sequence
  source 1..735: mol_type = other DNA
atggaggcacccgaggagccagcgcctgtgcgtgggggacccgaggcaacgctcgaagtgcgtggctcccgatgcctgcggttaagcgcatttagagaggagctgcgtgcgctcctggtcttggctggtcctgctttcctggtacagctgatggtgttcctaatttcctttatctccagcgtattctgtggccacctgggtaagctcgagttggatgcagtcacgctggccatcgcagtgatcaacgttaccggagtcagcgtgggatttgggctcagcagcgcctgcgacactttgatatctcagacctacggctcacaaaatctgaaacacgtgggagtcatcttgcaaaggtctgccctcgttctgttactgtgttgcttcccttgctgggcgctgtttctaaacacacaacacatcctgctgctctttcggcaggaccccgatgtttctaggcttacccagacttatgtgaccatatttattccggctttaccagctacattcctgtacatgctacaggtgaagtatctactcaaccagcggctctgcaccggcaaattagatttccctgtccacccaggctcgacgcctctctctcttcatccaagggagaagactgcctccagctacatgggcaggctcgtgcccagagtgcctgcgggactcggcctgctgcccccaccaggacaccctcagcacgcccacgcggttcacggagttgttggcctttag

SEQ ID NO: 241723 - DNA, 1809 bp, synthetic construct
  misc_feature 1..1809: note = Description of Artificial Sequence: Synthetic coding sequence
  source 1..1809: mol_type = other DNA
atggactccctacaggacactgtcgctctggaccacggaggctgttgtccggcattgagtcgactggttcctcggggattcggtacagagatgtggacactctttgctctgtccggcccattgtttttgtttcaggtgctaacctttatgatttatattgtcagtaccgtgttctgcggtcacctggggaaggtggagctggcttccgtcaccttagcagtcgcattcgtaaatgtctgcggagtgagtgtcggcgtgggcctgagtagtgcatgcgatacactcatgtcccagtcctttgggtctcctaataagaaacacgttggtgtaatcctacaaagaggggcactagtgctgctgctctgttgcttaccctgctgggctctattcctgaatacccagcatatcctcctgctctttcgacaagaccctgacgtgagtcgcctgactcaagactacgtgatgattttcatcccgggtctcccagttattttcttgtacaatttgctcgccaagtacctgcaaaatcaaggctggctgaagggtcaggaggaggaatcgccctttcagacaccgggactgtccattctgcacccgtcgcattcccatctgtctagagcaagttttcacttgttccagaagataacctggcctcaggtactcagcggggtggtcggcaattgcgtcaatggggtcgctaactacgcgctcgtatctgttctgaatctgggcgtccggggaagcgcctacgcgaacataataagtcaattcgcacaaactgtatttctgttgttatatatagtcctgaagaaactgcatctagagacttgggctgggtggagctcccaatgcctgcaagattggggaccctttttttcactggccgtcccatctatgctcatgatctgcgtggaatggtgggcgtatgaaatagggtcgttcttgatgggcctgctgagtgtagtggatctgagcgcccaagccgtgatctatgaggtcgcaaccgtgacgtacatgatcccgctcgggcttagtattggcgtatgtgtgagagtcgggatggccctgggcgctgcagatactgtgcaggcaaagcgctccgccgtaagtggagttctttccattgtggggatctcactagtgctaggcacactgatctctatcttaaagaaccagttaggtcacattttcacaaacgatgaagacgttatcgccctagtaagccaggttctgccagtatacagcgtgttccacgtgttcgaggcaatctgttgtgtgtatgggggagtgctgcgtgggaccggaaagcaggcattcggcgcagctgtaaacgcgattacctattacataattggacttccacttggcattctcctcacgtttgtcgtcagaatgcgaatcatgggattgtggctgggcatgttagcctgtgtatttctggctaccgctgccttcgtcgcttataccgcaagattggattggaagctcgctgctgaagaggcaaaaaagcatagtggccgtcagcagcagcagcgagctgagtcaaccgccacacggcctggacctgagaaggccgtgttaagtagtgtggccacaggcagttcgcctggcattacactcacaacctactcacgcagtgagtgtcatgtggatttttttcggactcccgaggaggcacacgcactttctgcccctacatcccggttatctgtgaagcaactggtgatccgacgcggagccgcactgggggcagcgtctgcgaccctgatggtgggcctgacagtgcgcatactagcaacacggcattag

SEQ ID NO: 241724 - DNA, 1743 bp, synthetic construct
  misc_feature 1..1743: note = Description of Artificial Sequence: Synthetic coding sequence
  source 1..1743: mol_type = other DNA
atggatagcctacaggacaccgtggcattggatcatggagggtgttgccccgcactgagccgcctcgtgcctcggggttttggcaccgaaatgtggaccctgtttgccctgtcagggcctttgttcctgtttcaggtgttgacgttcatgatttatattgtcagcacggtcttttgtggacatctgggcaaagtcgaactggctagtgtgactctggccgtggccttcgtaaatgtttgcggagtcagtgtgggcgtgggactgtcatccgcttgtgacaccctgatgagccagtcttttggtagccccaacaaaaagcacgttggcgtgattttgcaacggggtgccctagtgttgttactgtgctgtctgccgtgctgggcactgttcctgaatactcaacacattttactgctattccgccaagaccccgatgtgtctaggctgacacaggactatgttatgatctttatcccaggactacccgtgatcttcctgtacaacctcctggctaaatacctgcagaaccagaagattacttggccccaggttctttctggcgttgtcggcaactgcgtgaatggagtcgccaactatgctctggtgagcgtactgaacctgggggtgagaggcagcgcttatgctaatatcatttcccagttcgctcagactgtgtttctgctactttacattgttctgaagaaactccacttggaaacctgggccggatggtcttcgcaatgcctccaggactgggggccttttttctctctagccgttcctagcatgctgatgatatgcgtcgagtggtgggcttatgagataggaagcttcctgatgggcctgctgagcgttgtggacctgtcagcgcaagcagtcatttatgaggtggcaacagtaacatatatgaggcactcccacaggctggcgtacgccgctcacgtcacccgaattcccttaggcttgtccattggcgtatgcgtcagggttgggatggctcttggcgcagcggataccgtgcaggcaaagcgttcagccgtgagcggggtgttgagtatcgtaggaatctccttggttttgggcaccctgatttccatcctgaagaaccagctgggccacatctttaccaacgatgaggacgtaatagcactagtttcccaggtgctgcccgtgtactccgtcttccatgtctttgaagccatctgctgcgtgtacgggggagtgcttaggggaactgggaagcaggcttttggggctgccgttaacgcgatcacctactatataattggtttgccgttgggcatcctgctgacttttgtggtacggatgcgcatcatgggactttggttgggcatgttagcatgcgtctttctcgccacagctgcgttcgtggcctatactgctaggttagactggaaattggccgctgaagaagcaaagaagcactcaggtaggcagcagcagcagcgtgccgagtctacagccactagacctgggcctgaaaaggccgtcctgtcttccgtggctaccgggagcagtccaggcatcaccttgacaacctattcacggagtgagtgccatgtggacttttttaggactcccgaggaagcacatgcgttaagcgcccctaccagtagactctccgttaagcagcttgtgatcaggaggggggctgcattgggcgcagcaagcgctactcttatggtgggcctgacagttcgcatcttggccactcgccactag

SEQ ID NO: 241725 - DNA, 1092 bp, synthetic construct
  misc_feature 1..1092: note = Description of Artificial Sequence: Synthetic coding sequence
  source 1..1092: mol_type = other DNA
atggactcgctccaggacacagtcgccctggaccatggaggctgctgtcccgctctgtctcgtctcgtccccaggggcttcggcaccgagatgtggaccttgtttgcactgtcaggcccactgttcctattccaggttcttacgttcatgatttatatcgtatccacagtgttctgtggccatctgggcaaggtcgagcttgcgtccgtaactttggcggtagcctttgtgaacgtctgtggagtatcagtcggagtgggcctgagctccgcctgcgatacacttatgagccagagcttcggctcccccaataagaagcacgttggagtcattctgcagcgaggcgcactcgtgctcctcttgtgttgtttgccctgctgggccttgttcctaaacacgcagcacatcttgctgctgtttcgacaggacccagacgtttcccgactgacacaggattatgtgatgatctttattccaggacttcctgtgatctttctttacaatctcctcgccaaatatctgcagaatcagaaaatcacatggccacaggtcttgtcaggagttgtcggtaactgtgttaatggggtagctaattatgcattggtgagcgtgctgaacctgggcgttaggggttcagcatatgctaacattatctctcagttcgcacagaccgttttcctactcttatacatcgtgttaaagaagcttcacttagaaacttgggccggatggagcagccagtgcctgcaagactggggcccattcttttcactcgccgtgccttcgatgctgatgatatgtgtggagtggtgggcgtatgagattggatcgtttttgatgggactgttgagtgtggtggatttgtcagcacaggccgtgatctatgaagtggctaccgtcacatacatgattcctttaggactgagcataggagtttgcgttagggtcggcatggctctaggcgcagccgacacggtccaagcaaaacgctccgcagtgagtggagtgctcagcattgtcgggatttcattggtgcttgggacccttatttcaatcctgaagaaccagcttgggcacattttcactaattag

SEQ ID NO: 241726 - DNA, 891 bp, synthetic construct
  misc_feature 1..891: note = Description of Artificial Sequence: Synthetic coding sequence
  source 1..891: mol_type = other DNA
atgatctacattgtcagtacagtgttttgtgggcatctgggtaaggttgagcttgcttccgtcacactcgccgtggcatttgtcaatgtctgcggggtctcagtcggggttgggctctcttccgcatgtgacactcttatgagtcagagttttggcagcccgaacaaaaaacatgtaggcgtcattctgcagagaggcgcactggtcctcctgctgtgctgcctgccgtgttgggctcttttcttaaacacgcagcatatcctgctgctgtttaggcaagacccggatgtcagcaggctgactcaggactacgtcatgatttttattccaggattgccggtcatttttctctacaacctgttagctaagtatctgcagaaccagaagatcacatggcctcaagttctcagtggcgtggtcggcaactgtgttaatggagtcgccaattacgcactggtttccgttttgaatttgggagtgcgcggtagcgcatatgcaaacattatatcccagttcgctcaaactgtgtttcttctcctgtacatagtgctgaaaaaacttcatctagagacatgggctggatggtcttctcagtgcctgcaagattgggggccatttttctcgctggctgtgccttcaatgctgatgatttgcgtagagtggtgggcttatgaaatcggttcatttcttatgggcctactgagcgtagtagacctgtcagcgcaagcggtgatttatgaagtagccacagtaacctacatgatccccctcgggctgagtatcggggtttgtgtgcgggttggcatggccctcggggctgcggacacagtccaagcaaagcgatcagctgtatcgggcgtactcagtatcgcaagaagcgatccttggtag

SEQ ID NO: 241727 - DNA, 531 bp, synthetic construct
  misc_feature 1..531: note = Description of Artificial Sequence: Synthetic coding sequence
  source 1..531: mol_type = other DNA
atgaaggcgagcggtaccttgcgagagtacaaagtcgtggggcgatgcctccccactcccaaatgccacacccccccactataccggatgagaatctttgcccctaatcacgtcgttgccaagagtaggttctggtactttgtgtcgcaactgaagaaaatgaaaaagtcctcaggagaaattgtgtattgtggccaggtgttcgagaaaagccccctgcgggtgaaaaatttcggtatctggctgcgctatgattccaggtcggggacccacaatatgtaccgcgaatatagagacctgactacagcaggtgcagttactcagtgctatagggatatgggagctcgacaccgagcacgggctcactccatacagattatgaaagtagaagagattgccgctagcaagtgcagacggcctgctgtgaagcaatttcacgacagcaaaataaagttccccttgccacatcgggtccttcggagacaacacaagccgagattcaccaccaagagacctaacacctttttctag

SEQ ID NO: 241728 - DNA, 1995 bp, synthetic construct
  misc_feature 1..1995: note = Description of Artificial Sequence: Synthetic coding sequence
  source 1..1995: mol_type = other DNA
atggactcatcaacttggagccctaagacgacagcagtgacccgccctgtggaaacgcatgaactcattcgcaatgcggcagacatctctattattgtgatttactttgtggtagtcatggcggtaggcctgtgggccatgtttagcactaaccgcggaacagtcggaggattctttctggccggaaggagtatggtgtggtggcctataggcgcaagtctgtttgcttcaaacataggtagcggccatttcgtgggactagccggaaccggggctgcaagcggaattgctataggagggttcgaatggaacgccctcgtgttagttgtggttctcgggtggctgttcgttcctatttacatcaaagccggagtcgttaccatgcccgaatacctgcgcaaacggtttggcggtcagcggattcaggtgtatctgtctcttctcagcttgttgttatacatttttaccaaaatctctgctgatatctttagtggggctatctttattaatctggccctgggacttaatctttatttagcaatctttctgttgcttgccattacagctctttataccatcacaggcggactggctgcggtaatctacaccgatacgctacagaccgtgataatgctggtagggagcctaatcctcactggcttcgctttccacgaggttggaggatacgacgcctttatggagaagtatatgaaggctatacctacaatcgttagcgacggcaacacaacatttcaggagaaatgttatactccaagagccgatagctttcacatttttagagacccactgacgggggatctcccctggcctggcttcatatttggtatgtccatcctaactttatggtattggtgtaccgaccaggtcatcgtgcagcgttgtctgtccgctaagaacatgtctcacgtgaagggcggttgcattctatgtggctaccttaaattgatgccgatgttcattatggttatgcctggcatgatctcccgcatcctctacactgagaagattgcctgcgttgttccatctgaatgtgagaagtactgcggaaccaaagtcggctgcaccaatattgcctacccaacgcttgttgtcgaactgatgcccaatgggctgcgaggactgatgcttagcgtgatgctggcgagcctgatgtcgtctctgacttccatcttcaattcagcatctaccctctttactatggatatatacgccaaggtgcggaaaagggcttccgaaaaggagcttatgatagccggaaggctgttcatcctagtcctgatcggaatcagtatcgcctgggtcccaattgtgcagagtgcccagtccggtcaactgtttgattacatccagtcgataacttcatacctgggccctcccattgccgcagtcttcctgttagccattttctggaagagagtgaatgaacccggtgccttttggggactgatcctcgggttgctgattgggatcagccggatgatcactgagttcgcttacggcactggatcctgcatggagccctcaaattgtcccactattatctgtggagtgcattatctgtactttgctattatccttttcgcgatcagcttcataaccatagtggtgatctccctcctgaccaaaccaatccccgatgtgcatctttatagattgtgctggagtctgaggaacagtaaagaggagaggatcgacctggacgcggaagaagaaaatattcaagagggcccaaaagagactatcgaaattgagacccaggtcccagaaaagaagaaaggcatcttccgcagagcttacgacttgttttgtggtttggagcagcacggggctcctaagatgaccgaggaggaggaaaaggctatgaaaatgaagatgactgataccagtgaaaagccactgtggcgcacagtgctcaatgtgaacgggattatactcgttactgttgccgtattctgccatgcctacttcgcgtag

SEQ ID NO: 241729 - DNA, 1614 bp, synthetic construct
  misc_feature 1..1614: note = Description of Artificial Sequence: Synthetic coding sequence
  source 1..1614: mol_type = other DNA
atgcctgagtaccttcggaagagattcggaggccaacgcattcaggtttacctctccctgttgtccctgctcctctatatttttactaaaatttctgccgatattttcagcggcgctatatttattaacctcgccctgggcctgaatttatacctcgctatttttctgttgctagccataacagctctgtatactatcactggcggattagcagctgtaatttatactgacactctccaaaccgtgattatgttagtgggaagcctcattctaaccggatttgctttccacgaagtcgggggatatgacgccttcatggagaagtatatgaaggccattccaaccattgtttctgacggcaataccacgttccaggagaaatgctacacgccccgagctgactcttttcatatattccgggatccattgacaggcgatctgccatggcccggtttcatcttcggcatgtctatcctcaccctctggtattggtgtactgaccaagtgatagttcagcgctgcctgagtgctaagaatatgagtcacgtgaagggcggttgcattctgtgcggataccttaagctgatgcccatgttcatcatggttatgccaggaatgatatcccgcattctatacaccgaaaagatcgcttgtgttgtacccagtgagtgcgagaagtactgcgggaccaaagtggggtgtactaatatcgcctaccccacactcgtagtcgaactgatgcctaatgggttacggggactcatgctgtctgtgatgttggcgtcactgatgagcagtctgactagcattttcaactccgctagcaccttgttcactatggacatctatgcgaaagtcaggaagcgggcaagtgagaaagagcttatgatcgctggcagactcttcatcctggtccttatcgggatatccatcgcctgggtgcccatagtgcaatctgctcagtcaggacagctatttgactacattcagagtattaccagctatctgggaccccctatagcagctgtgttcctgcttgccatcttttggaagagggttaacgagcccggtgccttctggggactgatcctcggcctgctcatcggcatttcccgcatgatcacagagttcgcttatggcacggggtcctgtatggagccttctaattgtcctaccatcatttgtggagtgcattatctttattttgccattattttattcgccatctcattcattaccattgtcgtgatcagcctcctcaccaaacctatccccgatgtacatctgtaccgattgtgctggagcctccgtaattctaaggaggagcgcatcgaccttgatgccgaggaggaaaatatccaggaaggaccgaaggaaacaattgagattgagacccaagtgccagaaaagaaaaagggaatcttcaggcgggcatatgacctcttctgcgggctcgagcagcacggtgcaccaaaaatgaccgaagaagaggagaaagctatgaaaatgaagatgacggatacctcggagaagcccctttggcggacagtcttgaatgtgaatgggataatcctggtgaccgtcgctgtattttgccatgcctacttcgcatag

SEQ ID NO: 241730 - DNA, 1191 bp, synthetic construct
  misc_feature 1..1191: note = Description of Artificial Sequence: Synthetic coding sequence
  source 1..1191: mol_type = other DNA
atggaggttaagaattttgccgtgtgggattacgttgtgttcgctgccctgtttttcataagctctggcatcggagtgtttttcgctattaaagaacgaaagaaagcgacttccagggagtttttagtcgggggtcgccagatgtccttcggcccagttggattgtcactgactgcatcatttatgagtgccgtgaccgtgcttgggaccccctccgaggtataccgctttggagcttctttcctcgttttttttatcgcctacttgttcgttattcttctgacctctgagctgtttctccctgtgttctataggtctggaattacctccacctacgaatacttgcagctgagatttaacaagcctgtgcgttatgccgcaacggtgatctatattgtgcagacaatcctctacactggcgtagtggtctatgctccggcactcgcccttaatcaagtcacgggatttgatctctggggctcagtcttcgccactggtatcgtctgcaccttctactgtaccttgggaggcctgaaagctgtggtgtggacggacgctttccagatggtggttatgatcgtgggctttctcactgtactgatccagggttcaacccacgcaggcggatttcataacgtgctggagcagtcgaccaacggttccagactgcacatttttgattttgacgtggatccacttcgcaggcatacattctggaccattaccgtgggtggcacattcacttggctgggcatctatggcgttaatcagtctactattcaacggtgtatctcctgcaagaccgagaagcacgcaaaattggccctctatttcaacctgttgggattatggatcattctggtgtgcgctgtattctcaggactgatcatgtacagtcactttaaagattgtgacccatggacttccggcattatcagcgcgcctgatcagctgatgccttattttgtgatggagatctttgctaccatgcctggattgcctggattgtttgttgcctgtgcgttcagtgggaccctcagtaccgtcgcaagcagtatcaacgcactggctacggtgacgtttgaagacttcgtcaagtcttgctttcctcacttatctgacaagttgtccacttggatttccaaagggctgtgtagatattcttggtggacattctattccataagctag

SEQ ID NO: 241731 - DNA, 1857 bp, synthetic construct
  misc_feature 1..1857: note = Description of Artificial Sequence: Synthetic coding sequence
  source 1..1857: mol_type = other DNA
atggaagtgaaaaactttgcagtgtgggattatgtggtgtttgcggctctgttctttatctcttcaggaatcggggtcttcttcgctattaaggagcgcaagaaggccacatcccgggagtttctggtgggcggacgtcaaatgtcttttggacccgtcggacttagcttgacagcgtcttttatgtctgccgtgaccgttctagggacaccgtctgaggtatacaggtttggcgcatcatttctggttttcttcatcgcatacctgtttgtgatcctattgactagtgagttgttcctccctgtgttttataggagtggcataacgagcacatacgagtacttacagttgcggttcaacaagcccgtccggtatgccgcaaccgtgatttacatagtccaaaccatcctgtataccggggttgtggtttacgctccagccctggccctgaatcaagtgactgggttcgatctgtggggctctgtcttcgccacgggaattgtgtgcacattctactgtacactcggtggacttaaggccgtagtgtggactgacgctttccaaatggtcgtgatgatagttggcttcctgacggtattgattcagggctccacccatgccggagggtttcataacgtcctcgagcagtctaccaacggtagtaggctccacatttttgatttcgacgttgaccccctgcgcagacacaccttctggacaattaccgttggaggcacatttacatggctcggaatctacggagtgaaccagtcgactatccagcgctgtattagctgtaaaactgagaaacacgcaaagctagctttgtattttaacctgttgggactgtggatcatattggtatgcgccgtgtttagtggactaatcatgtactctcactttaaggattgcgatccatggacttccggtattatatctgctcctgaccaactcatgccttatttcgtcatggagattttcgccacaatgcctggattgcctggactttttgtggcttgcgcattcagcggaaccctgagtactgtcgcaagttctattaacgccttggccacagtcactttcgaagacttcgtgaaaagttgcttccctcatttgtcagacaagcttagtacatggatttctaagggactgtgccttctcttcggggtgatgtgcacctccatggctgtggcagcgagcgtcatgggaggcgtcgtacaggcctctctgtccattcacggcatgtgtggcggtccgatgcttggcttgttttccctcgggattgtcttcccattcgtgaactggaaaggcgcactgggcggactgctaacaggcatcacactgagcttctgggttgccataggtgctttcatctaccccgcaccggcttctaagacatggcccctcccactgtccaccgaccagtgcataaaaagtaacgtcaccgcaactggacctcctgtcttgtccagtaggccaggtatagccgatacctggtactccatttcctacctgtactactccgcagtcggatgcttgggatgcatcgtggcaggggtgataatcagccttattactgggagacagcgcggtgaggatattcagcctctgctgatcagacccgtgtgtaacttgttctgcttctggtctaaaaaatataagacactgtgctggtgtggagtgcagcacgattcaggcaccgaacaggagaacctggaaaatggatccgctaggaaacagggagccgagtccgttctgcagaatggactgcgcagagaatctctggtgcatgtgcctggatatgatccaaaagataagtcgtacaacaacatggcatttgagaccacccatttctag

SEQ ID NO: 241732 - DNA, 834 bp, synthetic construct
  misc_feature 1..834: note = Description of Artificial Sequence: Synthetic coding sequence
  source 1..834: mol_type = other DNA
atggtagtcatgattgttggcttcttgacagttctcattcaggggtctacacacgcgggaggattccataatgtattggaacagagtaccaacggcagtcgactccatattttcgactttgacgtcgatcccctgcgacggcacacattctggacaatcactgttggtggcacctttacttggctgggcatctacggcgtgaaccagtccaccatacagagatgtatcagctgcaagaccgaaaagcacgccaaactggccctgtactttaatctcttaggcctctggattattctggtttgtgccgtgttcagcggcctaattatgtattcccacttcaaggattgtgatccttggacctccggaataatcagcgctccagaccagctgatgccatactttgtcatggaaatatttgccactatgccgggtctgccagggttgttcgtggcatgcgctttctccggcacactaagtacagttgctagcagcattaacgccctcgccactgtgacattcgaggacttcgtcaagagctgtttcccacacctcagcgataagctgtctacatggatctctaaggggctctgccggtccctgatctggagggacgtgtacctctacggctgtggttgcatttgtcacgggcgatgttgcgcaggctttccccagcattctaggcatgtttggagaacaaacgccggactcattcttcctggaaacagagtccctttctgtgagcttgaggggtgtacccgtcggtcttcttattggaaccacctggtcattctcggcggacactggggactacacctcccgtgcactagcttgtag

SEQ ID NO: 241733 - DNA, 2019 bp, synthetic construct
  misc_feature 1..2019: note = Description of Artificial Sequence: Synthetic coding sequence
  source 1..2019: mol_type = other DNA
atggaagagcataccgaggccggatctgcccctgaaatgggcgcacaaaaagcccttatcgacaatccagctgacatcctcgtgatcgcagcatattttcttctcgtgataggggtggggttatggtccatgtgtagaacaaacaggggcaccgttggagggtatttcttagcaggcaggtcgatggtgtggtggcctgtgggagcgtcactgttcgctagcaacatcggcagcgggcacttcgtgggcctggctggaaccggcgctgctagtggcctggccgttgcaggatttgagtggaatgccctgtttgtcgtgctgctcttgggatggctatttgccccagtgtacctgactgctggggtgatcaccatgccccagtacctgcgcaaacgattcggaggaaggaggatcagactctacttgtcagtcctgtctttgtttttgtacattttcacgaaaatctccgtcgatatgttctccggggctgttttcatccagcaagcccttggttggaatatctatgcatcggtcatcgctttgctgggtatcactatgatttataccgtaaccggtggactggcggcactgatgtataccgatacggtgcaaaccttcgttatactggggggagcttgtatcctgatgggatatgctttccatgaggtaggtggttattctggccttttcgataaatatctgggcgcagccaccagtctgacagtgtccgaggaccctgctgtgggtaacatttccagtttttgttacaggccgaggcccgattcttatcacttgctgagacacccggtgacaggcgatttgccatggcctgctctcctgttaggtttgaccatcgtctccggatggtattggtgttcagatcaagtgatcgtccagaggtgcctggctggcaagtcgctgacccacattaaagcagggtgtatcctgtgtggttatctgaagttgacccccatgttcttgatggtgatgcctggcatgattagtagaatcctttatcctgatgaggtcgcttgcgtggtgccagaagtttgcaggcgtgtgtgcggaacagaggtcggctgctccaatattgcatatcctaggttagtagtgaaactcatgcctaatggcttaagagggctcatgttggccgtaatgttggccgctctgatgtcgtcgctggcgagcatattcaactcatcttcaactctgtttacaatggacatctatacccgcttgcgcccacgggctggggaccgtgagctccttctagtgggcagactgtgggttgtgttcatcgtcgttgttagtgttgcttggttgcctgtggtccaggcagcccagggaggccaactgtttgactacatccaagcagtgtcgtcttacctggcccctcctgtctccgccgtcttcgttttggctctcttcgttccccgagtgaacgagcaaggagccttttggggtctaatcggtgggctgctgatgggactggccaggttaattcctgaattttccttcgggtccggctcctgcgtacagccaagtgcttgtcccgctttcctgtgcggtgtccattacctttattttgccatagtgctgttcttttgttcaggcctgcttactttgactgtttctctgtgtacagctccaatacctagaaagcacctgcatagactggtgttttccctcagacacagtaaagaggaacgggaggacctcgatgcagatgaacagcaagggtcgtctttgcccgttcagaatggctgtcctgagagcgccatggaaatgaatgagcctcaggccccagcgcctagtctgttccggcagtgtctgctctggttctgtggcatgtctagaggcggagtgggatcacctccacctcttacacaagaagaggctgcagccgcagccagacggttggaagacatctcagaggacccttcatgggccagagtcgtgaatttgaacgctctgctgatgatggctgtggcagtgttcctctgggggttctatgcttag

SEQ ID NO: 241734 - DNA, 1377 bp, synthetic construct
  misc_feature 1..1377: note = Description of Artificial Sequence: Synthetic coding sequence
  source 1..1377: mol_type = other DNA
atggaagaacacactgaagccggaagcgcccctgagatgggtgctcaaaaggccctaatcgataaccccgcagatattctggtgatcgcggcatattttcttttggtgatcggtgttggtctgtggtcaatgtgtaggacaaaccgcggaaccgtgggtggatattttttagctggtaggagtatggtttggtggccagtgggcgcatctttgttcgctagcaatatcggttccgggcacttcgtcggccttgcgggaaccggcgcagcctcaggactggccgtggcgggatttgagtggaacgcgctgttcgtcgtgttgttgctgggttggctgtttgcccctgtctacctgaccgccggagttattacgatgccccaatatttaaggaagcgtttcgggggtaggagaatcaggctgtacttgagtgtgctttctttgttcctatatatctttaccaagataagtgtcgacatgttttccggcgctgtgtttatccaacaagccctgggatggaacatttacgcatcagtgatagccctcttgggcataacaatgatttacacagttactgggggtcttgccgctctgatgtacaccgacacagtgcagacatttgtcatcctcggcggtgcctgcatcctgatggggtacgcctttcacgaggtgggaggttactccgggctatttgacaagtacttgggagccgcaacctccctaactgtgagcgaagacccagctgttgggaacatctccagcttctgttaccggccacgacccgacagctatcaccttcttcgacatcctgtgactggggaccttccatggcccgcactcctgctgggactgacaatcgtgagtggctggtattggtgcagcgaccaagtaatcgtgcagagatgtctggctgggaagtcgcttacacacattaaggcaggttgtattttgtgtgggtatcttaaattgactccaatgttcctgatggtgatgccgggtatgatttctcgcattctgtacccagacgaagtggcctgcgtagtgccggaagtatgtcgcagagtgtgcgggacggaggtggggtgctccaacatcgcctaccccaggctcgtggtgaaacttatgccaaacggaaggctgcttggcacgcatcgcggacccgctgatggcccaggcacgccagattcacgcgtgctgcttagactcgggcagctgtgtgctgccttaggagtgcctagttttccactgcgcagggcacttccattgctgaggcattgtgccgtgctgcttctttggcccccacatcctcacggactgcccgttcacagggcccacccacagaaggcacccccacctccagggttgcaaagccctgcatag

SEQ ID NO: 241735 - DNA, 2157 bp, synthetic construct
  misc_feature 1..2157: note = Description of Artificial Sequence: Synthetic coding sequence
  source 1..2157: mol_type = other DNA
atgcgagcagttctcgacaccgccgacatcgccatcgtcgctctgtatttcattctggttatgtgcatcgggttctttgctatgtggaagtcaaatcggagtacagtgtcaggatattttttagcaggtcgttcaatgacttgggttaccattggcgctagcttatttgtctctaatataggctccgaacatttcattggcctcgcaggctctggagcagcatccgggttcgccgtgggggcttgggagtttaacgcactgcttctgttgcaactgcttggttgggtgtttatccctatctatatcagaagcggggtgtacacaatgccagaatatctgagcaagaggttcggagggcatcggattcaggtttatttcgcagccctgtctctgatactatacatttttacaaaattgtccgtcgacctgtattccggcgctttattcattcaggagagcctcggctggaacctgtacgtcagtgtgattctgctgatcggaatgacagcactgttgacggtgacgggaggcctggtggcagtgatttatacggacacgttgcaggccctcctaatgataattggtgcactgaccctcatgattatctccattatggagatcgggggattcgaagaggtgaaacgcaggtatatgctggcgtcccccgatgtgacatctatcctgctcacctataacttgtccaacactaacagctgtaatgtgagccctaaaaaagaggccttgaaaatgctgcgaaaccccactgacgaggacgtaccatggcctggattcatactgggccagacaccggctagcgtgtggtattggtgtgccgaccaggttatcgtccagagggttttagccgcaaaaaacatcgcccacgccaagggcagtactcttatggctggcttcctgaaactgttgccaatgttcatcatcgtcgttccaggtatgatctcccggattctgtttaccgacgatatcgcctgcatcaacccagagcactgcatgctggtgtgtggcagccgcgctggttgcagcaatattgcatacccacgcctggtgatgaagcttgtccctgtgggcctacggggtcttatgatggccgtgatgattgccgctctgatgagcgacctcgattctatcttcaacagtgcttccacaatttttaccctcgacgtctacaagctgataagaaagagtgcgtctagtcgggaattgatgatcgttggcagaattttcgtggcatttatggtggttatctcaatagcatgggtgcctatcatcgtcgagatgcaggggggacagatgtatctctatatacaggaggtggccgattatcttaccccgcctgtggccgctctgttcctcctcgcaattttctggaagaggtgcaatgagcagggtgcattttacgggggtatggccggatttgttctgggggctgttaggctcatcctggcttttgcttacagagcgcctgagtgtgaccagcctgacaaccgtcctggcttcattaaggacatccattatatgtacgtggcaaccggcctgttctgggttacgggtctgatcacagtaatcgtttctttgctcaccccccctccaactaaagaacagattaggaccacaaccttttggtccaaaaagaatttggtagtaaaagagaattgcagtccgaaggaggaaccctaccagatgcaagagaagagcatacttagatgctcggagaataatgaaactatcaatcacatcatcccgaatggaaagtccgaagactcaatcaagggcctgcaaccggaagacgtaaatctgctcgtcacctgcagagaagaaggcaacccggtggcttcactcgggcattccgaagcagaaacccctgtagacgcctatagtaacggtcaggccgcattgatgggggagaaagagaggaagaaagaaactgacgacggcggacgctattggaaattcattgattggttttgcgggttcaagtcgaagagcctctcaaaacgcagccttcgcgacctaatggaggaagaggccgtttgcctgcagatgcttgaggagacaagacaagttaaggtcatcttaaacatcggtctgttcgcggtgtgtagtctgggtattttcatgttcgtgtatttctcactctag

SEQ ID NO: 241736 - DNA, 504 bp, synthetic construct
  misc_feature 1..504: note = Description of Artificial Sequence: Synthetic coding sequence
  source 1..504: mol_type = other DNA
atggaagcgggtggattcctggactctttaatctatggggcatgcgtggtgtttacattggggatgtttagcgcgggactgagcgacctccggcacatgaggatgaccaggagtgttgataacgtgcagtttctgcctttcctgactactgaagtcaataatctcggctggttgtcttacggcgcactgaaaggagacgggattctcattgtcgttaacactgttggcgctgccctccagaccttatatatcctggcctatttacactactgtcccaggaaagccaaagtcattcagaccaagtccactcaatgcctgagttacccactgacaattgctacactgcttaccagtgcgtcatggtgcttgtacggatttaggttgcgcgacccctatattatggtctcaaatttccccggtatcgtaacgtctttcatccggttctggctcttttggaagtaccctcaagagcaggaccgaaattattggcttctgcagacatag

SEQ ID NO: 241737 - DNA, 501 bp, synthetic construct
  misc_feature 1..501: note = Description of Artificial Sequence: Synthetic coding sequence
  source 1..501: mol_type = other DNA
atgcgtggcctccacccttggcatgtcctaagacgcccattagggcctcaggcccacgcgaatgatccagaatgcgggcagcgtccggtgccagctcttagtcaccatgggtctcaaagagtagtgttgctgcagaccgcaaccttgctgggagtgctccttctcgggtacggttatttttggctgctcgtcccaaatccggaagcgcgtctgcagcagctagggctcttctgctctgtctttactatatcgatgtatttaagccctttagcggatctcgctaaagtgatccagactaagtctacacagtgtctgtcctatcccctgaccatagcgacgttgcttactagcgcctcatggtgcctgtacggtttccgcctgcgggacccatatataatggtttcgaactttccaggcatcgttacgagctttatcagattctggttgttttggaagtatccccaggagcaagacaggaattactggctcctgcagacctag

SEQ ID NO: 241738 - DNA, 666 bp, synthetic construct
  misc_feature 1..666: note = Description of Artificial Sequence: Synthetic coding sequence
  source 1..666: mol_type = other DNA
atggaggctggcggttttctggatagtctgatttacggagcctgtgtggtgtttaccctggggatgttctctgctggcctctccgacttgcggcatatgagaatgactcgatcagtggataacgtacagtttctgccttttcttactacagaggtgaataaccttggttggcttagttacggagctctgaagggtgatggcattctcattgtggtcaataccgtgggagcagccctgcaaaccctctacattttggcttacttgcattattgtcctcggaaacgcgtggtgctcctgcagaccgctaccttactgggcgtcttgctgttgggttacggatacttttggctactggtgcccaatcccgaggcccgactgcagcagctgggattattctgttctgtgttcacaatttctatgtacttgtcaccgctggcagacctggccaaggtgattcaaaccaagagcacacagtgcctgagttaccctctaaccattgctacactgttaacttctgctagctggtgtttgtatgggttcaggctgagggacccctacatcatggtgtcgaactttccagggatcgtgaccagcttcatcaggttctggttgttctggaaatatccacaggagcaggatcggaactactggttgcttcaaacgtag

SEQ ID NO: 241739 - DNA, 471 bp, synthetic construct
  misc_feature 1..471: note = Description of Artificial Sequence: Synthetic coding sequence
  source 1..471: mol_type = other DNA
atggaagagctggggccacaggcgcacgccaatgatcccgaatgcgggcagcgccctgtgccggcattgtcccatcatgggtctcagcgagtcgttttgttgcagaccgcaaccctgttaggtgtcctgcttctcggatacggctacttttggctgttagtaccgaatcctgaggcgagactgcaacagctggggcttttctgcagtgtgttcactatctccatgtaccttagccctttagcagacctagctaaggtgattcaaacgaagagcacacagtgtctgtcttacccactgactatagctaccctgctgacaagcgctagctggtgcctatatggtttccgtttacgagacccctacataatggtgtccaactttcctgggatcgtgacaagcttcatccggttctggctgttctggaagtaccctcaggagcaggacaggaattactggctgctccagacatag

SEQ ID NO: 241740 - DNA, 1929 bp, synthetic construct
  misc_feature 1..1929: note = Description of Artificial Sequence: Synthetic coding sequence
  source 1..1929: mol_type = other DNA
atggataaactgaaatgtccttcattctttaaatgcagagagaaagaaaaagtgagcgcgtcttccgaaaatttccacgtgggtgaaaatgacgagaatcaagatcgcggtaattggagtaagaaaagcgactacctcctgagtatgattgggtatgctgtcggtctggggaatgtgtggaggttcccttacctgacttactctaacggaggcggtgcttttctaataccatatgccatcatgctcgcactggctggactccccctcttcttcttagagtgcagcctggggcagtttgctagcctgggaccagtcagcgtctggcgtatcctcccactgtttcaaggagtgggcattactatggtgctgatctccatctttgtcacaatttactacaatgtgatcatagcgtactccttgtactatatgttcgcttcctttcagagtgagctgccatggaagaactgttcctcttggagcgataaaaattgttctcgttctcctattgtgacccactgtaatgtgtctacagtcaacaagggcattcaagaaattatccagatgaataagagttgggtagacattaataactttacatgcatcaatgggagcgaaatttatcagcctgggcaattgccctccgagcagtattggaacaaagtcgctctgcagcgctcctctggtatgaacgaaacgggagtgatcgtctggtacttggccctctgtctcctgctcgcctggttgatagtgggggcagctctctttaaagggataaaaagctcagggaaagtcgtgtatttcacagcactgtttccttatgttgtgctgttgattctgttggtgcgaggcgcaacactagagggggcaagcaagggtatcagctactacattggcgctcagtccaatttcaccaaactcaaggaggccgaagtgtggaaggatgccgctacccagatcttctacagcttgagtgtggcctgggggggtctggtagccctgtcaagctataataaatttaaaaataactgttttagtgatgcgattgttgtttgcctaaccaactgtctcaccagcgtgtttgcaggtttcgcaattttctctatactgggccacatggctcacatatccggaaaggaggttagtcaagtcgtgaagtccggcttcgatctcgcttttattgcgtacccggaagccctggcccaactcccaggtggccctttctggtccattttgttcttttttatgcttctcacccttggcctcgactcccagttcgcctccattgagacaattactactaccatacaggacctgttccccaaggtcatgaaaaagatgagagtaccgatcacactgggttgttgcctggttctgttcctgctggggctcgtctgcgttacacaagccggtatctattgggttcacctcatcgatcacttttgtgcaggttggggcatactgattgcggctatcctcgagctggtgggcatcatttggatatacggcggtaatcgattcattgaggataccgagatgatgatcggggcaaaaagatggatattttggttgtggtggcgggcatgttggttcgttattaccccaatcctcctcatcgctatatttatttggagcctcgtgcagtttcacagaccaaattatggtgcaattccgtatccggactggggggtcgcgttgggttggtgcatgatcgttttctgtattatctggatccctatcatggccatcatcaagatcatacaagccaagggcaatatcttccagcgccttatcagctgctgtcggccagcgagcaattggggtccctacctggagcagcatagaggcgagaggtacaaggacatggtcgatcccaaaaaagaggctgatcacgaaatccctacagtgagcggaagtcgcaaacctgaatag

SEQ ID NO: 241741 - DNA, 1539 bp, synthetic construct
  misc_feature 1..1539: note = Description of Artificial Sequence: Synthetic coding sequence
  source 1..1539: mol_type = other DNA
atgggagttcagtggtggagccacacccagggcgaggtggccgtcggattaggtcttggggactcctacctcacaccatgtccatgccctggcgtggggtacgctgtaatcttaatcgcgctgtacgttggtttttactacaacgtgatcatcgcctggagtttatactacctgttctcttcctttacattgaacctgccttggaccgactgtggccacacatggaatagccccaattgcaccgatcccaagctgttaaatggctctgttctgggcaaccacactaagtattccaaatacaaattcacacccgctgcggagttttacgagagaggcgttctgcatctccacgagtcaagcggaatacacgatattggactccctcaatggcagctcctgttgtgcctgatggtggtggttattgtgttatacttttccctctggaagggcgtgaaaacctcgggcaaagtggtgtggatcacagccaccttgccttatttcgtgttgtttgtgctcttggtgcatggcgtcacactgccaggggctagcaacggaatcaatgcttacttgcacatagacttttatcggctcaaggaagctactgtgtggatagacgctgctacccagatcttcttttcattgggggcaggatttggtgttctgatcgctttcgctagctataacaagttcgataataactgctaccgggatgcccttttgactagcagtataaactgcataacaagctttgtgtccggatttgcaatattctctattctgggatatatggcacacgaacataaggtcaatatcgaagacgttgcaaccgaaggcgctggactggtgtttatcctataccccgaggctattagcacattatccggttccactttttgggcagtcgtgttttttgtcatgctgttggcgttgggtctggactcatcaatggggggaatggaagcagtgattacgggcctagccgatgatttccaggtgttaaagaggcataggaagctgttcacctttggcgtaacttttagcactttcttacttgcactgttttgtatcaccaaggggggaatttatgtccttaccctgttggataccttcgctgcgggaacaagtattctcttcgccgttctgatggaggccataggcgttagctggttctacggcgtagatcgcttctccaacgacatccagcaaatgatggggtttaggccaggcctgtattggcgcctgtgttggaagtttgtgtcacccgcatttctactctttgtggtcgtggtctcaatcattaactttaagcctcttacgtatgacgactacatcttccccccatgggctaattgggtgggctggggaatcgccctgtcttcgatggtcctggtgcctatttacgtgatttataagtttctaagtactcagggttccctctgggaaaggctggcatacggtattactccagagaatgagcaccacctggtggcccaacgtgacattaggcagttccaactccagcactggttggctatttag

SEQ ID NO: 241742 - DNA, 1845 bp, synthetic construct
  misc_feature 1..1845: note = Description of Artificial Sequence: Synthetic coding sequence
  source 1..1845: mol_type = other DNA
atggacggtaaggtggctgtgcaggagtgtgggccacccgctgtttcttgggtaccggaagagggggaaaagttggaccaggaagacgaagatcaggtgaaggatagaggccaatggacgaataaaatggagtttgttctgagcgtggctggagagatcataggactgggtaatgtatggcggttcccttacttgtgctacaaaaacggtgggggagcatttttcatcccttactttattttcttcttcgtctgcgggatcccagtgtttttcctggaggtggcccttggtcaatatacatcacagggaagcgtgactgcctggcgcaaaatctgtccgctgtttcaagggatcggcctagccagcgtcgttattgaatcatacctaaatgtctattatataattattcttgcctgggccctcttctacctgttcagcagttttacaagcgaactgccctggaccacctgcaacaacttttggaataccgaacactgcaccgacttcttgaaccattccggcgcaggcactgtgactccttttgaaaattttacatctcctgtgatggaattctgggaacggagagtactgggcattacttccggcatccacgacttagggtctcttcgctgggagctggctctgtgtctgctcctggcctgggtgatctgttatttctgtatctggaagggagtgaagagcacgggaaaggtcgtgtactttaccgcgactttcccctatctgatgctggtgattctgcttatccgaggcgttacactccccggtgcctaccagggtattatctactatctcaaacccgatcttttccgactcaaggaccctcaggtctggatggatgcgggaacgcagattttcttttccttcgctatctgtcagggctgtttaaccgctctcggatcctataataaataccacaataattgttataaggactgcattgcattgtgcttcctaaatagtgccacatcctttgtcgcaggatttgtggttttctcgatactcggatttatgagccaggaacagggcgtgccgatctctgaggtggctgagagcggaccgggtctggcgtttattgcctttccgaaggccgttacaatgatgcctttgagtcagttatggagctgcctgttcttcatcatgctgattttcctggggttagatagtcaattcgtgtgtgtggagtgtctggtgacagctagcattgacatgtttccaagacagctccgcaagagcggccgtcgagagcttctgattttaactatagcagtaatgtgctatcttatcggccttttcctggtgaccgagggtggcatgtatatcttccaactctttgactactacgcaagctcggggatatgcctcctgtttctgtctctctttgaggtggtttgtataagctgggtttatggcgctgatagattctacgataacattgaagatatgattgggtacagaccctggccgctggttaaaatttcctggctgttcctgacacctgggctgtgcctggccacctttctgttttccctcagtaagtacacccccttgaaatacaacaatgtttatgtgtaccccccttgggggtactccattgggtggttcttggctctgagtagtatggtttgcgtaccgctctttgtggtgattacactgttgaagactcggggtcccttcagaaagagattgcgtcaattgattacccccgatagctccctgccacagccaaagcagcacccatgtctggacgggagtgcgggtcgtaatttcggcccttcaccgacgcgcgagggtttaatcgccggagagaaagaaactcatctctag

SEQ ID NO: 241743 - DNA, 1845 bp, synthetic construct
  misc_feature 1..1845: note = Description of Artificial Sequence: Synthetic coding sequence
  source 1..1845: mol_type = other DNA
atggatggcaaagtggcggtccaagagtgtggaccacctgctgttagctgggttcccgaggaaggggaaaagctggatcaagaggacgaggatcaagtgaaggataggggacaatggactaacaagatggaatttgtgctgagcgtagctggggagatcatcgggctcggcaatgtctggcgctttccttatctctgctacaaaaacggaggaggggctttctttatcccatattttatcttcttttttgtctgtggcattcccgtcttttttctggaagttgcgttaggtcagtatacgtcacagggttcagttaccgcgtggcgaaaaatttgtccgctctttcagggtattggccttgccagtgtagtgattgaaagttaccttaatgtatattatattataatcttagcttgggcactcttttatttattttcatcttttactagtgaactgccatggacaacttgcaataacttctggaacacagagcattgcacagactttttgaaccattcgggagcgggaacggtgaccccatttgaaaactttacaagtcccgttatggagttctgggaaaggcgtgtcctcggtataacttccggcattcatgacctcgggtccctacgatgggagctggcactgtgccttctcctcgcgtgggttatttgctatttctgcatctggaaaggagttaaatccaccggcaaggttgtgtattttactgctacgtttccttacttaatgctggtgattctgctaattcgaggagtcaccttgccaggggcttaccaagggatcatatactatctgaagcctgatttgttccgcttaaaagatcctcaggtgtggatggacgcgggtactcagatctttttttctttcgcaatttgccagggctgcctgacggcactgggaagctataacaaataccacaacaactgctacaaggattgcatcgccttgtgttttctgaacagcgctacctcctttgtcgcgggattcgtcgtgttcagcattttgggttttatgagtcaggagcaaggggtcccaatttccgaggtggccgagtccggcccaggcctcgctttcatcgctttccccaaagcagtcaccatgatgccactctcccaactctggagctgcctattctttataatgttaattttcttgggcctggacagccagtttgtctgcgtggaatgccttgtaaccgccagtattgacatgtttccacgccagctcagaaagtcagggaggagagagctgttgatactgacgatcgccgtgatgtgctatcttatcggcctattcctggtgactgaggggggaatgtatattttccagctctttgactattacgcgtcctcaggaatctgtctgctcttcctgtccttgtttgaagtcgtgtgcatttcttgggtatacggagccgaccggttttacgataacatcgaagacatgattgggtatcgaccttggcccctagtcaagatcagctggctattcctgacccctggtctgtgcttggcaacgtttttattcagtctgagcaagtacacaccgcttaaatacaataatgtgtatgtctatcctccctggggctactcaatcggatggttcctcgccttgagttctatggtgtgtgtacctctattcgttgtgatcaccctgctcaagactcgcggtccattccggaagcggctccgccagctgatcacccctgatagctccctcccgcagcccaaacagcacccatgtctggacgggtctgccggtaggaatttcggcccatcccctacacgcgagggattgatcgccggagagaaagagactcacctctag

SEQ ID NO: 241744 - DNA, 1845 bp, synthetic construct
  misc_feature 1..1845: note = Description of Artificial Sequence: Synthetic coding sequence
  source 1..1845: mol_type = other DNA
atggacggcaaggtggcagtccaggagtgcgggcctcctgcagtaagctgggtaccagaggagggagaaaagctagaccaggaagatgaagatcaggtgaaagatcgcggtcagtggactaacaagatggaatttgtcctctcagtggcgggtgagataataggtctcggaaatgtatggcggttcccctacctgtgctataagaatggagggggagcattttttatcccttattttatcttcttctttgtatgcggaatcccagtatttttcctagaagtggccctcgggcagtacaccagtcagggctccgttaccgcttggcgtaagatttgtcctcttttccaaggtatcggccttgcttctgtggtgatcgaaagttatctcaacgtgtactatattattattttggcttgggcactattctacctcttcagttctttcacctctgagctcccatggactacatgcaataacttctggaataccgaacactgcaccgactttctcaatcacagcggtgctggaacggtaacacctttcgagaacttcaccagtcccgtgatggaattttgggaacgcagggtcttggggatcacttccggtatccacgatctgggaagccttcgatgggaactagccctgtgcctgcttctggcctgggtgatatgctacttttgtatttggaaaggcgtgaagagcactggaaaggtggtttatttcaccgccacatttccatatctgatgctggttattttactaataaggggcgtgacccttcctggtgcttaccaaggaatcatttattacctcaaaccagacctgtttcggctgaaagatccacaagtgtggatggatgcaggcacccagattttcttctcttttgccatctgtcagggatgccttacggccctcggaagctacaataagtaccacaacaactgctacaaggactgtatcgccctgtgtttcctgaattctgccacatcttttgtcgctggctttgtagtgttcagcatcctgggatttatgtcgcaggagcagggtgtgcctattagcgaagtcgctgagtctggacccggtttggctttcattgcctttcctaaggctgtgacgatgatgccactctcacaactgtggtcttgcttgttctttattatgctcatttttctcgggcttgatagccaattcgtgtgtgtcgagtgtctggtgaccgcctccatagacatgtttcctcggcagctgagaaaatccggaaggagagagctgctgatactgactatcgctgtcatgtgctacctaataggactgtttctagtcactgaaggtgggatgtacatctttcagttgtttgattattatgctagttcaggtatctgtctgctgttcctgtctctgtttgaggtggtttgtatcagttgggtttatggagccgatcgattttacgacaacattgaagatatgatcggatacagaccttggcccctggtcaaaatcagttggctttttttgacacctgggttgtgtctggccaccttcttgttcagcctgagtaagtatacacctctgaaatacaacaacgtgtacgtgtacccaccctggggctactcgattgggtggttcctggcgttatcgtcaatggtgtgcgtgccactgtttgtcgttataactcttcttaagacaaggggtccattcagaaagagactgcggcaactgattacaccggacagctccttaccccagccaaagcagcatccctgtcttgatgggagcgcgggtagaaacttcggtccaagcccaacacgggagggcctgattgccggtgagaaggaaactcacctctag

SEQ ID NO: 241745 - DNA, 1845 bp, synthetic construct
  misc_feature 1..1845: note = Description of Artificial Sequence: Synthetic coding sequence
  source 1..1845: mol_type = other DNA
atggatggcaaagtggccgtccaggaatgcggcccacctgccgtcagctgggtgcccgaagagggggaaaagctagaccaggaggacgaagaccaggtgaaggaccgagggcagtggaccaataaaatggagttcgtcctctctgtcgcaggggagattattgggctaggcaacgtctggagatttccatatctgtgttataagaacggaggcggagctttttttatcccatatttcatctttttcttcgtgtgtggcatcccagtattttttctggaagtagccctcggtcagtataccagccagggaagcgtgaccgcctggcgcaaaatatgtccgctgttccagggaattgggctggcctccgtggtcatcgagagttatctgaacgtctactatataataattctggcgtgggctctcttttacctgttcagcagcttcaccagtgagctcccctggaccacttgtaataatttttggaacaccgaacattgtacagatttcctgaaccactctggggcaggcacagtgactccttttgagaacttcacaagtcccgtcatggaattttgggaacggagggtcttaggaattacctcaggtatacacgatctggggagcctacgctgggaactggccctctgcctcctcctggcttgggtaatctgttacttttgtatttggaaaggcgtaaagtccacaggtaaggtggtctacttcaccgccaccttcccctatcttatgttggtgattctcttaattaggggggttacgctgccaggagcctatcagggcatcatatattatctgaagcctgatttgttccgtctcaaggacccccaggtatggatggatgcaggaacccagatatttttctcgtttgctatttgccaggggtgccttaccgccctgggcagctataacaaataccacaataattgctataaagactgtattgccctgtgttttctcaattctgctacgtccttcgtagccggtttcgtcgtattcagcatcttagggtttatgtcccaagagcagggggtgcccatttctgaggtggcggaaagtggcccaggattagctttcatcgcatttcctaaggcagtgacaatgatgcccttaagtcagctttggagctgtctctttttcatcatgctgatcttcctggggctcgacagtcagttcgtgtgcgtggagtgcctcgtgaccgccagtatagacatgttcccacggcagttacgaaagtctggcaggcgggagttacttatcctgaccatcgcggtgatgtgttacttaataggtctttttctggtgactgagggcggtatgtatatctttcagctttttgattattatgcatctagtggaatctgccttctttttcttagcttgttcgaagtggtctgcatctcttgggtctacggcgcagataggttctacgacaacattgaggatatgatcggataccgtccatggccacttgtgaagattagctggttattcctgacaccaggcctgtgtctggctacattcctgttttcactcagcaaatatacaccgttaaaatataataacgtgtatgtgtatccgccttggggctactcaatcggatggttcctggctctctcttcgatggtgtgcgttcctctctttgtagtgatcactctactcaagactcgaggcccattccggaagagattgaggcagctcatcactcctgattcctcgcttcctcagccaaagcaacatccttgcttggacggaagtgccggtaggaactttggtccaagcccaactagagagggtctgatcgcaggcgagaaagaaacgcatctctag

SEQ ID NO: 241746 - DNA, 1845 bp, synthetic construct
  misc_feature 1..1845: note = Description of Artificial Sequence: Synthetic coding sequence
  source 1..1845: mol_type = other DNA
atggatggcaaagtcgcagttcaggagtgcggaccaccggctgtcagctgggttcctgaggagggagagaaactcgatcaagaagacgaagaccaagtaaaagaccgcggtcagtggacaaataaaatggaatttgtgctgtccgttgccggtgaaataatcggcctaggcaatgtctggagattcccttacctctgctacaagaatggaggaggagcgttctttattccttattttatattttttttcgtatgcggaattcccgtgttctttctggaggtagcactgggccaatacactagtcagggttcggtgacagcttggcgaaagatctgtcctttatttcaggggatcggtctggccagcgtggtgatcgagtcctacctgaacgtgtattacattatcatcctggcatgggccctgttctacctattctcaagtttcacaagcgagctgccatggactacgtgcaataatttttggaataccgagcattgcacagactttctgaaccatagcggggctggcacagtcacccctttcgaaaacttcacatccccagtcatggagttctgggagcggagggtgctcggcattacaagtggtattcacgatctcggtagcctcaggtgggaactggccttatgtttgcttctggcctgggtgatttgttacttctgcatctggaaaggcgtgaagagcacaggaaaagttgtgtatttcaccgccaccttcccctatctaatgctagtgatattgctgatcagaggtgtgaccctgcctggagcctatcagggtatcatttattacttaaagcccgacttgttcagactaaaggacccacaagtttggatggacgcagggactcagatatttttctctttcgcgatctgccagggttgcctcacagctcttggaagctataataaataccataataactgctataaggactgtatcgcactgtgtttccttaactcagccactagcttcgtggccggtttcgtggtgttttcaatcctggggtttatgtcacaggaacaaggcgtgcccatatcagaggtggccgagtctggcccagggctggcctttattgcttttcccaaagcggtcacaatgatgcctctgtcacaactgtggagctgtcttttcttcattatgctgatcttcctgggcctggactcccaattcgtttgcgtggaatgtcttgtcactgcttctattgatatgtttcccaggcagttacggaagagcggaaggcgggagctgctcatccttaccatcgcggtgatgtgttacctgattgggctcttccttgttaccgaagggggaatgtacatatttcagctgtttgattactacgcatcatctgggatttgcctcctgtttctttctctttttgaggttgtatgcatctcctgggtctacggcgctgaccggttttacgacaacatcgaggacatgataggataccgcccatggccactggtgaaaatctcatggctgtttctcactccgggactgtgcctggctacttttctgttctcgctgtctaagtacacacccctgaagtataataacgtctatgtttacccaccatggggatactccataggctggttcttagcccttagttctatggtttgtgtccccctattcgttgtgatcactctgttgaaaaccagagggccatttcgcaaacgcttgcggcagttgatcactccagattcctcactaccacagcctaagcagcatccatgcttagatgggtcagcaggtaggaatttcggacccagtccaacacgagagggccttatagccggtgagaaagaaactcacctctag

SEQ ID NO: 241747 - DNA, 441 bp, synthetic construct
  misc_feature 1..441: note = Description of Artificial Sequence: Synthetic coding sequence
  source 1..441: mol_type = other DNA
atggacggcaaagtcgctgtccaggagtgtggaccaccagcggtgtcttgggtcccagaagagggcgagaaattggaccaggaagatgaggatcaagttaaagacagggggcaatggacgaacaaaatggaattcgtgctgagcgtggctggagagatcatcggtctgggcaacgtctggcgcttcccttatctgtgttacaaaaatgggggaggagcattttttataccatacttcatcttcttctttgtgtgcggaattccagtgttttttctcgaagtggccttggggcagtacacgagtcagggctctgtgaccgcttggagaaaaatctgtccattgttccagggcataggcctcgctagcgtagtcatcgaatcctatcttaatgtctactacattataatcctggcctgggcgctgttctatctcttttcttag

SEQ ID NO: 241748 - DNA, 1908 bp, synthetic construct
  misc_feature 1..1908: note = Description of Artificial Sequence: Synthetic coding sequence
  source 1..1908: mol_type = other DNA
atggctaaaaaatccgctgaaaatggcatatactcagtctccggggatgaaaaaaaggggccactcatcgccccaggtcctgatggcgcacccgcaaaaggggatgggccagtaggcctgggaactcctgggggaaggctggctgtgccacctagagaaacgtggacccgccagatggatttcatcatgagctgtgtgggcttcgcggtcggcctgggtaacgtctggcggttcccttacctgtgttataaaaacgggggaggggtgttcctgatcccatacgtgttgattgcacttgtggggggtattcctatctttttcctggagataagcctgggtcagttcatgaaagctggaagcataaacgtttggaatatctgcccactcttcaaggggttgggatatgcatccatggtgatcgtgttctattgcaatacttactatatcatggttttggcctggggattctactacctcgtaaagtcattcacgacaactttaccgtgggcaacatgtggtcacacttggaatactcctgattgtgttgagatcttccgtcatgaggactgtgctaacgccagcttggccaacctaacctgcgaccagctcgccgacagacgaagccccgtaatcgagttttgggagaataaagtactcaggctgtctggcggactcgaagtgccgggagccctgaattgggaggtgaccctgtgtttgctggcatgttgggtcctggtttacttttgtgtttggaaaggggtgaaatctacaggaaaaattgtttacttcaccgcaacattcccgtatgtggtgttggtggtcctgcttgtccgtggtgtgctgctccccggtgcactggacggcattatctactaccttaagccagattggagtaagctgggaagcccccaggtgtggatcgacgcgggaactcagatcttcttcagctatgcaattggcctgggagctctcaccgcgctcggctcctacaaccgtttcaacaacaactgttacaaagacgctatcatactggcactaatcaatagcggaacaagcttttttgccggatttgtggtgttttcaatcctcggatttatggccgctgaacagggagtacacatcagcaaggtagccgagagtggcccaggtctcgctttcatcgcctacccacgcgcagtgaccctcatgccagtggcgccactatgggcagctctcttcttcttcatgctgcttttattgggactggattcacagtttgtgggagtggagggattcatcaccggacttctggatttgctgcctgctagctactatttccggttccagagggaaatctcagtggctctctgttgcgcgctgtgtttcgtgattgacctctcaatggtgaccgatggaggtatgtacgtgtttcagctcttcgattactactcagcctccgggaccacattgctctggcaggccttctgggagtgcgtcgttgttgcctgggtttatggcgctgatcggtttatggacgatattgcatgtatgataggctatcgcccttgtccatggatgaaatggtgctggtctttcttcacccccctagtctgcatggggatctttatctttaacgtggtgtattacgaacccctggtgtataataacacatatgtctatccctggtggggagaggcaatgggttgggcgtttgccctctccagtatgctgtgcgtgccgcttcacctgctgggatgcctcctgcgcgctaaagggaccatggccgagcgctggcagcatctgacgcagccaatatggggccttcatcacttggaatatcgagctcaagacgccgatgtcagaggactgacaacactaacccccgtgtcagagtcttcaaaagtcgtggtagtcgaatctgtgatgtag

SEQ ID NO: 241749 - DNA, 2190 bp, synthetic construct
  misc_feature 1..2190: note = Description of Artificial Sequence: Synthetic coding sequence
  source 1..2190: mol_type = other DNA
atgctgcctacactgcagatacaggggccagccgcattcgctcccggagacagaggaccgggaagacactgtccgttcccagttcctatcacgcctactggagctcttctgcctgtctctgacagttgcgacagcctggtggacctagtgtggcccagtgtaacgtaccttgcgctggggacacagtcccgagtgtggcctcaccccttgggggctccagggcaggctggcgaatctcccgaacaaaggaggcaatgtctcgagctgtgggacatggcgtcatcccttggcgataaggtcccacgggctgcctgtgggaaaaggggtcagacagtgtggcagttgcacctggcttgcttgtgccttgcacaatttcatagcccccctgcccaaccgccaccccttagtcggcgagggggagggcctgaccctgatcctataagcagaagtctcccgggtccccctactcccgcactgcccacacacagctactcatcacatagcccacgggctccgcgtctgctctctcctctgagacgtgctccacgcggttccccggctccacaccgccacgcgtctctgcagacaaatgaggcccctagagagttgcctcactgcacttggccgggacttccgggacggagcctagcccctagcttcctgtggagggagccatggctgggtggacaatggggaccacttaacattcctgccaggaagggcgacaggcggcgttgggagtggggctgtgagggagggggagcaaccgctagtgccgagcagcctggaccacagattgtctattttactgctacattcccttacgtcgtgcttgtggttcttctcgtgcggggtgtgctactcccaggagccctggacggcatcatatattacttaaaacctgattggtcaaaactgggttctcctcaggtatggatagacgccggaacgcagatcttcttcagctatgctattgggctgggcgctttgactgcgctgggatcatacaatcggtttaacaacaactgttataaggatgcaatcattctggccctcattaactccgggacatcttttttcgctggcttcgtcgttttcagcatacttggcttcatggcagcggaacaaggtgtgcacatttcaaaagtggccgagtccggtccgggtctcgcatttatagcataccccagagctgtgacacttatgcctgtagctcctttatgggcagctttgtttttcttcatgctgctcctcctcggtctcgacagtcaggtttgtatgggcctctgggaccgagagcctgggggaggccgtagagagggttgccgacaagggaaaggatggaggagatgtggcgctagaccagaattgccttggcctcagttcgtgggtgtcgagggcttcattaccggcctgcttgatcttctccctgcttcatactattttcgtttccagcgcgaaatttccgtagcgctgtgctgtgctctgtgcttcgtaatcgacctttcaatggtgacagacgtctctggcgtcgggggacttccagttacttccgggggaaggctgccctcatctctgacaggactctgtccccaaggcggaatgtatgtcttccagctcttcgattattactcggcatccggaaccaccctgctctggcaggccttttgggagtgcgtggtagtggcttgggtctatgggcgttcctggctaagggcaggtcttggcgatgggggaggagaaggcaggtcgcccgcttggccggcttctccaaggggagccgatcggtttatggatgatatcgcatgcatgataggctataggccttgcccgtggatgaagtggtgttggtccttttttacacctttagtctgtatgggtatttttatattcaatgtcgtttactatgaaccccttgtgtataacaatacgtacgtctatccctggtggggagaggcaatgggttgggccttcgctctttctagcatgctatgcgtgcctttacatctgctcggttgcttattgcgcgcaaaggggaccatggctgagcgctggcagcacctaactcaaccaatctgggggctccatcacctagagtatagggcacaagatgcggacgtccgtgggctcaccactttgacccctgtgagcgagtcctcaaaagttgtcgtcgtcgaaagcgtaatgtag

SEQ ID NO: 241750 - DNA, 471 bp, synthetic construct
  misc_feature 1..471: note = Description of Artificial Sequence: Synthetic coding sequence
  source 1..471: mol_type = other DNA
ctcctacactccccaacttggtcttggtcttgctgctggtgcgttgagtgttgctgcttggccccatggatggcttccttcaccatctcctcacttactggccagtcctggggtcctttatctcctggacaactccagccactgcagcagcagcttctgcagtgggaccaattactttgttggctgcggggactgcttcaccctggtctgcatgggtgccgcgctggacgggcacatctccaaggaggccgagtccgggagatctcggtagccctttgctgtgccctgtgcttcgtgatagatctcagcatggtgaccgatggcggaatgtacgtctttcagcttttcgactattactccgcatccggaacaacactgctctggcaggccttttgggaatgtgtagtggtggcatgggtttacggggctgaccgcttcatggacgacatcgcctgtatgatcggttattag

SEQ ID NO: 241751 - DNA, 339 bp, synthetic construct
  misc_feature 1..339: note = Description of Artificial Sequence: Synthetic coding sequence
  source 1..339: mol_type = other DNA
tgattcaggcatgaagactgcgctaatgcctctctggccaacttaacctgcgatcaactggctgataggagatcccctgtgatcgaattctgggagaataaggtactaaggctatcagggggacttgaagtgccaggtgccctgaactgggaagttacactgtgcttattagcctgttgggtcctcgtatacttttgcgtctggaagggcgtcaaatctacgggtaaagtgcctttggaggcctgctctggagaaggcggtagtgctcttggcgcaggttgcttatgtcaagcgcacttatggcagcgagaggtgacccggcagtccctcgccttgtag

SEQ ID NO: 241752 - DNA, 1563 bp, synthetic construct
  misc_feature 1..1563: note = Description of Artificial Sequence: Synthetic coding sequence
  source 1..1563: mol_type = other DNA
atgaaagctggcagcataaatgtgtggaatatttgcccattgttcaaaggcctaggatatgcttcgatggtgattgttttctattgcaatacatactacatcatggtacttgcatggggattctattacctggtgaagagcttcaccactacattgccatgggccacctgcgggcacacatggaataccccggattgtgtagaaatcttcagacacgaggactgcgccaacgcctctctggccaatctaacttgtgaccagctggccgataggcggtccccagtgatcgaattttgggagaataaagtcctcaggctgtccgggggactagaggtccccggagcgttgaattgggaggtgacactctgtctgctcgcctgttgggtcctggtctatttttgcgtctggaaaggcgtgaaatccactggcaagatagtttatttcactgccacgtttccctacgtggtccttgtggtcctgctggtaaggggagtactccttcctggagccttggacggaataatttactacttaaagcctgactggtcaaagctcggttcaccacaagtttggatagacgccggtacccagatttttttctcttatgctattggactcggcgcacttacagccctgggcagttacaatcgcttcaacaataactgttataaggatgctatcatcctggccctgatcaattctgggacctcattcttcgctggtttcgtggtattcagtatcctcggattcatggctgccgaacagggtgtgcacatttccaaggtagccgagtcgggtcctgggttggcctttatcgcataccctcgagcagtgactctgatgccggtggccccactgtgggcagctctgttttttttcatgctgctcctgctgggcctggattctcaattcgttggagtggaagggtttatcacaggcttactggatttgctgccggcttcctattactttcgcttccagcgagaaattagcgtggcactgtgctgtgctctgtgtttcgtcatcgacttgagcatggtcaccgacggtggcatgtacgtcttccagctgtttgattattattccgcatctggaacaaccctcttgtggcaagccttctgggaatgtgtggtcgtggcttgggtttatggggctgacaggtttatggatgacatagcctgcatgatagggtataggccttgcccttggatgaaatggtgttggagctttttcactcccctggtatgtatgggtatcttcatcttcaatgtggtctactacgagccccttgtttataataatacgtatgtgtacccctggtggggcgaggctatgggttgggccttcgccttgtcttccatgctgtgtgtccccctccacctattagggtgtctgcttcgggcaaaagggactatggcggagcgatggcagcacctcacccagccaatctggggccttcaccacctggagtacagggcccaggatgccgatgtgcgcggactgaccactctcacgcctgtgtctgaatcaagtaaagttgtcgtggtcgaatctgtgatgtag

SEQ ID NO: 241753 - DNA, 525 bp, synthetic construct
  misc_feature 1..525: note = Description of Artificial Sequence: Synthetic coding sequence
  source 1..525: mol_type = other DNA
tgaatagacgccggaactcagatcttcttcagctatgctatcgggctgggcgctctgaccgcattgggttcctataacaggttcaataacaattgttacaatggcacctcttttttcgcagggttcgtagtgttctccattctcggattcatggctgcggaacagggagttcatatcagcaaggttgctgagagcgggcctggcctggcattcatagcttaccctcgtgctgtgactttaatgcccgtcgccccactttgggcagccctgtttttcttcatgctgttactgctggggttggatagtcaatttgttggagtggagggattcattacaggtctcctggacttactgcccgcatcgtactactttcggttccaaagagagattagcgtagctctgtgctgtgccctgtgctttgttattgatctgagtatggtaacggacggaggaatgtacgtatttcagttattcgattattatagtgcaagtggcaccaccctgttgtggcaggctttctggtag

SEQ ID NO: 241754 - DNA, 270 bp, synthetic construct
  misc_feature 1..270: note = Description of Artificial Sequence: Synthetic coding sequence
  source 1..270: mol_type = other DNA
gggaggcaccaccctggctctcatcagcagtgggatcaactgttatgttggctgcggggtttattacatcccggattgcatggatgccgggctggacgagcccatctccagggcggaagagtccgggctggaccaggcctacacaggctccccgcaggctgtcatgcagacgcttcgggacctactctggggtgccctgtcttgcttcatgcagtggccgcttggtctcggcagccgggagtggagggctttatcaccgggctgctttag

SEQ ID NO: 241755 - DNA, 1863 bp, synthetic construct
  misc_feature 1..1863: note = Description of Artificial Sequence: Synthetic coding sequence
  source 1..1863: mol_type = other DNA
atgagcaaaagcaagtgctctgttgggctcatgtcttcggtagtggcccctgcaaaggagccaaacgccgtcggcccaaaggaggtggaactgatcctagtaaaagaacagaatggggtgcagctgacaagcagcactctgaccaatcccagacagtcacctgtagaagctcaggacagagagacatggggcaaaaaaattgactttttgttgagtgttattggtttcgcagtggatctggccaacgtctggaggtttccttacctttgttacaagaacggaggaggcgcatttctggtcccctacctcttgtttatggtaatcgcaggtatgccccttttctatatggaattggctctcggccagttcaacagggaaggcgctgcaggcgtgtggaaaatatgtcccatactcaagggggtcgggtttactgtaatccttatctctctctatgtggggttcttctataacgtaataattgcttgggcattacactatctgttcagctcttttacaacagagcttccttggatccactgtaacaacagctggaactctccaaattgcagtgacgcccacccgggagactcctcgggcgattcaagcggacttaatgacacctttggaacgaccccagccgctgaatattttgagaggggtgtgcttcacctacaccaaagccacgggatcgacgatcttgggccacctaggtggcaactgactgcctgcctggtcctcgtaatcgtcctcctgtacttttcactgtggaaaggtgtgaagacgtctgggaaagtcgtgtggattaccgctaccatgccctatgtggttctaacagcccttctgttgaggggggttactctgcctggggctatcgatggaattcgggcttacctgtccgtagatttttatcggttgtgtgaggccagcgtttggatcgacgccgcaactcaagtgtgcttttccctgggtgttggattcggcgtcctcatcgccttcagcagttataacaagtttaccaataactgctatagagacgccattgtcaccacatcaatcaatagccttactagcttcagctccggcttcgtagtgttctcctttctgggatacatggcacagaaacatagcgtccctatcggagacgtggcgaaagatgggcctggactaattttcattatataccctgaggctattgcaaccctgccgctgagctctgcctgggccgtggtcttttttattatgcttctgaccttaggcattgattctgccatgggagggatggaaagcgtcattacaggcctaatcgacgaattccaactgctgcaccgacaccgagagctatttacattgtttatcgtcctggcgacatttttgttaagcctgttttgtgtgactaatggcggaatctatgtctttaccctcttggaccattttgctgctggaacatcaatcctatttggcgtcctcattgaggccatcggcgtggcctggttctatggcgtaggccagttcagtgacgacattcaacagatgacaggtcagcgaccttcgctgtactggcgcctttgttggaagttggtcagtccctgcttcctcctgtttgtcgtagtcgtgtccattgtcacttttcggcctcctcattatggtgcctacattttccccgactgggctaacgcactaggctgggtaattgctacgagtagcatggcaatggtgccgatctacgccgcatacaagttctgttctctgcccggtagctttagagaaaagctggcgtacgcaatagcgcctgaaaaagaccgggaactggtggaccgcggtgaggtcaggcaatttacactccgccactggctgaaagtgtag

SEQ ID NO: 241756 - DNA, 1863 bp, synthetic construct
  misc_feature 1..1863: note = Description of Artificial Sequence: Synthetic coding sequence
  source 1..1863: mol_type = other DNA
atgtctaaatctaagtgctctgtgggactgatgagctctgtagtggcgcctgccaaagagccaaacgccgtcgggccaaaagaggtggaacttattctggtaaaagaacagaatggagtccaacttacctcctctaccctgacaaacccaaggcagtctccagtcgaggcacaagatagggaaacatgggggaaaaaaattgacttcctgctgagcgtcataggcttcgctgtggacctggccaatgtctggcgttttccctacctgtgttacaaaaatggcggaggcgcttttctcgtcccttacctcttgttcatggtcatcgccggaatgcccctcttctacatggagttggccctcggacagttcaaccgcgaaggggctgctggggtgtggaagatttgccccatcttaaagggagtgggttttaccgtcatcctcatcagtctctacgtgggtttcttttataatgtgatcatcgcatgggctttacattatctcttttccagcttcactactgaattgccttggattcattgtaacaattcttggaactctccaaactgcagtgatgctcatccgggagattcaagcggggattccagtggcttgaatgatacttttgggacaacgcccgctgccgagtacttcgaaaggggtgtccttcacctgcaccagagtcacgggatcgatgatctaggccctccgcgatggcagttgacagcatgtctcgtactcgtgattgttttgctgtacttctctctgtggaaaggcgtgaagaccagcggaaaggtcgtttggattaccgccactatgccttatgtggtgctcaccgcgctgctccttcgtggtgtgacgctgccaggtgccattgatggcattcgtgcctacctctctgtcgacttctacagactttgcgaagcctcggtgtggatcgatgccgctacgcaggtgtgtttttccctcggcgtcggcttcggggttctgatcgcatttagttcctataataaattcaccaacaattgctaccgcgacgctattgtcactacgtccatcaacagcctgacgagctttagttcaggatttgtggtctttagttttctcggatacatggcacaaaaacattcagtgccaataggcgacgtcgctaaggatgggcctggcctgattttcataatctatccagaggccatcgctaccctcccgctaagttcagcttgggccgtggtgttttttattatgctgttaactttgggcattgacagcgccatggggggaatggaaagcgtaatcactggactcatagatgagttccagcttctccaccgacatagggaattgtttacattgttcattgtactagctacattcctactgagtctgttctgtgtgactaatgggggtatctatgtgttcaccctactagaccactttgctgctgggacaagtatcctcttcggtgtgttaattgaggcgataggggtcgcttggttttacggtgtgggacagttctccgatgacattcagcagatgacgggtcagaggccatccctgtattggcgactctgttggaagctcgtgtctccctgtttcctgctgttcgtcgtggttgtgagcatcgtgacattccggcctcctcattacggcgcttatatcttccctgactgggcgaacgctctcggctgggtgatcgccacttcctcaatggcaatggttcccatctacgctgcatataagttctgctccttaccaggcagtttcagggaaaaactcgcctacgcaatcgcacctgagaaggacagagagcttgtggacagaggggaggtgcgccagtttaccttgcgccattggctgaaagtctag

SEQ ID NO: 241757 - DNA, 1800 bp, synthetic construct
  misc_feature 1..1800: note = Description of Artificial Sequence: Synthetic coding sequence
  source 1..1800: mol_type = other DNA
atggctaccaatggatctaaagtcgcggacgggcagatctcgactgaagtatcagaggcacctgtggcaaatgacaagcccaaaaccttggtcgtgaaggtgcagaagaaggccgctgacctccctgaccgcgatacctggaaaggcaggttcgatttcttaatgtcctgtgtgggctatgcaattggcctgggaaacgtttggcgctttccttacttgtgtggcaagaacggcggaggagcattcctaattccctatttcctgaccttaatttttgctggggtgccattgttcctgctggaatgttcccttggccagtacacctcaatcgggggactgggagtttggaagctagctcccatgttcaagggcgttggacttgctgcagctgtgctgagtttctggctgaacatctattatattgttattattagctgggcaatctactatctgtacaacagctttacaacaaccctcccctggaaacagtgtgacaacccctggaataccgaccggtgcttttctaactacagcatggtcaataccaccaacatgacttctgcagtggtcgagttttgggagagaaacatgcatcagatgacagacggtctggataagcctggtcagatccgctggcctctggcaattaccctcgcaatcgcgtggatcctcgtatacttctgcatctggaagggggtcggatggaccggtaaagttgtgtatttcagcgcaacttatccctacatcatgttaatcatcctctttttccggggagtcacgctgcctggagctaaagagggcatactgttctacatcacgccgaatttcagaaagttatcagattcagaagtgtggcttgacgctgcaacacagatatttttctcctatggcctcggccttggcagtctgatcgctttagggagctataactctttccacaataatgtttacagagattctatcattgtttgctgtatcaacagctgcacttcgatgttcgccggatttgtcatattttccattgtgggcttcatggctcacgtaaccaagcggagcattgcagatgtggccgcttcgggtccaggtcttgccttccttgcctatccagaagcagttactcagttacctatatctcccctatgggcaattctcttcttcagtatgcttctgatgctaggcatcgattctcaattttgcacagttgaagggtttataacagctctcgtcgacgagtacccaaggctgttacggaatcggagggagctctttatcgcagcagtctgtatcatatcgtacctaattggtctgtctaatattacccaagggggaatctacgtctttaagctcttcgactactacagcgcatccggaatgtccctgctattcctggtcttcttcgagtgtgtgagcataagctggttctatggggtcaaccggttctacgacaacatccaggagatggtgggcagcagaccttgtatatggtggaaattgtgctggagtttctttaccccaatcatcgtggccggagtattcattttttcagctgtgcagatgacacccctcactatgggcaattacgtttttccaaaatgggggcagggtgtgggttggctaatggctctctctagtatggttctgataccgggttatatggcttatatgttcctgaccttgaagggtagtctgaagcagaggatccaggtcatggttcagcctagcgaggacatcgtgagacctgaaaacggccctgagcagcctcaagccggatcctctactagcaaggaggcctatatctag

SEQ ID NO: 241758 - DNA, 120 bp, synthetic construct
  misc_feature 1..120: note = Description of Artificial Sequence: Synthetic coding sequence
  source 1..120: mol_type = other DNA
atggctaccaatggatcaaaggtagcggatggccaaattagtaccgaggtcagtgaggctcccgtggctaatgataaaccaaagaccctggtggtgaaagtgcagaaaaaggccgcatag

SEQ ID NO: 241759 - DNA, 1266 bp, synthetic construct
  misc_feature 1..1266: note = Description of Artificial Sequence: Synthetic coding sequence
  source 1..1266: mol_type = other DNA
atggttaataccaccaacatgacaagtgccgtggttgaattctgggaaagaaacatgcatcagatgactgatggtctggacaagcctggtcagatccgatggcccctggcaatcacactggcaattgcttggatcctggtgtacttctgtatatggaaaggtgtcggttggaccggtaaggtcgtctatttctctgccacctacccctatattatgctgattattcttttcttcagaggagttacactccccggtgctaaagaggggatcctgttctatatcacccccaactttagaaagctgtccgatagcgaggtatggttggacgcagccacgcaaatcttcttttcttatgggctgggactgggttcactgatcgccctggggagctataacagttttcataacaatgtctatagggattcgattatcgtgtgctgtatcaatagctgtacctcaatgttcgccggtttcgttatattcagtattgtgggctttatggctcatgtgaccaagcggtccatcgccgacgtggcagcctccggacctgggctggctttcctggcctaccctgaggccgtgactcaactaccaatctcaccactctgggcaattctgttctttagcatgctgctgatgctcgggatagattcccagttctgtacagtggagggtttcattactgcactcgtggatgaataccccaggctgcttcgcaaccgcagggaattgttcatcgctgcagtctgtattattagctatttgatcggcttgtcaaatatcacacaggggggtatctacgtcttcaaactgttcgactattatagcgcctccgggatgtcactgctctttttggttttttttgaatgcgtctcgattagttggttctacggcgttaacagattctacgataatatccaggagatggtgggcagtaggccctgtatctggtggaagctttgctggtccttctttacgcccatcatagtagccggtgtgtttatttttagcgccgtgcagatgactcccttaacaatgggtaactacgtcttccccaagtggggacagggcgttggctggcttatggcgcttagtagcatggtgctgataccagggtatatggcatatatgttcctgaccctcaaaggcagcttaaaacaaaggatacaggtaatggtgcagcctagtgaagacattgtgcgtcctgagaacggccctgaacaaccccaggccggaagcagcaccagcaaggaggcttatatctag

SEQ ID NO: 241760 - DNA, 1899 bp, synthetic construct
  misc_feature 1..1899: note = Description of Artificial Sequence: Synthetic coding sequence
  source 1..1899: mol_type = other DNA
atgactgcggagaaggctctgcccctgggtaatggcaaggctgcagaggaggctcgtgagagcgaagccccaggcggagggtgtagttcaggaggagcagctcctgcacgacaccctagagttaagcgtgacaaagccgttcatgaaagggggcactggaacaataaggtcgagtttgtgctctccgttgccggagaaattatcggccttggcaatgtgtggagattcccctacctgtgttacaagaatggaggaggagccttcctcatcccttatgtggtgttcttcatatgctgcgggattcctgttttctttttagagaccgcccttgggcagttcaccagcgagggcggtataacatgttggcgcaaggtatgccctctctttgaagggatcggttacgccactcaggtgatcgaggctcatctaaacgtctactacattattatactcgcctgggctatcttctatctgtcgaattgctttaccacagaactcccttgggcaacttgcggacatgaatggaacactgagaactgtgttgaatttcaaaagctgaacgtttcaaactactcacacgtatccctgcagaatgcgacaagtcccgtcatggagttttgggaacatagggtgctcgccattagtgacgggatcgagcacattgggaatctgcgctgggagctggcactgtgcctcctggctgcttggacaatctgttacttttgtatttggaaaggcaccaagtctaccggcaaagtagtgtatgtaactgcaacgtttccgtacatcatgcttctcatcctattgattaggggggtgactttgcccggagcgagtgagggcattaagttttacctctatccagatttgtcgcgcctaagcgatcctcaggtgtgggtggacgccggtacacagattttcttctcctacgcgatttgtcttggctgcctgacagctctgggaagttacaacaactataataataactgctacagggactgcattatgttgtgctgcctgaacagcggaacctcatttgtggctggtttcgcgattttctcagtcctgggtttcatggcatacgaacagggggtgcctatcgccgaggtggccgagagcggcccaggcttggccttcatcgcataccccaaggctgtgaccatgatgcccctctcgccattgtgggccacactgttctttatgatgcttatctttttggggttagacagccaattcgtgtgcgtggagagtctagtcactgcggtggtcgacatgtaccctaaggtgttccggagaggctatagacgggaactgctcatcctcgcccttagtgtcatttcatattttctcgggctcgtgatgctgacagaaggcggtatgtacatctttcagctctttgactcctacgccgcaagtggcatgtgcctgctatttgtggctattttcgagtgcatctgcatcgggtgggtatatggtagtaataggttctacgataacattgaggacatgatcgggtacagaccaccatcactgattaagtggtgttggatgatcatgacccccggtatttgtgcaggcatctttatcttctttctgatcaaatataaacctctgaagtacaataacatctacacctatcctgcttgggggtacggcatcggctggcttatggctttatctagtatgctttgtataccactttggatctgtatcactgtgtggaagacagagggaaccctccccgaaaagctccagaagcttacaaccccctcaacagacttgaaaatgcggggaaagctgggggtaagccccaggatggtgacggtcaatgactgtgacgccaagttaaaatcagatggaacgattgcagctatcacagagaaggaaacccacttctag

SEQ ID NO: 241761 - DNA, 627 bp, synthetic construct
  misc_feature 1..627: note = Description of Artificial Sequence: Synthetic coding sequence
  source 1..627: mol_type = other DNA
atgaccgcagaaaaggcattgccgctgggaaacggaaaggccgcagaggaagccagagaatcagaagcccctggtggcggatgctccagcggtggggcagcgccagccaggcatccaagggtcaaaagagataaagccgtccacgagagagggcactggaacaataaagttgaattcgtcctgtctgtcgcgggagaaataattggcttgggcaatgtttggagatttccatacctgtgttataagaatggtgggggagccttcttaataccctatgtggtattctttatctgctgcggcatacctgtgttcttcctcgagaccgccctgggccagttcaccagtgagggaggcattacgtgctggcgtaaagtgtgtcctctgttcgaagggatcggttatgcaactcaggtgattgaggctcaccttaacgtgtattacattatcatactcgcctgggctatcttttacctgagtaactgcttcactacagagcttccatgggcaacttgtggccacgagtggaatacggaaaattgtgtcgagttccagaaattaaatgtaagcaactacagtcacgtaagtctgcaaaatgcgacatcacccgtcatggagttctgggagtag

SEQ ID NO: 241762 - DNA, 2394 bp, synthetic construct
  misc_feature 1..2394: note = Description of Artificial Sequence: Synthetic coding sequence
  source 1..2394: mol_type = other DNA
atggattgcagcgctcccaaggagatgaataaattacctgcaaatagtccagaagctgcggctgctcagggacaccccgacggtccctgtgcgccaagaactagtcctgagcaggaactgccagccgctgccgctccaccccctcctagggtacccagatcggcatccaccggagctcagactttccaaagcgccgacgcaagggcctgcgaggccgagcggcctggggtaggatcctgcaaattaagctctcctcgggctcaggctgcctcggcggctttgagggatctgagggaggctcaaggggcacaggcctcaccccctcctggatcaagtggaccaggaaacgccctgcactgcaagatccccttcttgcgaggtccagagggagacgcgaatgtgtcagttggaaaaggaactctcgagaggaataacacacccgttgttggctgggtgaacatgtctcagtcaactgtggtgctggccacagatgggatcacctcggtcctacccggatcggtggctaccgttgccacacaggaagacgaacagggcgatgaaaataaggcgaggggtaattggtcctctaaactcgatttcatcctctccatggttggatatgcggtgggtctgggaaacgtttggcgttttccttacctcgctttccagaatggcggaggcgcatttctgatcccttatctgatgatgcttgctttagcagggttgcccatattcttcttagaggtaagcttaggccagtttgcgtcccaaggccctgttagcgtttggaaagcgatcccagccctgcaggggtgcggcatcgcaatgctgattatctcagtgctaatcgcaatctactataatgtaatcatttgctacacccttttttacctgtttgcaagctttgtgagcgtgctgccatggggaagctgcaacaacccctggaacacgcctgaatgtaaagacaagaccaaactgctgttggactcatgcgtcattagtgaccaccctaaaattcagatcaaaaatagcactttctgcatgacagcttatcctaacgtgactatggtgaacttcacaagccaggctaacaagacatttgtgagtggctcagaggaatacttcaaatacttcgtcctaaaaatcagcgctgggatagagtaccctggagaaattaggtggcccctggccctctgcttgtttctggcatgggttatcgtgtacgccagccttgcaaaaggcattaagacatctgggaaggtagtgtattttactgcaacctttccatacgtggtgctggtgattttgctaattaggggcgttacactgcctggcgcaggcgcaggcatctggtactttatcacgcccaaatgggagaagttaactgacgcgacagtctggaaagatgctgcaacacagatttttttcagtctgtctgcggcttggggtggcctgattacgttgagctcatataataagtttcataacaattgctacagagatacccttattgtgacatgtaccaactcagctacctccattttcgcaggcttcgtcattttttctgtgattgggttcatggccaacgagcgtaaggtcaacattgagaatgtcgcagaccagggccctggaatcgcgttcgtcgtgtatcccgaggcactcacacgcttgcccctgagtccgttttgggccattatattttttctaatgttgcttacactgggcctggacaccatgtttgcaacgattgagacaatcgtgacgtccattagcgatgagttccccaaatacctacgaacccacaagccagtgttcaccctcgggtgctgtatctgtttctttatcatgggtttcccaatgattacccagggtggcatatacatgttccagttagtggatacatatgccgcatcctacgctctggtgatcatcgccattttcgagcttgtcggaatttcttatgtctatgggctccagagattctgcgaggacatcgagatgatgataggctttcaacccaatattttctggaaagtgtgctgggcatttgtaactcctaccatcctgactttcatactgtgtttctcattctaccaatgggagccaatgacatacggaagctatcgctaccctaactggtctatggtgctcgggtggctgatgctggcatgttcggttatctggatcccgataatgtttgtgatcaaaatgcatctcgcccctggacgctttatcgagaggctcaagctggtatgttctccccagccagactggggcccattccttgcacaacacagaggggagaggtacaaaaacatgattgaccctttaggcacctccagcctaggcctgaagctcccagtcaaggacctcgagctggggactcaatgctag

SEQ ID NO: 241763 - DNA, 1959 bp, synthetic construct
  misc_feature 1..1959: note = Description of Artificial Sequence: Synthetic coding sequence
  source 1..1959: mol_type = other DNA
atgagcggcggagacaccagagctgcgatagccaggcctaggatggccgctgcccatggtcccgtcgcaccatctagccccgaacagaacggagcagtaccttccgaggccactaaacgggaccagaatctcaagcggggtaactggggcaaccagatcgaatttgtgttgacaagtgttgggtatgccgtgggtctgggcaacgtgtggaggtttccctatttgtgttatcggaacggtggtggggcttttatgttcccatactttattatgcttatcttttgtgggataccactgttttttatggaactgagcttcggtcagttcgccagtcaggggtgtttgggagtttggaggatttctcccatgtttaaaggagttggttacggcatgatggtggtctctacctacatcggaatctactacaacgttgtgatctgcattgccttttattacttcttctccagcatgacgcacgtcctgccctgggcttactgtaataacccatggaacacccacgactgtgctggcgtcctcgacgcttctaacctgactaacggttcacgcccagccgctttaccttctaatctgtcccatcttctgaaccactcactgcagagaacctcgccctcagaagaatattggagactatacgttcttaagctttccgacgacatcggcaacttcggggaggtgagattacccctgctgggttgtcttggggtgtcctggctcgtcgtctttctgtgtttgatcagaggtgtaaaatcctccggtaaggtggtgtacttcaccgctacattcccttatgtggttctgaccatactgtttgtgcgcggtgttaccctggagggtgcctttgatgggattatgtattatctgaccccacagtgggataaaattctcgaagcgaaggtgtggggtgatgcagcctctcaaattttctactctctgggttgcgcctgggggggtctgattaccatggctagttataataaattccataataactgttatcgggatagcgtgataatctctattacgaactgtgcaaccagcgtctacgctggcttcgtgatcttttccatattgggcttcatggcaaatcaccttggcgttgacgtttctagagttgccgatcatggccctggcttggctttcgtagcttacccagaggcgctaacactgctgcccatttccccactttggtccctgctctttttctttatgttaatcctgttgggtctgggaacacaattctgcctgctggaaacgctggtcactgcgattgtcgacgaggtgggaaatgagtggatactgcagaagaagacgtatgtcacactcggagtggcggtggccggttttctactggggattcccttaacttctcaggccggaatttactggctgctcctgatggacaactatgcagcatccttctccctggtggtgatctcatgcattatgtgtgtggcaatcatgtatatctacggccatcgaaactatttccaagacattcagatgatgctgggttttccaccgcctctctttttccaaatttgttggcggttcgtttctccagcgatcattttcttcattctagtctttactgttattcagtatcagcccatcacttataaccactatcagtacccaggctgggcagttgcaatcggatttctgatggctctgagttctgtgctctgcatccctctttatgccatgttccgcctttgccggacagatggggacactctcctccaacggctaaaaaatgccacaaagccatccagggactggggaccagccctgctggaacacagaaccggtcggtatgcacccacaattgcaccctctccggaggatgggtttgaggtccagccccttcaccccgataaagcccagattcccatcgtaggatctaatggatcttcccggcttcaagactcccgtatttag

SEQ ID NO: 241764 - DNA, 2121 bp, synthetic construct
  misc_feature 1..2121: note = Description of Artificial Sequence: Synthetic coding sequence
  source 1..2121: mol_type = other DNA
atgagcggaggagatacacgcgcagctatagccaggccccgaatggccgcagcccacggtcctgtggccccttcttctcccgaacaggtgacacttctgccagtgcaacggtcatttttcttgcccccattctcaggagccaccccctccacgagcctggccgagtccgttcttaaggtctggcatggagcatataactccggcttgctgccccagctcatggcccagcacagcctggccatggcccaaaacggcgcagtgccttcggaggccacaaaaagagatcagaatctgaagcggggaaattggggtaatcaaattgaatttgttctaacttccgtcggttacgcggtcggactggggaacgtctggcgctttccctacctgtgttacaggaacggcggaggggcattcatgttcccatacttcataatgctgatcttttgcgggatcccgctgttttttatggagttgagcttcggacagttcgcttctcagggctgcctgggggtatggagaatctccccaatgttcaaaggcgttggctacggaatgatggttgtcagtacatacattggcatctactacaacgtagtgatttgcattgcattctactattttttcagctcaatgacccacgtcctgccatgggcatactgtaataacccatggaacactcacgattgtgccggtgttctagacgcttctaaccttacgaacggtagccggcctgcagccctccccagtaatctgtcacatctgctaaaccactcactgcagcgtacaagtccctccgaggagtactggcgcctgtacgttcttaagctttccgacgacataggcaactttggagaggtgcgccttcctcttctaggctgtctcggcgtatcctggctcgtcgtcttcctgtgtcttataaggggagtgaagagctcgggcaaggtggtgtattttaccgctacatttccatacgttgtgcttactatcctctttgtccgcggagtcaccctggagggcgctttcgacggcatcatgtattatttgaccccccagtgggacaagatcctggaggcgaaagtgtggggcgatgctgcatcccagatattttattccctgggatgcgcctggggcggtctaattacaatggcttcatataacaagtttcataacaattgctatcgggactcagttatcatctccatcaccaactgcgcaacatccgtttatgcgggattcgtgatcttctccattttggggttcatggcaaaccatttaggcgtggacgtcagcagggtggctgaccacgggccaggattggctttcgtggcctatccagaggctctcacactactgcctatatcccccctctggagtctgttattcttctttatgctgattctgcttggtctcggcacacaattctgcctgctggagaccttggtgaccgcaatcgtcgacgaggtcgggaacgaatggattctccagaagaagacctatgtgaccctaggtgtcgctgtcgccggattcttgctggggataccacttacctctcaggcaggaatatactggctgctcttaatggacaattacgcagcgtccttttctctcgttgtcatctcctgcattatgtgtgtggcaatcatgtatatctacgggcacaggaactatttccaggacatccagatgatgttgggctttccaccaccgctcttctttcagatctgctggagattcgtgtcccccgcaattatttttttcattttagtgtttactgtaattcagtaccaaccgatcacatataaccactatcagtaccccggatgggcagtggccatcggctttctcatggccctcagcagcgtactgtgcattcctctgtatgccatgttccgcctctgtcgtaccgacggagacaccctgttgcagcgactgaagaacgcaaccaagccaagtcgggactggggtcctgccctcctggagcataggacggggcgatatgccccaacgattgcgccttcccctgaggatggatttgaagtgcaacccctgcaccctgataaagctcagatcccgatagtagggtccaacgggagttctcgccttcaagactcacggatatag

SEQ ID NO: 241765 - DNA, 1725 bp, synthetic construct
  misc_feature 1..1725: note = Description of Artificial Sequence: Synthetic coding sequence
  source 1..1725: mol_type = other DNA
atgtttccttacttcattatgttaatcttttgcgggatcccattattcttcatggaacttagcttcgggcagtttgcgagccagggttgtctgggagtgtggcgaatttccccaatgttcaagggggttggatatgggatgatggttgtgtccacttatataggcatctattacaacgtagtgatctgcatcgcattctattacttctttagttcaatgacccatgtgctaccatgggcctactgtaataatccctggaatacccatgattgcgccggagtgctagatgcatcgaatctgaccaatggcagtcgcccagccgctctgcccagcaatttgagccacctactgaaccactccctccagagaacctcccctagcgaggagtattggcggctatacgtcctaaaactttccgacgacatcggaaacttcggagaagtgagactgcccttgctgggatgcttgggcgtttcttggctagtggtttttctgtgcctgatacggggtgtgaagtcctcaggtaaagtggtgtacttcacagccacatttccgtatgtagtgctcactattctgtttgtgcggggagtcacgctagagggagcgttcgatggcatcatgtactatctgacaccacaatgggataaaatccttgaggccaaggtgtggggcgatgctgcctcccagatattctattctctgggatgcgcttggggcggtttgattactatggcctcttacaacaagtttcataataattgctatcgcgattctgttatcatctcgatcacgaattgcgccacctcggtgtatgctgggttcgtgatatttagtatccttggatttatggccaaccatctcggcgtggatgtgtcacgggtcgccgaccatggaccaggccttgcatttgtggcctaccccgaggctctgaccctgttgcctatctccccgctctggtctctgctgtttttttttatgttgatcttactcggactgggcacgcagttctgtctcctcgaaactcttgtgaccgctatagttgatgaggtgggaaacgaatggattctccagaaaaaaacttacgtgaccctaggagtcgccgttgccggattccttctcggtattccgctgacctctcaggccggaatctattggcttctcctgatggacaattatgccgcttctttctctcttgtagtgatcagttgcattatgtgcgtcgccatcatgtacatatacgggcaccggaactatttccaggatatccaaatgatgctgggcttcccacctccactgttcttccagatttgttggaggttcgtctcccccgcaattattttcctgcaggctcaggtgcacagacggctaccacaaaatccactgcatttcgcttctctgcccgagcggaatgttttgttgcatcagttaccccagcgcggaggtgtcccagagcatgacccccctacgccaccgtcacccgcacggacctatggaccccaggtgcgcgttcgcgaggtccctagggctcgacgtcaacgatcacctaatcctgcgcctttgtgggcccctccatctcctaaaccacatccctgcagtgcagccggaccactgggatgggactgcccttttagaaactgccagtccttggctctgtccagtgcaaggctgttggcagattccgacgccggtgggcctgagacacgccaatgggagcctgggccatag

SEQ ID NO: 241766 - DNA, 1902 bp, synthetic construct
  misc_feature 1..1902: note = Description of Artificial Sequence: Synthetic coding sequence
  source 1..1902: mol_type = other DNA
atggtggggaagggcgctaagggcatgttgaatggggctgtgcccagcgaggccacaaagcgtgatcagaatctgaaaagggggaactggggtaatcagattgagttcgtgctgacatcagtcgggtacgccgttggcctcgggaatgtttggagatttccctatctgtgttaccgcaatggtggaggggcattcatgtttccctactttataatgctaatcttctgcggaatccccctattttttatggaactgagcttcgggcagttcgcatcccaggggtgcctaggagtatggcggataagtcccatgttcaaaggcgtgggatacggaatgatggtggtcagcacctatatcggcatttattataacgtggtaatatgcattgccttctactattttttttctagtatgacacacgttctgccctgggcctactgcaataacccatggaacacccatgactgtgcaggagtgttggatgcctcaaatcttaccaatggatcccgcccagcagcgttgcccagcaacctgtcacacctgctcaaccattctttacagaggactagcccctctgaggagtactggagactgtacgtgctcaagctgtcagacgacattggcaacttcggcgaagtgagactgccactactcggctgtctgggcgtgtcatggctggtggtgtttctgtgcctgattcgaggcgtcaagtcctcaggtaaggttgtgtatttcactgccacattcccttatgttgtgctgaccattctgtttgtgcggggagtcacacttgaaggagcctttgatggtattatgtactatttgacaccgcaatgggacaaaatcttagaggccaaagtttggggcgatgccgcatcccagatcttctactccctcggttgtgcctggggcggactgattactatggcctcatataacaaattccataacaactgctatagggatagtgttatcatatcaatcactaactgtgccacaagcgtatacgccggttttgttatattttccatcctggggttcatggcaaatcacctgggggtggacgtgtcccgggtggccgaccacggccctggtctagcattcgtggcgtacccggaggctctcacgctcctgcccatctctcccctttggagtctgctcttcttctttatgcttattctcctgggcctgggaacccagttttgcctcctagagactctggtaacagctatcgtagacgaagtagggaacgaatggatcctccagaaaaagacctacgtaacactcggggtcgccgtagccggattcctgctggggataccattgacttcccaggccggaatttattggcttctgctgatggataattacgccgcttcttttagcctcgtggtcatcagctgtatcatgtgcgtggctatcatgtatatttatggccacaggaattatttccaggacattcagatgatgctgggcttcccccctccactgttttttcaaatctgctggaggttcgtctctcctgcaatcatcttctttattctggtcttcactgtgatccaatatcaacccatcacctataaccactatcagtaccccggatgggccgttgccattggattcctcatggctctgtccagcgttctatgcatccctctctacgctatgttccggttgtgtcgaacagatggagatacactgctacaacgactcaaaaatgccaccaaacctagtagagactgggggccagctctgctggagcacaggaccgggaggtatgcgccaactatcgccccatcccccgaggacggttttgaagtccagccattgcatccagacaaggcccagattccgatcgtcgggtctaacggctcatctaggcttcaggactcccgtatatag

SEQ ID NO: 241767 - DNA, 1569 bp, synthetic construct
  misc_feature 1..1569: note = Description of Artificial Sequence: Synthetic coding sequence
  source 1..1569: mol_type = other DNA
atgatggtggtttcaacgtacattggaatttattataacgtggtcatttgtatagccttctactactttttctctagcatgactcatgtcctgccatgggcctactgcaataacccttggaatactcacgactgcgccggagtgctcgacgcctctaatttgactaatgggagcagacccgcagccctgcccagtaacttatcacatcttttgaaccacagcctgcaaaggacaagcccatccgaagaatactggcggctctacgtcctaaagctttctgacgacataggcaatttcggcgaagtaaggctgcctctgcttggctgtctgggcgtcagttggctcgtggtgttcctttgcttgattaggggtgtgaagtcctcaggcaaggtggtgtattttactgccacctttccgtacgtcgtgctgactatcctcttcgtgagaggtgtgaccttggaaggcgcttttgatggcatcatgtactacttgactccccagtgggataagatcctagaggctaaggtttggggtgacgctgctagccagatcttttactccttaggatgtgcctggggcggactgatcaccatggcctcctataacaagttccataataactgctaccgcgattcagttattatcagcatcacgaattgtgccactagcgtgtatgccggtttcgtgatcttctccattctgggatttatggccaaccatctgggggtagatgtttctagagtcgcagatcatgggcctgggctggcattcgtggcttatcccgaggccctaaccctgctgcctatttccccattgtggtcattgttgtttttcttcatgctgatcttactcggtctgggaactcagttctgtttacttgagactctcgtcaccgcgatcgtagacgaagtaggtaatgagtggatactgcaaaaaaagacatatgtgactcttggggtggctgttgctgggttcttactgggcattcccctcactagtcaggctgggatctattggctgttattgatggataactacgccgcttccttttccctcgtggtgatctcatgtatcatgtgcgtggccattatgtacatctatggacatcgaaactacttccaggatattcagatgatgttgggattccctcccccactctttttccaaatatgttggagatttgtgagcccggcaataatcttttttattctggtgttcacagtgatccagtaccagccgattacctacaatcactatcagtatccgggttgggccgtcgcaatcgggttcctcatggccttaagcagcgtactgtgtatccctctgtatgccatgttccgactctgtaggactgacggtgacactctgctccagcgcctgaagaatgctacaaaaccatccagggactggggtcccgcattgttggagcacaggacaggcaggtatgccccaacgatcgctcccagcccggaagacgggttcgaggtacagcctctccaccctgacaaagcacaaatccctatcgtagggagtaatggatcgagccgactgcaggactcacgcatatag

SEQ ID NO: 241768 - DNA, 405 bp, synthetic construct
  misc_feature 1..405: note = Description of Artificial Sequence: Synthetic coding sequence
  source 1..405: mol_type = other DNA
atgtctggaggcgatacccgggctgccatagctcgcccacgcatggccgcagcccatggcccagtagctccaagtagtcccgagcagaacggcgcagtgccctccgaagcaacaaagagagatcaaaaccttaagcggggaaactggggaaatcaaattgagttcgtactcacatccgtgggctacgcagtaggcctgggcaatgtatggcgcttcccatacctatgttatcgaaacggcggtggcgcattcatgtttccctactttatcatgttgattttctgtggcatccccctcttttttatggagctgtctttcggacagttcgccagtcagggttgtctgggtgtatggcggatatcccctatgttcaagggagtggggtacgggatgatggtggtatag

SEQ ID NO: 241769 - DNA, 1161 bp, synthetic construct
  misc_feature 1..1161: note = Description of Artificial Sequence: Synthetic coding sequence
  source 1..1161: mol_type = other DNA
atgtttccctatttcatcatgctcatattttgtggaatccctctgttttttatggaactgtccttcggccagtttgcatcccaaggttgtctcggggtatggcgtatttcacccatgtttaaaggagtaggatatggtatgatggtcgtcagtacctatatcggaatttattataatgtggtgatctgcattgcattttactatttcttctcatctatgacacacgtactgccttgggcatattgcaataacccctggaacacccacgactgcgccggtgtgctggatgcatccaacctcaccaacggctcaagaccagctgcactcccaagtaatctgagccatctcttaaatcattccctacaacgcaccagtccctcagaagagtactggcgcctgtacgtgctcaagttgtccgacgatataggcaattttggcgaagtcagactgcctcttctcggctgcctgggggtctcctggctcgtcgtgtttctttgcctgattcgtggcgtcaaatccagcggtaaggtggtgtacttcactgcaacttttccctacgtagtgctgacgatcctgttcgtccgaggtgtgacactggagggcgctttcgatgggattatgtactacctcacgccgcagtgggataagatcctggaagccaaagtatggggggacgccgcttcacagatattttatagcttgggctgtgcatggggcggactgataactatggctagctacaataagtttcataacaattgttatcgagactctgtgatcatcagtatcacaaattgtgccaccagcgtgtatgccggattcgtcatcttttcaatcctcggctttatggctaaccacctcggagtggacgtgtctagggtggcagatcatggaccaggattagccttcgtcgcgtaccccgaggccctgacactgctgccaattagccctttatggtctctgctatttttttttatgctgatcctgttgggtctgggtactcagttctgtctactggaaactctggtcacagccattgtggacgaggtgggcaacgaatggatactgcagaaaaagacttatgtgactttaggcgtcgccgtggccggtttcctcttgggcatacctctgaccagccaagctagcatcggctgctgctag

SEQ ID NO: 241770 - DNA, 1050 bp, synthetic construct
  misc_feature 1..1050: note = Description of Artificial Sequence: Synthetic coding sequence
  source 1..1050: mol_type = other DNA
atgggggatatgggagacccacccaagaagaagcggctgatctccctgtgcgttggctgtggaaaccaaattcacgaccagtatatcctgcgggttagtccagacctcgaatggcacgctgcctgcctgaaatgtgctgaatgtaatcaatacctggatgagagctgtacttgtttcgttagagatgggaagacatactgtaaaagggattatatcagactttatggtatcaagtgcgcaaaatgttctatcgggtttagtaaaaacgacttcgtaatgagagctcggtcaaaggtatatcatatcgagtgctttcgctgcgtcgcctgcagcaggcagctcatcccaggagatgaattcgcattgcgggaagacgggttgttctgcagggccgatcatgatgttgttgaacgggcttcactcggtgccggtgacccgctcagtccattacaccctgcacgcccattgcagatggctgcggagcccatcagtgccagacaacccgcacttcgcccacacgtccacaagcagccagagaaaaccactcgcgtaagaaccgttttgaatgaaaagcaactgcacacgctgcgtacatgttacgcagcaaaccccaggcctgacgccctgatgaaggaacaactcgtcgagatgaccggtcttagcccgcgtgtcatccgggtgtggtttcaaaataaacgctgcaaagacaagaaacggtccatcatgatgaagcagcttcagcagcaacagccaaacgacaagaccaacatccagggaatgactggcacaccaatggttgctgcaagtcctgaaagacacgatggtggcctacaggctaatcccgtcgaagtccagagttatcagcctccctggaaggtactctctgactttgctctccagtctgatatcgaccagcccgcatttcaacagcttgtgaactttagtgaaggcggtcctggatccaattctacaggatctgaggtggcttccatgtccagtcagttgccggataccccaaatagtatggttgctagcccaatcgaagcttag

SEQ ID NO: 241771 - DNA, 2283 bp, synthetic construct
  misc_feature 1..2283: note = Description of Artificial Sequence: Synthetic coding sequence
  source 1..2283: mol_type = other DNA
atgctgagtgatgaccacgtcaacgagattatcatacaggtggaaaatgtgtcaagtggggtgcagtctcaccctagctctaaccagatttttcaggaaaaagtgctgttagactcaagtatcaacatggtcctgtccatctccgatattgatgtaatcgatagccagacagtttccaaaaggaacgaccagaaggggaaccaagttctgcgcttttccactagtctcaatgagtctatgtctcaaaccctgcactccctcgaatgcatgggtatcgacactcctgggtcttctcacgagactgtgcaggggcagaaactaattgctagtttgatccctatgacttcaagggacagaattaaggctattaggaatcagcctcgaacaatggaggagaagagaaatctgagaaaaatcgtggataaggagaaatcaaaacaaacccaccggatactgcagctgaactgttgcattcagtgtctgaactcgatctcaagggcataccgccgttctaaaaattcgctctccgagattcttaatagcatttccttatggcagaagacgttgaagattattggcggaaaattcggtacctccgtgctcagttatttcaacttccttcgctggctgcttaagtttaatatattttccttcattcttaacttctcctttattatcatcccccagttcacagtcgccaaaaagaacaccctgcagtttacaggcctggagttcttcacaggtgttggttacttccgcgacactgtgatgtattatggtttctataccaattctactattcagcacggcaactccggcgcttcctataacatgcagctggcatatatttttacaattggcgcatgcctcactacctgtttcttctccctgttgttcagtatggccaagtactttcgcaataacttcataaaccctcacatctactcaggcggaataacgaaactcatcttttgctgggattttactgtcacacacgagaaggcagtaaagctcaaacagaaaaacttatccactgagatcagagagaacctgtccgaactccggcaagaaaactcaaaactgacctttaatcagctgctcactagattttcggcctacatggtggcttgggtcgtgtctacgggggtagctatcgcctgctgtgcggctgtgtattacctggcagagtataatttggaattcctcaagacgcattccaaccctggtgctgtcctgctcctcccattcgtggtctcttgtatcaatctggcagttccttgcatctattcaatgttcaggttggtggagcgatatgaaatgccgagacacgaggtgtatgtgctactcattcgcaatattttcctgaaaattagcataatcggcatcctgtgttactactggctgaacaccgtagcactgtcaggggaagagtgttgggagaccctcataggccaggatatctatcgtctgctccttatggatttcgtatttagtctggtaaacagctttttgggagaatttcttcgtcgcataatcgggatgcagttgatcacctccctgggccttcaggaattcgacatcgcaaggaatgtgttggagctgatatatgcccagactctcgtatggatagggatcttcttctgtcctctcctgccattcatccagatgatcatgcttttcattatgttctacagtaagaacatcagcctcatgatgaatttccagcccccttctaaggcatggcgtgcgtcccagatgatgactttttttatcttcctgctcttttttccctcttttaccggggtgctctgcaccctagctataactatttggaggctcaagccaagtgcagactgcggtccattcagagggttgccactgttcatccactcaatctactcgtggatcgacaccttaagcactcggccaggatacctctgggtggtttggatttaccggaacctgattgggagtgttcactttttcttcattttgaccctgattgttctcatcatcacatacctatactggcagattacagaagggcgtaaaattatgattcgcctcttgcacgaacagatcataaacgaagggaaggacaaaatgtttctgatagaaaaactaatcaaattacaagacatggagaagaaggccaacccatccagcctagttctcgagcgcagagaggtggagcagcaaggttttctccacctcggggagcacgacggaagcctcgatctccgctcacggagaagcgttcaagagggaaacccaagggcttag

SEQ ID NO: 241772 - DNA, 1854 bp, synthetic construct
  misc_feature 1..1854: note = Description of Artificial Sequence: Synthetic coding sequence
  source 1..1854: mol_type = other DNA
atgctactggccaggatgaatccccaggtccagccggaaaacaacggtgccgacaccggacccgaacagccgttgagggctcgaaagacagccgagctgctggtcgtgaaggagcgaaacggagtgcaatgcctcctcgctccacgcgatggagacgcacagcctagggagacctgggggaaaaagattgacttcctcttaagcgtggtggggttcgcagtggacctggccaatgtgtggagattcccttacctgtgttacaagaatggaggcggagcctttcttataccctacacactgttcctgatcatagccggaatgcccttgttctacatggaattggcgctaggccaatacaatcgggagggcgcagcgaccgtttggaagatttgcccattcttcaagggagtcgggtacgcagtgatccttattgctctctacgttggattctattacaatgttattatcgcatggtcgctttattatttgttcagtagcttcaccctgaatctgccgtggactgactgcggccacacttggaactcccctaattgcaccgatcccaaactcttaaacgggagtgtacttggtaaccataccaaatatagtaaatataagtttactcctgccgcagagttttacgaacgaggagtgctgcatctccacgagtcatctgggatccacgatattggactgccacagtggcagctgctcttatgtcttatggttgtggtcattgtgttatatttttctttgtggaagggcgttaaaacaagtggcaaagttgtgtggataaccgccacacttccctactttgtgttgtttgtccttctggtgcacggcgttacattgcccggagcgtctaatggcattaacgcatacctgcacatcgacttctaccgactcaaggaggctacagtgtggattgacgccgcaacccagatctttttctcacttggcgctggattcggcgtccttattgcttttgccagttacaacaagtttgacaataattgctatcgggatgcactgctcactagctcaataaactgtattactagcttcgtgagcggctttgcaatctttagcatcctgggttatatggcccacgagcataaggttaatattgaggatgtggcgacagaaggcgcaggcctcgtcttcattctttatcccgaggctatttccacactgagtggctccaccttctgggcagtggtcttcttcgtgatgctccttgcactcggtctggactccagcatgggaggaatggaggcggtcattacagggctggccgacgacttccaagtgttaaagagacatcggaaactgtttacttttggtgtgaccttttctacatttctgctggccctgttctgcatcaccaagggaggcatctacgtgctcactctgttggataccttcgcagctggtacctcaattctgttcgctgtgctgatggaggcaattggcgtaagctggttctatggcgtggacagatttagcaatgatatccagcagatgatgggatttagacctggactgtactggcggctctgttggaaattcgtgtcccctgcgtttctcctgttcgtagtggtggtttctatcatcaacttcaagccactgacatatgacgactatatcttcccaccatgggctaattgggtggggtggggtattgccctcagcagcatggtgctggtgcctatctatgtgatctacaagtttttaagcacgcaggggtctctgtgggagcggcttgcttacggtattacccctgagaacgagcaccatctcgtggcccagcgggatatccgccagttccagctgcagcactggctggcaatctag

SEQ ID NO: 241773 - DNA, 1854 bp, synthetic construct
  misc_feature 1..1854: note = Description of Artificial Sequence: Synthetic coding sequence
  source 1..1854: mol_type = other DNA
atgctcttagctcgcatgaatccccaggtgcaacctgagaataacggtgctgatactggaccagagcagcctctgcgagcacggaaaaccgccgaactgctggtcgtgaaagaaagaaacggagttcagtgcctgctggccccaagagatggcgacgcccagcccagggaaacttggggcaaaaaaattgactttttattgtcagtggtgggctttgccgtggacctcgccaacgtatggaggttcccctacctgtgttataagaatggtggcggtgccttcctgattccatacaccctgtttttaatcattgcaggaatgcctctgttctatatggaattggcactgggtcaatacaaccgggaaggcgctgccactgtctggaagatttgcccttttttcaagggggttggatatgctgtgatccttatagccctatatgtcggattttattacaacgtaatcatagcatggagtttatactacctgttttcatcatttacattaaatctcccttggaccgattgcggtcatacatggaattctccaaactgtacagatcccaaactgttaaacggcagtgttctcggaaatcatacaaagtactcaaaatataagttcacacccgcagcagagttctatgagcgcggagtgctccatctacacgagagcagtggaattcacgatattggtctgcctcagtggcagctactcttgtgcctcatggtggttgtgatcgtgctgtacttctctctgtggaaaggagtaaaaacctcaggaaaagtggtgtggataactgcgaccctgccctatttcgttctgtttgttctcctggtgcatggtgtgacgcttcccggagcatcaaatggaattaatgcttatcttcacatcgacttttatcgtttgaaggaggcgactgtgtggattgacgccgctacacagatttttttttctttaggtgccggattcggcgtactcatcgcctttgcttcctataacaagttcgataataattgttatcgcgacgcacttctcacaagcagcattaactgtattaccagcttcgtttctggttttgcaatcttctcaattctaggctacatggcccacgaacataaagttaacatagaggatgtggcaaccgaaggtgccggtctggtttttatcctctatcctgaggcaatttccaccctgtctggcagtacattctgggcagtggttttctttgtcatgttactcgcactcggactcgacagttccatgggcggtatggaggctgttataaccgggctggctgatgactttcaggtgcttaagcggcatcggaaactctttacgttcggggtgacgttctctacatttttactggccctcttttgtatcaccaagggcggaatttatgtgctcacactgctggatacattcgcagccggaacgtcaattctcttcgccgtgttaatggaagcaattggagtcagctggttctatggcgtcgatcggttcagcaatgacatacaacaaatgatgggatttcgacctgggctctactggaggctgtgctggaagttcgtgagtccagcattcttgctgttcgtggtagtcgtcagtataattaactttaaacccctgacctacgacgattacatcttccccccatgggccaattgggtgggatggggaattgcgctctctagcatggtgctggtgccgatttatgtgatttacaaatttctctctacccaggggtcactctgggaacgtctggcatatgggattactccagagaatgaacaccacttggtagctcagagggatatacgccaatttcaattgcagcactggctagccatctag

SEQ ID NO: 241774 - DNA, 996 bp, synthetic construct
  misc_feature 1..996: note = Description of Artificial Sequence: Synthetic coding sequence
  source 1..996: mol_type = other DNA
atggtggtggtcatcgtgctctacttctccctatggaaaggcgtaaaaacctccgggaaagtctggattgacgcagcgactcaaatttttttcagcctgggcgcagggtttggggtacttattgcttttgcttcctacaataagtttgataataactgctaccgggacgccttactgacctcttccataaactgcatcacttcgttcgtttcaggctttgccatattttcaatattgggatacatggctcacgaacacaaagtgaacatcgaggatgttgcaaccgaaggggctggactggtgttcatcctgtatccagaggccatatcaacactttccggctccactttttgggccgtggtattttttgtaatgctcctggctctcggcctggattcctccatgggtggcatggaagcagttatcaccggattggcagacgactttcaggtgttgaagcggcaccgcaagctcttcacgttcggagtgacttttagtacttttctcctggcattgttttgcattaccaaaggcggaatttacgtgttgaccttattggataccttcgccgcaggtacctcgattctgtttgccgttcttatggaggctattggagtatcctggttttatggagtagaccgattcagcaacgacatccagcaaatgatgggatttcgacccggactctactggcgcctgtgctggaagtttgtctcaccagctttcctgcttttcgtcgtggtagtatccatcataaatttcaagccactgacctacgatgactacatttttcccccttgggctaattgggtggggtggggaatagcactatccagtatggttctggtaccaatatacgtgatctataaattcttgagcactcaaggctctctgtgggagcgccttgcctacggaataaccccggaaaacgaacaccacctggttgcacaaagagatatacgccagtttcagctgcagcactggctcgctatatag

SEQ ID NO: 241775 - DNA, 1893 bp, synthetic construct
  misc_feature 1..1893: note = Description of Artificial Sequence: Synthetic coding sequence
  source 1..1893: mol_type = other DNA
atggagaccactccattgaattcccagaaacaactttccgcttgtgaggacggcgaggattgccaggagaacggcgtcttgcagaaagtggtgccaacaccaggggacaaggttgagtccggacagatctctaacggatattctgcagtgccaagtccaggggctggggatgacactcgacactccatccctgccacaaccacgacgctggttgcggaactccaccaaggtgaacgagagacatggggcaagaaagtcgacttcctgctgtcagtcatcgggtacgccgtagaccttgggaatgtgtggcggtttccgtacatctgctaccaaaacggtggcggagcatttctgcttccctacacaatcatggctatttttggcggaattcctctcttttacatggaacttgctttaggtcaataccacagaaatggctgtatatcgatttggcgaaaaatttgcccaattttcaagggtattggctacgctatatgcattatcgccttctacattgcgagctactacaataccatcatggcatgggccctctattacctgatctcctcatttaccgaccagctaccctggacttcatgcaaaaacagctggaacactgggaattgtactaattattttagtgaagacaatattacctggactctgcacagtacctctcccgctgaagaattctacaccaggcacgttctgcagattcacagaagtaaaggtctccaagacttaggcggaatcagctggcagttggcgctctgcatcatgctgattttcactgttatttacttctccatctggaaaggcgtcaagacaagtggtaaagttgtatgggtcactgctacgtttccgtacataatattatccgttctcctggtgcggggtgccacgcttccgggagcctggcgaggggtgctattctatctgaaacccaactggcagaagctgctggagactggagtgtggatagatgccgctgctcagatcttcttttcccttggccctgggtttggtgtcctgctagcgtttgcatcatacaacaagttcaataacaactgctatcaggacgccctcgtcacgtctgtcgtgaattgcatgactagcttcgtaagcgggttcgtgattttcaccgttctgggatatatggcagagatgcgcaatgaagacgtgtcagaggtggccaaggacgccggtccctcacttctattcattacgtacgctgaggccattgcaaacatgccggcatctacattttttgccattatattctttctgatgcttatcactctgggcctggattccaccttcgccggactggagggcgtgatcacagctgtgctcgacgagttcccgcacgtgtgggcaaaacggcgagagcggtttgtgttagccgttgtaataacttgcttttttgggtccctcgtcaccctgacgttcggaggcgcatacgtagttaaactgcttgaggagtacgctactggacctgccgtcctgaccgtggcgctgatagaagcggtcgcggtcagctggttctatggtatcacacagttttgtcgcgatgtcaaggaaatgctgggattcagcccgggatggttttggaggatctgttgggtagcaatttctcctttgttcctgctgtttatcatctgtagctttctgatgtcgccaccacagctgcggctttttcagtataactatccgtactggagcatcatcctggggtattgcatcgggacctcgtcttttatctgtatccctacttacatcgcctaccgtcttattataactcctggtacattcaaggaaaggataattaaaagcataacacctgagaccccaacagagattccctgcggcgatattcgcctgaatgcggtgtag

SEQ ID NO: 241776 - DNA, 2019 bp, synthetic construct
  misc_feature 1..2019: note = Description of Artificial Sequence: Synthetic coding sequence
  source 1..2019: mol_type = other DNA
atgagccagagtagacgcgtgaatcccgatgacagggagttggggggagatccacagatccaagctcctagagaccagcttggttccctggcagacggtcatcagtgtcatttactgacgagtaggatggagacaactccacttaattctcagaagcagctgagcgcatgcgaggacggggaagattgccaggagaatggggttctacagaaggtagttcctactccaggggataaggtcgagagtggtcagatatctaacgggtactctgccgtgccctccccgggtgccggtgacgataccaggcacagtatccccgcaacaactactacactcgtcgccgagcttcatcagggcgagagagaaacctggggcaagaaggtggacttccttttgtctgtgattggctatgccgtcgacctggggaatgtatggcgcttcccttacatctgttatcagaatggagggggtgccttcctgctcccttatactattatggcaatattcggcggtattccccttttttatatggagctcgctctcggccagtatcatcgaaacggctgcattagcatctggcgcaaaatatgccctatttttaagggaatcggatatgccatctgcattattgccttttatattgccagctattacaataccattatggcttgggcactgtactacctaataagcagtttcacagaccagctgccctggacaagctgcaagaacagctggaataccggcaactgtactaactacttcagcgaggataatatcacgtggactcttcacagtacatcacccgcagaagagttctatacaagacacgtcttgcaaatacacagatcgaaaggcttgcaggacctggggggaattagttggcaattggcgctgtgtatcatgttgatcttcacagtgatctatttctctatttggaagggcgtcaagacctccggcaaagtcgtttgggttaccgctacgttcccctatattatcctttccgttttacttgtcaggggggcaacgctccctggcgcttggcgcggagtgctgttctatctcaagccaaactggcagaaactgcttgaaacaggggtgtggatcgacgctgctgcccaaattttcttctctcttggccctggatttggcgttctacttgcgtttgcgtcgtacaacaaatttaataataactgctatcaagacgcgctggtcacatctgtggtcaattgcatgacttctttcgtgtccgggttcgttattttcaccgtgcttggatacatggcggagatgcggaatgaagacgtaagcgaagtggccaaggatgccggaccttcgcttctcttcatcacctacgccgaagccattgccaatatgccagcttcgactttttttgctatcatcttctttctcatgctaattaccctaggcctggacagcacttttgccggtctggaaggcgtcatcacagccgtgttggacgagtttccccacgtgtgggcaaagaggagagagcgctttgtcctcgctgtcgttatcacatgctttttcggttccctcgtgacgctcacgttcggcggagcctacgtggtcaagcttttggaggaatacgctacgggacccgctgtgctgacagtagccttaattgaggctgtggcagtctcctggttttacggaatcacccaattttgccgagatgttaaggagatgctcggcttttccccgggatggttttggcggatatgttgggtcgccatttcacctctattcctcttgttcataatctgctcattcttgatgtcgcctcctcagctgcggctgtttcagtacaactacccttattggagcatcatacttggctactgtatcggcaccagttcttttatttgcatacctacctacatagcctaccgcttaattatcactccgggtacctttaaggaacggatcatcaaatcaatcaccccggagactcctactgagattccttgtggggacattcgccttaacgctgtatag

SEQ ID NO: 241777 - DNA, 1893 bp, synthetic construct
  misc_feature 1..1893: note = Description of Artificial Sequence: Synthetic coding sequence
  source 1..1893: mol_type = other DNA
atggaaacgacacctttaaattcccagaaacagctgtccgcttgcgaggacggagaagattgtcaggagaatggcgtgctgcaaaaagtggtgcccactcccggagataaagtggagagtgggcagatttccaatggctatagtgcagtgccctcccccggagctggagatgacactaggcacagtattcctgcaacaactaccaccctcgttgcagaattgcaccaaggcgaaagggaaacctgggggaagaaagtggattttctgctctccgtgataggatatgctgtagacctcgggaacgtgtggagatttccctacatctgttatcagaatgggggaggcgcttttcttctgccctacacaatcatggctatattcggaggcatccctttgttctacatggaactcgcattagggcaataccacaggaacggatgcatcagtatatggaggaaaatctgcccaatcttcaaaggcattgggtatgcaatatgtatcatcgcgttttacatcgcatcttactacaacacaattatggcctgggcactgtattacctgatatcatcattcacagaccagcttccctggactagttgcaaaaactcttggaacacaggtaactgtactaattatttttcggaggataacatcacatggaccctgcattcaacgtccccggctgaggaattttacactagacatgtgctgcagatccaccgctcaaaaggcctccaggaccttggcggtatctcttggcagctggctctctgcataatgctcatctttaccgtcatctacttcagcatctggaagggggtaaaaacgagtggtaaggtcgtctgggttaccgccaccttcccatatatcatcctctcggtgctcttggttcgtggggctacattacccggtgcttggcggggtgtcctattctatctcaaacccaactggcagaagttgcttgagacaggggtctggatcgatgccgcagctcagatttttttttcattaggccctggattcggcgtgctgctagcctttgcgtcctataacaaatttaataacaattgctaccaggacgcgctggtgacaagcgtcgtcaactgcatgactagctttgtgtcaggattcgtaatttttactgtgttaggatacatggccgaaatgcggaatgaagacgtttctgaggttgctaaagatgccggtccctctttgctattcatcacatacgcagaagctatcgccaatatgcccgcatctaccttttttgcaatcatcttctttctgatgctgatcactctgggactggacagcacatttgcgggactggagggagttatcactgccgttttagacgaatttccgcatgtgtgggccaaaaggcgggagagatttgtcttggcggtggttattacatgtttcttcgggagtctagtgactctgacctttggcggagcctacgttgtgaaattgctcgaagagtacgctaccgggccagctgtgttgacagtagcgttgatcgaggcagtggccgtcagctggttctatggcatcactcagttttgcagagatgttaaggaaatgcttggcttttcccccggatggttttggcggatctgctgggtggcgatttcaccgctttttctcttgttcattatctgcagctttctaatgtctccaccccagctcagactgtttcagtataactacccctactggtctatcattcttggttattgtatcgggacctctagtttcatttgtataccaacgtatatagcctaccgtctcattatcactcctgggacctttaaggagcggattataaagtcaatcacaccggagactccaaccgagattccatgtggcgacatcagacttaatgcggtgtag

SEQ ID NO: 241778 - DNA, 1863 bp, synthetic construct
  misc_feature 1..1863: note = Description of Artificial Sequence: Synthetic coding sequence
  source 1..1863: mol_type = other DNA
atggctaccaaagaaaagctgcagtgccttaaagacttccacaaagacatcttgaagccatcgcccggaaaatctcccggtacgcgtccagaggacgaggcggaagggaaacccccacaacgtgaaaagtggagctctaagatcgacttcgttctgtctgtggcaggcggtttcgtcggactcggcaatgtatggcgctttccttatctgtgctacaaaaacgggggaggcgctttcctcattccatatttcatttttcttttcggatccggactgcctgtgtttttcctagagataattatcggccagtacacgtctgaaggcggaattacatgttgggagaagatttgccccctttttagcggcatcgggtacgcctcagtggttattgtgtccttactgaacgtgtactatattgtcatccttgcatgggcaacttattacttgtttcagagtttccagaaagaattgccctgggcccattgtaaccacagctggaacacaccccattgtatggaggacacaatgcgaaagaataaatcagtttggatcacaatctccagtactaatttcacttcaccagtcattgaattctgggagcggaatgtgctgtctctctcccccggtattgaccatcctggttccctaaaatgggaccttgccctgtgcctgttgctagtgtggctagtctgcttcttctgtatttggaaaggagtaaggtcaacaggaaaggtggtgtacttcacggctactttcccatttgccatgctcttggtcctattggtaagagggctgacgctgccgggtgccggtgccggaataaaattctatctttacccagatatcacgaggctcgaggatcctcaggtatggatcgacgctggaactcagatattcttttcctacgccatctgcctgggcgctatgacttctctcggcagctacaataaatacaagtataacagctatagagactgtatgcttctcgggtgcctgaattcaggcacctcgtttgtcagtggtttcgccatcttttccattttaggattcatggctcaggagcagggagtagatattgctgatgtggccgagtccggtccaggcctcgcattcatcgcttaccccaaggcggtgacgatgatgcctctgcccacattctggagtatcttattcttcattatgctgctccttctggggctggactctcagtttgtggaggtcgaggggcagatcaccagcctggtggacctctatccaagcttcctcagaaaaggttatcgaagggagatctttatagccttcgtgtgttccatatcatacttacttggtctaaccatggtgacagaaggcggaatgtacgtgttccagctcttcgactactacgcagcaagtggagtgtgcctcctgtgggtggcattttttgaatgcttcgtgattgcttggatctacggcggagataatctttacgacggcatagaagatatgataggatacagaccaggcccttggatgaaatacagctgggctgttataacaccagtcttgtgcgtaggttgttttatctttagcctggtgaagtatgtgcccctgacttacaacaagacgtacgtttaccccaattgggcaatagggctgggttggagcttagctcttagctcaatgctctgcgtgcccctggtgattgtgattcgactatgccagaccgagggcccttttctggtgagggtgaagtacctgctgacaccgagggagcctaataggtgggcggtcgagagagaaggtgcaaccccctataattctcggacagtgatgaacggagccttggtaaagccaacccacatcatcgtagagacgatgatgtag

SEQ ID NO: 241779 - DNA, 603 bp, synthetic construct
  misc_feature 1..603: note = Description of Artificial Sequence: Synthetic coding sequence
  source 1..603: mol_type = other DNA
atggccactaaggagaaattgcagtgtcttaaagacttccacaaagacattctaaaaccttcccccggaaaatcccccggtaccagaccggaggatgaggccgaaggcaagcctccccagcgggagaaatggagctccaaaattgactttgtcctgtccgtggccggagggtttgtgggactcggcaatgtgtggcggtttccctacctgtgctacaagaatgggggaggggctttcctcataccctatttcatctttcttttcggctcggggttacctgtgttcttcctcgaaattataatcggccaatacaccagtgagggagggatcacttgctgggagaagatttgtccactcttctccggcattggttacgccagtgtggtgatagtgagcctgctgaacgtttactatattgtaatactggcttgggcaacatattacctttttcagtctttccagaaagagttgccttgggcacattgtaaccacagctggaacaccccacactgcatggaggataccatgcggaagaataagtctgtttggatcacaatttcgtctacaaatttcacatctcctgtgatcgagttttgggagtag

SEQ ID NO: 241780 - DNA, 1080 bp, synthetic construct
  misc_feature 1..1080: note = Description of Artificial Sequence: Synthetic coding sequence
  source 1..1080: mol_type = other DNA
atggcaactaaggagaagcttcagtgtcttaaagattttcataaagacatcttgaagcccagcccaggcaagagtccaggtactcggcctgaggatgaagccgaaggaaaaccccctcagagagaaaagtggagctcaaagatcgacttcgtgctgagtgtggccggtggcttcgtaggactgggtaacgtgtggagattcccttacctctgttacaaaaatggcggtggcgctttcctgattccgtactttattttcttgttcggctccggcctgcccgtgttctttctcgagattatcattgggcagtacaccagtgaggggggtatcacctgctgggaaaagatctgcccacttttcagtggaattggctacgcctcagttgtcattgtttcccttttaaacgtatactacatcgtgattttagcttgggcaacttattacttatttcagagctttcagaaggagcttccgtgggcacattgtaaccactcctggaacaccccacactgtatggaggacactatgagaaagaataaatctgtttggattacaattagttcgacaaactttacctccccggttattgaattctgggagcgcaatgtgcttagcttgtcccccggaattgaccaccccggatccctgaaatgggatctcgctttgtgcctgcttctggtctggctggtgtgctttttctgtatttggaagggagtgcggtccacaggtaaggtggtgtacttcacagcgacgtttccatttgctatgcttctcgtgcttctggtcagagggttaacactccccggagccggagcgggtataaagttctacctctaccctgatatcacccggcttgaggatccccaagtgtggattgatgctggcactcagattttcttttcctacgctatttgcctgggtgctatgacatctttgggcagttacaacaagtataagtacaatagttaccgctcctggcctggattgcattgtcttccaaagtcatgtgataacgacgcagcagcccacattctcgtacacagcttcttttactacgcaagccttgcttggacgggttag

SEQ ID NO: 241781 - DNA, 330 bp, synthetic construct
  misc_feature 1..330: note = Description of Artificial Sequence: Synthetic coding sequence
  source 1..330: mol_type = other DNA
atggcaacaaaggaaaagctgcaatgcctgaaagacttccataaggacatacttaagccctccccaggaaagagcccaggaactaggcctgaggatgaggctgagggaaagcccccacagcgggagaaatggtcctccaagatcgattttgtgctctctgtcgcaggtggatttgtgggcctggggaatgtctggcgctttccttacctatgttataaaaacggaggaggagccttcctaatcccatacttcatatttctctttggatcgggattaccggtcttttttctggagataatcatcggccaatacacctccgaagggggatag

SEQ ID NO: 241782 - DNA, 1863 bp, synthetic construct
  misc_feature 1..1863: note = Description of Artificial Sequence: Synthetic coding sequence
  source 1..1863: mol_type = other DNA
atggctactaaagaaaagctccaatgtctcaaggacttccataaagacattctgaaaccgagccccggaaaaagcccaggaactaggcccgaagatgaggctgaaggtaagccaccacaaagagagaagtggtcctcaaaaatcgactttgtgctgtccgtagccggaggatttgtggggctggggaatgtttggcgcttcccttacctgtgctacaaaaacggcggaggcgctttcctcatcccatattttatctttctcttcggctcgggcctccccgttttctttttagaaatcatcatcggccaatatacatctgaaggcggaatcacttgttgggaaaagatctgtccactgttttcaggtattgggtatgcttccgtcgtgatcgtcagtctcctgaacgtgtactacattgtgatccttgcatgggctacatactatctgttccagtccttccagaaggagctcccatgggcacactgtaatcactcttggaatactccccattgcatggaggataccatgagaaagaataaatccgtgtggattaccatttcatcgactaactttactagccctgtcatcgaattttgggaacgcaatgttctgagtctgagccccggaatcgaccatcccggttccctcaagtgggatctggctctgtgcctgctactcgtctggctggtatgcttcttttgtatttggaaaggggtgcgatctactggcaaagtcgtttactttacagcgacgtttccgtttgccatgctccttgtgttgctcgtgagaggcctgaccctgcctggggctggggcaggcatcaagttctacctttacccagatattactagactcgaggaccctcaagtgtggattgacgccggtacccagattttcttctcatacgccatttgtttgggtgctatgacttccctcgggtcttacaacaagtacaaatacaactcttacagggactgtatgctgctggggtgtctaaacagcggcactagtttcgtctccggcttcgccatcttttccattttagggtttatggcgcaagagcaaggcgtagatattgcagatgtggctgagtcaggacccggtctcgccttcatcgcttacccaaaagcagtcacaatgatgccattgccaaccttctggagcatattgttcttcatcatgctgctattgcttggattggactcacagtttgtcgaggtcgaaggccaaatcacttccctcgtagatctgtatccttcctttcttagaaagggctatcggagagagattttcatagcgtttgtctgtagcatctcttatctattgggccttacaatggttaccgagggcggaatgtacgtatttcagttgttcgactattacgctgcaagcggcgtctgtctactatgggtggcatttttcgaatgcttcgtcatcgcctggatctacggtggcgataatctctacgacgggatcgaggacatgatcgggtaccgccctgggccatggatgaaatattcttgggcagtgataactccggttctctgtgtaggatgttttattttttccctggtcaagtatgtccccctgacctataataagacctacgtctatcccaattgggcgattggattgggctggtctcttgccttgagctcaatgttgtgcgtccctttagtaattgtgatacggctctgtcagaccgagggaccattcctggtgagagtgaagtatctgctgacaccaagggaaccgaatagatgggctgtggaacgggaaggagccaccccttacaactctcggacggtcatgaatggggctcttgtgaagcccacccatattatcgtagaaacaatgatgtag

SEQ ID NO: 241783 - DNA, 1080 bp, synthetic construct
  misc_feature 1..1080: note = Description of Artificial Sequence: Synthetic coding sequence
  source 1..1080: mol_type = other DNA
atggccaccaaggagaagttacagtgcctaaaggattttcacaaggatattcttaaaccgtctccgggaaagtccccgggaactcgaccagaagatgaagccgagggcaaaccccctcagcgcgagaagtggagttcaaaaatagactttgtgctaagtgttgcgggtggtttcgttggactggggaacgtctggagatttccttacctctgttacaagaatggaggaggtgcctttcttatcccttactttatatttctgttcggctcaggtctgcctgtattttttctggagattattatcggtcagtacacaagtgaaggtggaattacatgctgggagaagatttgccctttattttcaggcattgggtacgctagcgtagttatcgtgtccctactgaacgtatactacattgtgatcctggcatgggccacatattacctctttcagagttttcagaaagagttaccatgggcccattgtaaccactcatggaatactccacactgcatggaagataccatgaggaagaacaaatccgtgtggatcaccatctcatcaacaaactttacctcacctgtgatcgagttttgggagagaaatgtcctgtcattgagtcctggcatagaccatccaggctccctaaagtgggatctggccctctgcctcctgctggtgtggctcgtgtgtttcttctgcatctggaagggggtccgcagtaccggcaaagtagtgtactttacagctacttttccatttgcaatgctcttggtgcttttggtgcgaggcctgaccctccccggagcaggggctggaattaaattttacctgtacccagacatcactcgcctcgaagacccacaggtgtggatcgacgccggaacgcagatcttctttagttacgccatctgtctgggtgcaatgacttccttgggctcgtacaacaagtataaatataactcgtatcgctcttggccagggctgcactgtctcccgaaaagctgcgacaatgacgctgccgctcatatcctagttcacagcttcttttactatgcctcactggcttggaccgggtag

SEQ ID NO: 241784 - DNA, 1905 bp, synthetic construct
  misc_feature 1..1905: note = Description of Artificial Sequence: Synthetic coding sequence
  source 1..1905: mol_type = other DNA
atggtgcggctggttttgcctaatcccggtttggacgcgcgaatcccttcccttgccgagctcgagaccattgaacaggaggaggcctcttctcggcctaagtgggacaataaggcacagtacatgctgacctgcctgggcttttgtgtgggattgggcaacgtctggcggtttccctacttgtgccagagccatggtggaggagctttcatgattcccttcttgatactgctcgtgctggagggaattcctctgctgtatttggaattcgcaataggtcagcgcttgcggagggggtccctaggagtctggtcgagcatacatcctgctctgaagggtctgggcctggccagtatgctgacttcatttatggtgggattgtactacaatactatcattagttggatcatgtggtatctattcaactcattccaggagccgctcccctggagcgactgtccgctcaacgagaaccagaccggatacgtcgatgaatgcgccagatcatctcccgtggactatttttggtaccgggaaactctgaatatctctactagtattagcgatagtggttcaatccagtggtggatgctgctgtgcttggcctgcgcatggagcgttctgtatatgtgtacaataagagggattgaaacaacaggtaaggccgtctacatcactagtacgctcccttatgtcgtcttaacaatcttccttatacgtggtcttactcttaagggcgctacgaatggaattgtgtttttattcacccccaacgtgactgaattggcccagcctgacacttggctggatgccggagcccaagtttttttcagtttcagccttgcgttcggcggtctcatcagcttcagcagctataattccgttcacaacaattgcgagaaggacagtgtgattgtgagtatcatcaatggcttcacctcagtgtacgtcgccattgtagtatatagcgtaataggtttccgagccacccaacggtacgacgactgtttcagtacaaacatcttaacccttattaatggcttcgatctgcccgagggcaacgttacccaggagaattttgtggatatgcagcagaggtgcaacgcatcagatcccgctgcttatgcccagttagtgttccagacatgtgacattaatgcctttctctccgaagctgttgagggtacaggcctcgcatttatcgtgttcaccgaggccatcaccaaaatgccactttctcctctctggtccgtactcttcttcataatgctgttttgcctcggcctctcttcaatgttcgggaacatggaaggggttgtcgtgccacttcaagatctccgtgtgataccccctaaatggcccaaagaggtgctgactggcctgatctgcctgggaaccttccttattgggtttatctttacactgaactcagggcaatattggctaagcctgttggattcttacgccggtagcatacctctgctcataattgccttctgcgagatgtttagcgtggtgtatgtgtatggtgttgaccgttttaacaaggatatcgagttcatgataggccataagcctaacatcttctggcaagtgacctggcgggtggtgtctcccctgctaatgcttatcatcttcctctttttcttcgtggtggaagtgtctcaagaactgacttacagcatttgggatcccggttacgaggaatttcctaagtcgcagaagatctcataccctaattgggtgtacgttgtagtggtcatcgttgccggagtgccttcgctgaccatccccggttacgcaatatataagctcatacgcaatcattgccagaagcctggcgaccatcaaggcctagtcagtacattgtcaaccgcatcaatgaatggcgacttgaaatattag

SEQ ID NO: 241785 - DNA, 1668 bp, synthetic construct
  misc_feature 1..1668: note = Description of Artificial Sequence: Synthetic coding sequence
  source 1..1668: mol_type = other DNA
atggagaaagccagacctctgtgggcaaactccctccagtttgtgtttgcttgtatctcctacgccgtcggtctgggaaatgtgtggaggttcccctacctctgtcagatgtacgggggtggaagcttccttgtgccttacattattatgctgattgtagaggggatgcccctgctatacctagaactggccgtggggcagcggatgcggcaaggcagtataggggcttggagaaccatttcaccttacttgtctggcgtcggagtcgcatcggttgttgtgagtttcttcctcagcatgtattataatgttataaatgcctgggcgttttggtaccttttccacagctttcaggaccccctgccatggtccgtgtgccccctgaacggcaatcacacaggatatgacgaagagtgcgagaaggcctcctcaacccagtacttctggtatagaaagacactcaatatttccccgtccctgcaggagaatgggggagtccagtgggagcccgctctgtgtctgctgctcgcttggctcgttgtgtacttatgcatccttcggggaacagagtcaaccggtaagatagaacaattggctaatcccaaggcttggattaacgccgctacccagatcttcttctcactcgggctgggatttgggtccctaattgcgttcgcgagctataacgaaccgtccaataattgccagaagcacgcgattatcgtgtctttaattaattcatttacctcgatatttgcttctatcgtgaccttctcgatatatgggtttaaggccactttcaattacgaaaactgccttaagaaagtctcccttttactcactaatacgttcgacttggaggacggctttttaaccgccagtaacctggagcaagtcaaagggtatttggcctccgcttaccccagtaaatacagtgagatgttcccgcaaattaagaattgttccctggaatcggagctggatactgctgtacaggggacgggactggcctttatcgtctacaccgaagcaattaaaaatatggaggtctcacagctgtggagtgtcctttactttttcatgctgctgatgctcggtatcgggtccatgttgggaaacactgcagctatactaacaccgctcaccgattcaaagatcatatcatcacaccttccaaaagaagccatttcaggcctggtctgcctagttaattgcgctatcggcatggtctttacaatggaggctgggaattattggtttgatatttttaatgactatgcagcaaccttgtccctgctgctgattgtactggttgaaaccattgcggtgtgctatgtgtacggcctgcgcaggttcgaatctgacctcaaggccatgaccggcagagcagttagttggtattggaaagtcatgtgggccggagtctctcccctcctcatcgtgagccttttcgtgttttacctctccgattacatcctcacaggcaccctgaaataccaggcatgggacgcatctcagggtcaactggtgacaaaggattatcctgcctacgcactcgcagtgataggcctgctagtggcctcgagcacaatgtgcatcccactcgccgctctcggaacctttgtccaacggaggctgaagaggggcgatgcagacccggtggcttag

SEQ ID NO: 241786 - DNA, 1779 bp, synthetic construct
  misc_feature 1..1779: note = Description of Artificial Sequence: Synthetic coding sequence
  source 1..1779: mol_type = other DNA
atggaaaaggctaggcccctctgggccaattccctgcagtttgtatttgcatgtatatcttacgctgtcggcctaggtaacgtgtggcgctttccttacttgtgccagatgtacgggggaggctcattcctggtcccttatataattatgctgatcgttgaaggcatgcccctgctgtacctcgaactagcagtgggccagaggatgaggcaggggtctatcggagcatggagaaccattagtccctatctatccggagtgggtgtggcctcagtcgtggtgtctttcttcctgtctatgtactacaatgtcatcaacgcctgggctttctggtatttgtttcatagttttcaagatccgttgccttggagcgtatgccccctgaatggaaatcatactggctatgacgaggagtgcgagaaggcttcctcaacccagtacttctggtataggaagactttaaacataagtccgtcgctgcaggaaaacggcggtgtgcagtgggaaccagctctttgtctgctacttgcatggctcgtggtgtacctttgtatcttgagaggcactgagagcacgggcaaagttgtctatttcacggcctctctgccatactgtgtcttgatcatataccttattcgtggacttaccctgcatggagcaacgaacggtctgatgtatatgtttaccccaaagattgagcagttagcaaaccccaaagcttggattaacgctgcaacccagatttttttcagtctggggctgggtttcggctcactaatcgctttcgcttcttacaatgaaccaagtaacaattgtcaaaagcacgccatcatcgttagcctgatcaacagttttacttccatctttgcctccatcgtgacattttcaatctacggctttaaagcaacctttaactatgagaattgcctgaaaaaagtgagcctgttactcaccaacacattcgacctcgaagacggcttcctgacagcctcaaaccttgaacaggtgaagggatacctggcttcagcgtatcccagtaaatacagtgaaatgtttccacaaattaaaaattgttccctggaaagtgaattggacacggcggtacaggggacggggttggcatttatcgtgtatacggaggctataaagaatatggaagtcagccagctctggagcgttctctacttctttatgttacttatgttggggatcggaagcatgctcggaaacactgccgcaatactgacacctctaacggactccaagatcattagcagtcatctccccaaagaagctattagcggcctggtgtgcttggtcaactgcgcaattgggatggtattcacaatggaagccggtaactactggttcgatattttcaacgactatgccgcaacactttcgctgctgctaatcgtgttagttgagactattgctgtctgttacgtctacggtctcagacgatttgagagtgaccttaaagccatgacaggaagagctgtcagttggtattggaaggtgatgtgggctggggtgtctcccctcttaatagtgtctctgttcgtattttatctctctgattatattctcacggggacactgaagtaccaggcctgggatgctagccaagggcagctggtcacaaaagactaccccgcttacgcacttgctgtgatcgggcttctcgtcgcaagcagtactatgtgcatacctctcgctgcactcggaacctttgtacagagacgcctcaagagaggtgacgccgatcctgtggcctag

SEQ ID NO: 241787 - DNA, 1644 bp, synthetic construct
  misc_feature 1..1644: note = Description of Artificial Sequence: Synthetic coding sequence
  source 1..1644: mol_type = other DNA
atggaaaaagcccgtccgctttgggccaactcactgcaattcgtcttcgcctgcatatcgtatgctgtgggattaggcaacgtgtggcgatttccatacctttgccaaatgtatggcggtggatctttcctcgttccctatattatcatgctgattgtcgagggaatgccactgctgtatcttgaactcgcagtcggccagaggatgcgacaaggttcaattggtgcgtggaggacaatatccccatatttgtccggggtcggagtggcttccgtggtggtctctttcttcttatccatgtactacaacgtcatcaatgcatgggcattctggtatttgtttcacagctttcaggatcccctgccttggtctgtctgtcctctgaatggaaatcacacaggctatgatgaagagtgcgaaaaggctagttccacacaatacttttggtaccgcaagactttaaacatctccccttccttacaggaaaacggaggcgtacagtgggaacctgcgctgtgcctgttgcttgcctggctggttgtttacttgtgcattctccgaggcacggaatccacagggaaggtggtttattttacagctagccttccctactgcgttttaatcatctacctcatcagaggtctcactcttcacggagccacaaacggtctaatgtacatgtttacccctaagattgaacagctggcaaaccccaaagcgtggatcaacgcggcaactcagatttttttcagcttaggcttgggcttcggtagcttaattgcttttgcttcttacaacgagccatctaataattgtcagaagcacgccattattgtgtcactgattaattcctttacaagtatatttgctagtatcgtgaccttttccatttacggatttaaagccacattcaattatgagaactgcctgaaaaaagtttcactgcttctaacgaacacatttgatctggaggatggcttcctgaccgccagcaatctggagcaggtgaagggataccttgcctccgcatacccctcaaagtatagcgagatgtttccgcaaatcaaaaactgttccctggagtctgagctggacactgcagtgcagggcactggactggcgtttatcgtatacactgaagccattaagaacatggaggttagtcagctctggagcgtcctctactttttcatgcttttgatgttaggaatcggctctatgttgggcaacacagcagctatcctgacacccttgacggattcaaaaattatcagttcccacttgcccaaggaagcaatatccggtctggtctgcttggtgaattgcgccattggaatggtgtttaccatggaggccggtaattattggttcgatattttcaacgattatgctgcaaccttgtccctgctgctcatcgttctggtcgagacaatcgctgtctgctatgtatatggattgcgcagattcgaaagcgacttgaaggccatgaccggacgcgcagtgtcttggtattggaaggtgatgtgggccggagtatccccactgttgatcgtgagcctgttcgtgttctacctgagtgattatatactgaccgggaccctcaaatatcaggcatgggacgcttcccaggatgacaagctctag

SEQ ID NO: 241788 - DNA, 1194 bp, synthetic construct
  misc_feature 1..1194: note = Description of Artificial Sequence: Synthetic coding sequence
  source 1..1194: mol_type = other DNA
atggctcacgcccctgaacctgatcccgctgcatgtgacctgggcgatgagaggcccaaatgggataataaagcacaatatcttttaagctgcactggatttgccgtgggactgggcaatatctggcggttcccttatctctgccagacatacggaggtggtgcattcctaattccatatgtgatagccctagtgtttgaaggtatccccatcttccacgtcgaactggcaatcggacagcgactgcgaaaggggtccgtcggcgtgtggacggctatttcaccctacctgtccggggtgggtcttggctgcgttacactcagctttctcattagcctctactacaacactatcgttgcctgggtgctgtggtacctgcttaattcgttccaacatcctctgccctggtcctcttgtccccctgatcttaaccgtaccggatttgtagaagagtgccagggcagcagtgctgtgagttatttttggtaccggcagacgctgaacattacagctgacattaacgacagcggatcaatccagtggtggctgctcatctgcctagccgcttcctgggctgtggtctacatgtgcgtcattcgcggaattgaaactaccggaaaggtgatctacttcaccgctttatttccctatctggtgctcacaatattccttatcagaggcctgacactccccggtgctactaaaggactgatttatctgtttacccccaacaaccccagagtttggctggatgcagcaacccagatttttttcagtctctctttggcattcggcggacacatcgctttcgcatcatataacagcccgagaaatgactgccagaaggatgctgtggtgattgcactggtgaataggatgacctccctttacgcatctattgccgttttcagcgtgctaggtgcttcaggcccaggcctcgctttcgtggtgtttacggagactgatctgcacatgcctggggctcccgtatgggctatgctgtttttcggtatgttgttcactctgggcctgagtaccatgttcggaaccgttgaggcagtgattacgccgctgctagatagcggcaattattggctggaaatctttgataacttcgcggcatcaccgaatctcctgatgctggcctttctggaggttgtaggggttgtttacgtctatgggatgaaacgttag

SEQ ID NO: 241789 - DNA, 1887 bp, synthetic construct
  misc_feature 1..1887: note = Description of Artificial Sequence: Synthetic coding sequence
  source 1..1887: mol_type = other DNA
atggctcacgcacctgagccagacccagctgcctgcgaccttggggatgaacgaccaaaatgggataacaaagctcaatatttactctcatgcacaggcttcgctgtcggcttagggaacatatggcgctttccttatttgtgccagacctatggaggcggagctttcctgatcccttatgtcatagctctggttttcgaaggtatcccaatctttcacgtggaactggccattggtcagcggttgcgcaaaggcagtgtaggggtatggaccgctatctctccctacttatcaggggtagggctaggctgtgtcactttgagcttcttaatcagcctgtactataataccatcgtggcatgggtgttgtggtatctcttgaactcatttcaacatccactcccctggtcttcctgtcctccggatttgaaccggacgggcttcgtagaggaatgtcagggaagttcggcggtgagctacttctggtataggcagacgctaaacatcacagctgacatcaatgattcgggctccattcagtggtggctcctcatttgcctggccgcttcttgggctgtcgtttacatgtgcgtcattcggggaatcgagaccactggcaaggttatttactttaccgccctgttcccatacctggttttgactatctttcttattagggggcttacactgcccggtgccaccaaaggactgatttatctcttcacccctaatatgcatattttgcaaaaccctagagtgtggctggacgcagccacccagatctttttttctctgtccctggcatttggcggtcacattgcctttgcatcatataatagcccgaggaacgattgccagaaggatgcggtggtgatagcgttagttaaccgtatgacatcactgtacgccagcattgctgttttttctgtgctgggattcaaagctacaaatgactatgagcactgtctcgataggaatattctctcgctgattaacgactttgacttccccgaacaatcaatcagcagggacgactaccctgctgtcctcatgcacctgaatgccacctggcccaagcgggtagcacagctgcccctaaaagcatgcctcctcgaggatttccttgataagtccgcctcagggcctggattagctttcgtagttttcactgaaaccgatctccacatgccaggtgcccctgtgtgggcaatgcttttttttggcatgctgtttactttgggcctgagcacgatgttcggcacagtcgaggccgtgattacccctcttctagacgtaggagtgctgccccgttgggtccccaaggaggccctgacaggcctggtctgccttgtgtgttttcttagtgcgacttgtttcaccctgcagtctggcaattattggctggagattttcgacaacttcgcagccagtcccaacctactgatgcttgccttccttgaggtggtgggtgtggtgtacgtctacggcatgaagcgcttctgtgacgatattgcttggatgaccgggagacgccctagcccctactggaggctgacctggcgggtagttagccccctgcttctgaccatctttgtagcctacattatactcctcttttggaaaccgttacgttacaaagcctggaaccccaaatatgaattatttcccagcagacaggagaagctctacccaggctgggctcgcgctgcatgtgttctgttgagcttgttaccagtgctgtgggtgcctgtggccgctctcgcccagttgctgacccggagaaggcgcacgtggcgggacagagacgctcggccagatacagatatgagaccagacaccgacactagaccagacacagacatgaggccagatacagatatgagatag

SEQ ID NO: 241790 - DNA, 1548 bp, synthetic construct
  misc_feature 1..1548: note = Description of Artificial Sequence: Synthetic coding sequence
  source 1..1548: mol_type = other DNA
atggaggctagggaacctgggagacctacacctacctaccacttagtgcctaatacatcccagtcccaggtggaggaggatgtgtcgagtcccccacagagatcatcggaaactatgcaacttaagaaggagattagcctgctcaatggggtgagtctcgtggtcggaaacatgattggtagcggaattttcgtgagtcctaaaggagtgttggttcacacagcgtcctacggcatgagtctgatagtctgggccataggtggattattttccgttgttggtgcactctgttatgcggagctggggacaactattacaaagagcggagcgagctatgcctatatcttagaagccttcggtgggtttatcgcgttcatccggttgtgggtcagtcttctggtggtagaaccgactggacaagccattatagccatcacctttgctaactatatcattcagccctccttcccaagctgcgacccaccgtacctggcctgtaggctgttggctgctgcctgtatatgcctgctaacattcgtcaactgcgcatacgtgaagtggggcacacgcgtacaagacacatttacctatgccaaggtcgtcgctctcatcgctatcatagttatgggcctggttaagctgtgccaaggacattccgagcactttcaggatgcatttgagggaagctcatgggacatgggtaacctatccctcgcactctacagcgccctgtttagctatagcgggtgggacacactaaactttgtgactgaagagatcaaaaatccggagcggaatttgcccctggcgattgggatctctatgcctatcgtgacacttatttatatattaacaaacgtggcctactacacagtcctaaacattagcgatgttctctcttctgatgctgtcgcagttacctttgcagaccagacattcggaatgtttagctggaccattcctattgccgtggctttaagctgttttggcggtctgaatgcaagcattttcgcgtcctcacgtctgttctttgtggggtccagggaggggcacctgcccgacttactgagtatgatacatatcgagaggtttacgcctatccctgcactcctgttcaactgtacaatggctctgatctatttgatcgtagaagacgtgttccagctcattaactacttctccttttcatattggtttttcgttggtctcagtgtggtggggcagctctatttgaggtggaaggagccaaaaagacccagaccgctcaaactgtcggttttttttccgatcgtcttctgcatttgcagcgtcttcctcgtcatagttcccctttttacagacaccattaattctctcatcggcattggtatcgcgctgagtggcgtccccttttacttcatgggtgtgtacttgccggagagtcggaggcccctgttcatcaggaacgttttggccgctattacacgcggaactcagcagctctgcttctgcgttcttaccgagctggacgtcgcagaggagaagaaggacgaacgcaagacagactag

SEQ ID NO: 241791 - DNA, 1524 bp, synthetic construct
  misc_feature 1..1524: note = Description of Artificial Sequence: Synthetic coding sequence
  source 1..1524: mol_type = other DNA
atggctggggctgggcctaagcgcagggctctggcagccccagccgctgaggaaaaagaggaagccagagagaaaatgctggcagctaagtccgccgacgggtccgcacccgctggagagggagagggggttaccctgcagagaaatatcaccctgcttaacggtgtcgccatcatagtgggcactattattgggagcggcatattcgtaacccccactggagtattaaaagaagcgggtagtcccggacttgccctagtggtctgggcggcttgcggggtcttttctattgtgggcgctctctgttatgcagaactgggcaccacaatttctaaaagcggaggggactatgcctatatgttggaggtatatggctcccttcccgctttcctgaagctatggattgagctgcttataatcagaccttcatctcaatatatcgtcgcacttgtcttcgcaacttaccttctgaaacccttatttccaacttgtcctgtgcccgaagaggccgcaaaactggtcgcttgtctctgcgtgttgctactgaccgctgtgaattgctacagcgtgaaggccgctacccgggtgcaggacgcttttgcagccgctaagctgctagccctggccttgatcatcctgttggggtttgtgcaaataggcaaaggcgatgtgtcaaatctggaccctaactttagctttgaaggtaccaagcttgacgtaggcaacatagtgctggctctgtactctggcttgtttgcatacggtggctggaactatcttaatttcgtgacagaggaaatgattaatccctacaggaatctgccccttgctatcataatttctttacccattgtgacactcgtatatgtcctgacgaatttagcctatttcacaaccctatcaaccgagcaaatgttgtcatccgaggctgtggccgtggactttgggaattaccatctaggcgtcatgagctggatcattcctgtatttgtgggactgtcctgcttcgggagcgttaatggcagcctgtttaccagctctcgcctgttcttcgtgggctctcgggaggggcatcttccaagcattctctccatgatacatcctcaactgttgactcctgtgccatcactggtgttcacttgcgtgatgacgctcctctacgcttttagtaaggatatatttagtgtgataaactttttttcgttctttaattggctgtgcgtggctctggcaattataggcatgatttggctccgacacagaaaacctgagctggaaaggcccatcaaggtcaatctggcccttcctgttttctttattctggcctgcctattcctaatcgctgttagcttttggaaaaccccagtggagtgcggtattggatttacgataattctttccggactcccagtttacttcttcggcgtgtggtggaagaacaagccaaagtggctgctccaaggcatattttccactaccgtcctgtgtcagaaacttatgcaggttgtcccacaggaaacttag

SEQ ID NO: 241792 - DNA, 846 bp, synthetic construct
  misc_feature 1..846: note = Description of Artificial Sequence: Synthetic coding sequence
  source 1..846: mol_type = other DNA
atgtcccacggcacctactacgagtgtgaacctcgcggaggacagcagcctctcgagttcagcggaggaagagctggtccaggcgagctgggggatatgtgtgagcacgaagcctcaatcgacttaagcgcatatatcgaaagtggagaggagcagcttctgagcgatctgttcgctgtcaagcctgctcccgaagccagagggttaaagggaccagggaccccagcctttccacactacctgccccctgatcccagaccatttgcctacccaccccacactttcggacctgacagaaaggcgctgggacctggtatctatagctcaccagggtcctacgatccccgagccgtagccgtcaaagaagagccgagagggccagaagggtcccgtgcagccagtagaggctcttacaatccacttcagtaccaagtggctcattgcggacagactgcaatgcacctgcccccaaccctggcggcaccaggacagcctttgcgagtgttaaaagctccgctggctactgcggctccaccgtgtagtcctctgctcaaagctccaagccctgcaggcccactgcacaagggaaaaaaggccgtaaataaggattctttggaatataggctgagacgagagcggaataatattgcagttaggaaaagtcgggacaaagccaagaggcgtattttagaaacacagcaaaaagtgttggagtacatggcggagaacgagcgactgcgtagccgagttgagcagttaacccaggagctggacacactccgtaacttattccgccaaataccagaggccgcaaatttgatcaagggggtaggaggatgcagctag

SEQ ID NO: 241793 - DNA, 1608 bp, synthetic construct
  misc_feature 1..1608: note = Description of Artificial Sequence: Synthetic coding sequence
  source 1..1608: mol_type = other DNA
atggaggagggggctcgtcaccggaacaatacagaaaagaaacacccgggtggcggagaatctgatgcaagcccggaggctggtagcgggggaggcggagtggcactcaaaaaagagattggactggtcagcgcctgtggcataatcgtaggcaatataataggatctggcattttcgtgtctcctaagggcgtgctcgaaaatgctggtagtgtgggactggccctgatagtgtggatcgtcacaggctttattactgtggtgggggcactttgttacgccgagctgggagtgaccatacctaaaagcgggggagactattcttacgtgaaagacatcttcggcggactcgctggcttcttacgactatggatcgcggtgctagtgatatacccgaccaatcaggctgttatcgccctcacattcagtaattatgttctgcagcccctattccctacctgtttcccacccgagtctggcctccgcctactggccgcaatatgtttgctgcttctgacctgggtgaactgctctagtgtccgctgggctacaagagtgcaggatatattcaccgctggaaaactgctggccctggctttaataatcataatgggcatcgtgcaaatttgtaagggggagtatttttggctggaacctaaaaatgccttcgaaaacttccaggagcctgatattgggctggtcgccctagctttcctccaaggcagctttgcctacggcggttggaattttttgaattacgtcacagaggagcttgtcgacccttacaagaatcttcccagagcaatattcataagcattcccttggttactttcgtgtacgtcttcgccaatgtcgcctatgtcactgctatgtcccctcaggagttactcgcttcgaacgcagtcgccgtgacattcggtgaaaagctacttggtgtcatggcatggattatgccaatctccgtcgcactctcgaccttcggtggagtgaatggatcactgttcacctcctctcgcctgttctttgcaggagcacgcgagggccatctgccctctgtgctcgctatgatccacgtgaagcggtgtaccccgatccccgctcttctgtttacctgtatttcaacgctcctgatgctggtaacgagtgacatgtacactctcataaattatgtagggtttatcaattatctcttctacggtgtgaccgtagcaggacagattgtgctgcgctggaagaaaccagatatccccagaccaattaaaattaaccttcttttccctatcatttacttgctattctgggcgtttttgctggttttcagtctctggagcgaaccagtggtttgtggaataggtttggctattatgctgacaggggttccggtgtatttcttgggagtctattggcagcataaacccaagtgtttctcagacttcattgagctcctcactctagtatcacagaagatgtgtgtggttgtttatccggaggttgagcgtggctcagggacggaagaagcgaacgaagacatggaggaacagcagcagcccatgtatcagcctaccccaaccaaagataaggatgttgctggccaaccgcagccatag

SEQ ID NO: 241794 - DNA, 633 bp, synthetic construct
  misc_feature 1..633: note = Description of Artificial Sequence: Synthetic coding sequence
  source 1..633: mol_type = other DNA
atgggaattgtgcagatttgtaagggggaatatttttggctggagccgaagaacgccttcgagaattttcaggagcctgatatcgggctcgttgctctagcattcctgcagggttccttcgcgtatggcggatggaacttcctgaactacgtgaccgaggagctggtcgatccatataagaacctcccccgagctatatttatctccatcccacttgttacttttgtatatgtgttcgcaaatgtggcctatgttactgctatgtctccccaggagctcctggcttcaaatgcagtggccgtgaccttcggcgaaaagctgttgggggtcatggcatggattatgcctatatctgtggcactgtctactttcggcggagtgaacggaagccttcacctgctgtcagctgtgctcaggtggagtcccagaggcccaccctcccaatgtgtcggtcatgatccacgcgaggcattgcatccaaatccttcacctgctctccatatgcacttgcaccccgctgatgccggacaccagagacacgtgcacacgcaccagctgtgcgggctgcatcagttacccttgctttggggccacggctgttggacagactcccctagccttgaagaagcgtag

SEQ ID NO: 241795 - DNA, 693 bp, synthetic construct
  misc_feature 1..693: note = Description of Artificial Sequence: Synthetic coding sequence
  source 1..693: mol_type = other DNA
tgatgcctgcaggagcacagccaaccctcacagcttctgtgtacactgttgctgtgctggtgcgtgctgggccgtgagcggccattcaggaaggcccagtccacaagcagccccctcgagggagttcctaggttcctgaagaggctcttgcttacctgggtgaactgcagctccgtgcggtgggctacccgcgtgcaggacatttttacagcaggaaagctgttggccctagccttgattatcatcatgggaatcgtgcagatctgcaagggagaatacttctggctggagccaaaaaacgccttcgaaaactttcaagagcctgacattggtctagtagcattagcctttctgcagggctcttttgcttatggtggctggaatttcctgaactacgtgactgaggagctcgtggacccgtacaagctgttcttcgcaggcgctagagaggggcacttgcccagcgtgttagctatgatacacgttaaacggtgtaccccaatccctgccctcctctttacatgtatctcaactctgctgatgcttgtaacttcagacatgtacaccctgattaactacgttgggttcatcaactatctgttctacggagttaccgtcgccggacaaatagtgttacgttggaaaaaaccagacatacctcggcctatcaagcctctaccatatcaagggtag

SEQ ID NO: 241796 - DNA, 936 bp, synthetic construct
  misc_feature 1..936: note = Description of Artificial Sequence: Synthetic coding sequence
  source 1..936: mol_type = other DNA
atgggacagctctttcaatgcgccgtggggcaccctggctccagacaccttcatagctgggaggctccgggtctagggccagactaccatcacggggattgtacagacatgcagcgtaatctgcctagggccattttcatcagtattcccctcgttacattcgtgtacgtgttcgctaatgtggcctacgtgactgctatgagcccccaggagctcttagccagtaacgccgtggccgttacattcggcgagaagctgctgggagtaatggcctggatcatgccgataagtgtggctctgtccactttcggcggagtgaatggttcactcttcacatcaagcaggctgttttttgctggagctagagagggtcacctgcccagcgttctggccatgattcacgtgaagcgctgcacacccatccctgccctgttgtttacctgtatttcaactctccttatgctggttacaagcgacatgtatactctcattaactatgtgggatttattaattacctgttctatggagtcactgtcgccggacaaattgtgttaagatggaaaaagccagatataccaagaccaattaagatcaatttgcttttcccaattatttatctactgttctgggccttcctcctggtgtttagtctctggtcagaacctgtagtttgcggaatagggctcgcgatcatgcttaccggggtaccagtgtatttccttggcgtctactggcagcacaagccaaaatgtttcagtgacttcattgagcttcttactctggttagccagaagatgtgcgtagtggtctatccagaggttgagagaggaagcgggacagaagaagccaatgaggatatggaggagcaacagcaacccatgtaccagccaacccccactaaggacaaagatgtggctgggcagcctcagccatag

SEQ ID NO: 241797 - DNA, 999 bp, synthetic construct
  misc_feature 1..999: note = Description of Artificial Sequence: Synthetic coding sequence
  source 1..999: mol_type = other DNA
atggggattgtgcagatttgcaagggcgagtacttttggcttgaacctaaaaatgcgtttgagaactttcaagaacctgatatagggctcgttgctctggcattcttacaaggctcattcgcctatggaggttggaactttctcaactatgtgaccgaagagcttgtcgacccctacaagaacctccctagggccatctttatctccatacctttggttacttttgtgtacgtcttcgcaaatgtggcctacgttacagccatgagtccgcaggagttattggctagcaacgcggtggcagttacctttggggagaagttgctcggcgtcatggcttggattatgccaatttcggtggcgctgtctacattcggtggcgtgaatggatcactgttcacctccagtcggctgttttttgcaggagcccgagaaggccacttgcctagtgttctggccatgatacacgttaaacgatgtacgccgattcccgcattgttatttacctgcatatcgaccctgctcatgttggtgactagtgacatgtacacgttaattaactatgtcggctttataaattacctgttctatggcgtcactgttgccggtcagatcgttttacggtggaaaaagccggacatacctcgacccatcaagatcaaccttctcttccccataatatatctgctcttttgggcatttctcctggtgttcagcctgtggtctgaaccagtggtatgcggcatcgggttggccatcatgctgacaggcgtgcccgtatattttctgggcgtctattggcaacacaagcctaagtgtttttccgactttatcgaattactcactttagtcagccagaaaatgtgtgtggttgtgtaccctgaagttgaaaggggatctgggacagaagaagccaacgaggatatggaagagcaacagcagcccatgtatcagccaactccaaccaaagacaaagacgtggcgggacagccacaaccatag

SEQ ID NO: 241798 - DNA, 285 bp, synthetic construct
  misc_feature 1..285: note = Description of Artificial Sequence: Synthetic coding sequence
  source 1..285: mol_type = other DNA
atggaggagggggctcgccacaggaataatactgaaaagaagcatcctggcggaggagaatccgacgcatcacccgaggcgggttcaggaggcggtggagtggccctgaaaaaagaaattggcttggtgtcagcctgtggcataattgtgggaaacatcattggctcaggtatattcgtttcacctaagggagttttggagaatgcagggagcgtgggcctagctttgatcgtttggattgtgaccggtttcattaccgtcgtgggtgccctgtgctacgcgtag

SEQ ID NO: 241799 - DNA, 237 bp, synthetic construct
  misc_feature 1..237: note = Description of Artificial Sequence: Synthetic coding sequence
  source 1..237: mol_type = other DNA
atggaagaaggggcaaggcatcgcaacaacacagagaaaaagcaccctggaggaggggagtctgatgccagccctgaagctggctccggaggcggaggtgtcgcgctgaagaaggagatcgggctggtttccgcttgcgggatcatcgtgggcaacatcattggcagcggtatcttcgtcagccctaaaggggtacttgaaaatgccggatccgtcgggctcgccctgattgtctag

SEQ ID NO: 241800 - DNA, 1293 bp, synthetic construct
  misc_feature 1..1293: note = Description of Artificial Sequence: Synthetic coding sequence
  source 1..1293: mol_type = other DNA
atgggtcaatatgggcaggagctttcctggaaatgccttgtaaaagccgtatgtctgcaggagcactctcaaccctctcagcttctgtgcactttactcttgtgttggtgtgttctcggcagggaacgaccctttagaaaagctcagtccacttcctcgccacttgaaggagtacctcggttcctgaagaggctgctattgacgtgggtgaattgttcctccgtccgctgggctacccgggtacaagatatttttaccgccggaaagcttttggctctggcgctaattattataatgggtattgtgcagatttgtaagggcgaatacttctggttggaacctaagaacgcgttcgagaactttcaggaaccagacatcggcctcgtagcactcgcgttcctccaaggatccttcgcttatgggggatggaattttctaaattacgtgactgaagagttggtagatccgtataagaatcttcctagagccatcttcatctccatcccactggtgacgtttgtatatgtgttcgctaatgtggcttacgttacggctatgtcccctcaggagctactggctagtaatgctgtggcagttacgttcggcgagaagctcctgggtgtgatggcctggataatgccaatctccgtcgccctgagcacctttggtggagttaatggatctctcttcacttcaagtcgtttattctttgcgggtgccagagaaggacatctccccagtgtccttgcgatgattcatgtaaaaagatgtacgcccatccctgctctgctgtttacatgcatctctacgctgctgatgctggtcacaagcgacatgtacacgctcattaactacgtgggttttattaactacctattttacggtgtaaccgtcgcgggacagatcgttctccggtggaagaagcctgatatcccccgacctatcaagatcaaccttttgtttccgattatctacctgttgttttgggcgttcctgctggtcttcagcttgtggagtgaaccagtagtgtgtgggattggactggcaattatgctgacaggcgtcccagtgtatttcttaggagtttactggcagcataaaccaaaatgtttcagcgacttcatagaactgttaaccctggtatcacagaagatgtgcgtggttgtatacccggaggtggagcgaggaagcggcaccgaggaggccaacgaggatatggaagagcagcaacagccaatgtatcagccaacacctactaaagacaaagacgttgctggacaacctcagccatag

SEQ ID NO: 241801 - DNA, 1968 bp, synthetic construct
  misc_feature 1..1968: note = Description of Artificial Sequence: Synthetic coding sequence
  source 1..1968: mol_type = other DNA
atggtgctgtacacaacaccctttcctaatagttgcctcagtgctcttcattgtgtgtcctgggcgctcatctttccttgctattggctggtggacagactggcagcatcttttattcctactacctacgagaaacggcaacgcgcagacgacccttgctgcctgcagctcctgtgcacggcgctgtttacgcccatttatctggccctcctcgtggcaagcctgccatttgccttcctcgggtttctcttctggtctcctttgcaatctgccagacggccatacatctattcgcggctcgaggacaagggcctggcaggcggtgcagcactgctgtccgagtggaaaggtacgggcccaggaaagtctttctgctttgcaaccgccaacgtgtgcttgctcccagattctcttgccagggtaaataatcttttcaatacgcaggccagggccaaagaaatcggacaacgcattagaaacggagccgctaggcctcagattaagatatatattgattcacccactaataccagcattagtgccgcatcttttagcagtctggtctctcctcagggtggcgatggcgtagcgagggccgtccctggaagcataaaaagaacggctagcgtggagtataagggagacgggggacggcatcccggtgatgaggctgctaacggccctgcctctggcgacccagttgactccagcagcccagaggacgcttgtatcgtgaggatcggcggtgaggaaggcggtcggcctcctgaagctgacgatccagtgcctggcggacaggcgaggaacggggctggaggtggcccacggggacagactcccaaccacaatcagcaggacggagattcgggtagcctgggctctccaagtgctagtagagaatcattggtgaaaggtcgggctggtccagatactagcgcctctggcgaacccggtgctaatagcaaactcctctacaaagcatccgtggtaaaaaaggcagcagctagacgcaggaggcaccccgatgaagcatttgaccacgaggtgtctgccttcttcccagcaaacctggacttcctttgtttacaagaggtctttgacaagagagcagcaaccaaactcaaggagcagttgcacggctacttcgaatatatcctctatgacgtgggcgtatacggatgtcagggctgttgtagttttaagtgcctgaattctggcctacttttcgcttcaagataccctattatggatgtggcctatcactgctatccaaataaatgcaatgacgatgccctggcaagtaaaggcgctttgttcctcaaagtgcaggtgggtagcaccccccaggatcagaggatcgtgggttacatagcctgcacgcatttacacgcaccccaagaagattccgccatccgctgcgggcagcttgatctacttcaggattggctggccgactttagaaagtccactagttcatcatccgccgcaaacccagaggagttggtcgcctttgatgtcgtgtgtggtgatttcaatttcgataactgttcgtcggacgataaattggaacagcagcactctctttttacgcactatcgtgacccgtgtaggttgggcccaggggaggaaaagccttgggcaattggtactctgctcgacaccaatgggctctacgacgaagacgtgtgtactcctgataatctgcagaaagtgctcgaatccgaagaaggacgacgggaatatctggcgttcccaacttccaagtcctcaggacagaagggacgcaaagaactgctgaaaggtaacgggagacgtattgactacatgctacatgccgaagagggtctctgtccggactggaaggccgaagtggaagagttcagtttcataacccagttgagcggactgaccgaccacttgcccgtagccatgaggctgatggtgtcaagcggagaggaggaggcttag

SEQ ID NO: 241802 - DNA, 690 bp, synthetic construct
  misc_feature 1..690: note = Description of Artificial Sequence: Synthetic coding sequence
  source 1..690: mol_type = other DNA
atggaagcccgagaacccggaaggcccacacccacataccacttggttcccaacacaagccagtcccaagtcgaggaagacgtgtcaagcccccctcaaaggagctccgaaaccatgcagctcaaaaaagagatatccctgctcaatggggtgtctctcgtggtgggtaacatgatcggttcaggaattttcgtgtccccaaagggcgtgcttgttcataccgccagttatgggatgagtctgatcgtgtgggctataggtggcctgttcagcgtggtcggtgcactgtgttacgccgagctaggcactaccattactaagagtggggctagttacgcctacatactcgaggccttcggaggtttcatcgcattcatccggctgtgggtgagcctgcttgtggttgaacccacaggccaagcaatcatagctataaccttcgcgaactatatcattcagccgtcatttccatcctgcgatccaccttacctggcctgtcgcctgctggcggctgcttgtatctgtctccttacattcgtcaactgtgcatacgtaaagtggggaacgagagtgcaggacacttttacctacgccaaggtggtggccctgattgccatcatcgtcatgggactcgtgaagttatgtcaagaaatttgcccgtggcctctgggtttcctgtgccagctctag

SEQ ID NO: 241803 - DNA, 1536 bp, synthetic construct
  misc_feature 1..1536: note = Description of Artificial Sequence: Synthetic coding sequence
  source 1..1536: mol_type = other DNA
atggtggactctaccgagtatgaagtggcctcgcagcccgaagtagagacctcacctctgggggacggagccagtccaggccctgagcaagttaaactgaagaaagagatttccttattaaacggtgtgtgtctgatcgtcggaaatatgataggatccggtattttcgtaagccccaagggggtcctcatttattcggcctcctttggcctgtccctcgtaatatgggccgtcggcggtctctttagcgttttcggggcactgtgctacgccgagttaggcacaacgataaagaagagtggagcgagctacgcttatattcttgaggcattcggcggttttttagccttcataaggttatggacgagtttgctaatcatcgaaccaacaagtcaggctattattgccatcactttcgctaattatatggtacagcctttgttcccaagctgttttgccccttatgccgcaagccgattactggccgctgcttgtatatgtttgctcaccttcataaattgtgcctatgtcaaatggggcacactcgtgcaagacatctttacgtacgcaaaggtgctcgctctgattgccgtaatcgtggccggaatcgttaggctgggtcagggtgcatccacgcatttcgagaactccttcgagggctcctccttcgccgtcggcgatatcgctctggccctgtatagtgcactgtttagctatagcggctgggacacactgaattatgtgaccgaggagataaagaaccccgagagaaacttaccgctgagcatagggatttccatgccgattgtgaccatcatctatatactgacaaatgtcgcctactataccgtccttgatatgcgcgatatcctcgcctctgacgcagtggcagttacattcgccgatcagatcttcggcatcttcaactggattatacccctgtcagtggccctgagctgtttcgggggactaaatgcttcaattgtggcagcatcacgcctcttcttcgttgggtcccgggagggtcatttaccagacgccatttgtatgatccacgtcgagaggttcacaccagtgcccagcctgctctttaatgggataatggccctgatttatttatgcgtggaagatatatttcaactcattaattattacagtttcagttattggttcttcgtaggattaagtatcgtcggacaattatacttgcggtggaaggagccagatcggcctcgcccactgaagttgtcagtgtttttccccatcgtgttctgtttgtgtaccatattccttgtggccgtcccactatatagtgacactattaatagtctgattggcattgccatcgccctcagtggcctacccttctactttctgattattagagtaccagagcacaagagaccactctaccttaggagaattgttggctccgctacccgctaccttcaagtcctatgcatgtctgttgctgcggagatggacctcgaagacggaggggaaatgcctaaacagcgtgaccccaagagcaattag

SEQ ID NO: 241804 - DNA, 1536 bp, synthetic construct
  misc_feature 1..1536: note = Description of Artificial Sequence: Synthetic coding sequence
  source 1..1536: mol_type = other DNA
atggttgatagcactgagtacgaggtcgcgagccagcccgaggtcgagacatcaccactgggcgatggcgcaagtccaggccctgagcaggtcaaactcaaaaaggaaattagtctgttgaatggcgtgtgtctgatcgtcggtaacatgattggcagcggcatttttgtctcaccaaagggcgtcctcatttactctgcatcattcggtttgagccttgtcatctgggctgttggaggcctcttcagcgtatttggcgcattatgctatgcagaactggggacaacgatcaagaagtccggagccagttacgcatacattctggaagcctttgggggatttctggccttcataaggttatggacaagtctgctcattattgaacccacaagtcaggccattattgcaataactttcgcaaactatatggtgcagccattgtttccctcatgctttgctccatatgcggcatccaggctcttggccgctgcatgtatatgtttgctgacctttatcaactgcgcctacgttaaatgggggactctcgtccaggacatctttacatacgctaaagtgttagctctgatcgcagtgatcgtggcgggtatcgtgcggctcggacagggagccagcacccacttcgaaaactcattcgagggatcgagttttgccgtgggtgatattgcgctggctctctacagcgcacttttctcatacagcgggtgggacacattgaactacgtgaccgaggagattaagaaccccgaacgaaacttgcctttgagcattgggatctcaatgccaattgtcacgataatctatatacttaccaatgtggcatattacacagtcctcgacatgcgggacatccttgcatctgacgcagttgccgtcacttttgccgaccagattttcggcatattcaactggattattcctctaagtgtcgccctgtcctgtttcgggggtttgaacgcaagcattgtggccgcttcccggctcttcttcgtggggagcagggaaggccatctgccagatgccatatgtatgatccatgtcgagcggtttactcccgtgccaagcctgctctttaacggtatcatggcccttatctatctgtgcgttgaagacattttccagctgatcaattactactcattcagttactggttctttgtgggacttagcatagtgggacagctctatttaagatggaaggagcccgacagaccccgaccgttaaaactttctgttttttttcctattgtgttctgcctgtgtactatttttctggtggccgtacctctgtacagcgacacaatcaattccctgatcgggatagccatcgcactttcaggcctcccattttacttcttaatcatccgcgtccctgagcacaagcgtccactctacttgcgacgcattgtggggtctgcgacacgctacctccaggtgctgtgcatgagcgtggccgctgagatggatcttgaagatggaggagaaatgcctaagcaaagagatccaaagtccaattag

SEQ ID NO: 241805 - DNA, 1536 bp, synthetic construct
  misc_feature 1..1536: note = Description of Artificial Sequence: Synthetic coding sequence
  source 1..1536: mol_type = other DNA
atggttgactccaccgagtacgaggtggccagtcagcctgaggtggagacctcgcctctgggtgacggtgcttcacctggtcctgaacaggtaaagctcaaaaaggagatctctctgctaaatggggtgtgtctgatagtgggcaatatgatagggtccgggattttcgtgtctcccaagggcgtgctgatttatagcgcaagttttgggctgtcactcgtcatatgggccgtgggcggattgttctccgtgtttggagctctgtgttacgctgagctgggcacaaccataaaaaagtcaggcgcatcctacgcgtatatcttggaggccttcggcggtttcctggcttttattagactgtggactagtctgctaatcatcgaacctacttctcaggccatcattgccatcacatttgccaactacatggtacagcctttgtttccctcttgcttcgccccatacgctgccagtcggcttctggctgccgcttgtatttgcctgcttacgttcattaactgtgcttacgtgaaatggggtacccttgttcaggacatcttcacgtacgcgaaggttctggcgctcatcgctgtcatagtcgccggaatagttcgcctaggacagggggcttctacccatttcgagaatagcttcgaagggagttccttcgctgtgggcgacatcgctctcgctctctactcagccctgttctcctattccgggtgggatacccttaactatgtgaccgaggaaattaaaaatccagaacgaaatctgcccttatctattggaatatccatgcccatcgtgactatcatctacatccttacgaatgtggcatattatacggttttggatatgcgtgatatcctagccagcgacgcagtagctgtgactttcgcagaccaaatttttggcatcttcaactggatcattccgctttcagttgctttaagctgcttcggaggactcaacgcctctattgtggccgcaagtcggcttttctttgtgggttctagagaaggtcaccttcctgatgccatctgtatgatccatgttgagagatttaccccggttccgagcctcctcttcaatggcattatggcgctgatttacctgtgcgtggaggacatcttccagctcattaattactacagctttagctactggttttttgtagggctgtccatagtgggacagctctatctacgttggaaggagcccgacaggcctcgacccctcaaactatcagtgttctttccaattgtcttctgtctctgcacaatcttcctggtggccgttcctctgtattctgacactatcaactcgttaattgggatcgcaattgctctgtctggtctgcctttctattttcttatcatcagagtgcccgaacacaagcgcccactgtatctcaggcggattgtcgggagcgcaacgagatacctacaagttctttgtatgtctgtagcagcagaaatggatctggaggatggcggagaaatgcccaagcagcgagatccaaaatcgaattag

SEQ ID NO: 241806 - DNA, 1536 bp, synthetic construct
  misc_feature 1..1536: note = Description of Artificial Sequence: Synthetic coding sequence
  source 1..1536: mol_type = other DNA
atggtggattccacagaatacgaagtggcctcacagcccgaagtggaaacaagcccacttggagacggtgcttcgcccggacccgagcaagtgaagctgaagaaagaaatttctctgctcaacggggtgtgcttgatcgtgggtaacatgatcggttcaggcatcttcgtctcccctaagggggtgctgatctatagcgcctcctttggcttgtcactggtgatctgggccgtgggaggtctatttagcgtatttggagctctgtgttacgcggagctgggaacgactatcaagaaatccggcgcttcttatgcgtacatcttagaggctttcgggggtttcctggccttcatccggctgtggacttcccttctaatcattgaacccaccagccaggccataattgcaattacattcgctaattatatggtgcagcccctgttcccatcatgctttgctccctatgccgcttctagactactggctgctgcctgcatttgcctgctgacatttatcaactgcgcttatgtcaaatggggaactctggtccaggatatttttacctatgccaaagttctcgcgctgattgcagtgatcgtggctggaattgtccggctgggacagggtgcctccacccatttcgaaaattctttcgaggggagttccttcgcggtgggggatatcgcactggctctgtacagtgccctgttctcatatagcggctgggataccctgaactacgtgactgaagaaatcaaaaatcctgagagaaatctacccctgagcatcgggatctctatgcctatcgttactatcatctatattctcactaacgtagcctactacactgtgctcgacatgcgtgatattcttgcttcagacgcagtcgctgtgacctttgcagatcagatctttggcatttttaattggatcattcccctttctgtggccctgagttgctttgggggactgaatgcctccatcgtagccgcttccagactgttctttgtggggagccgggagggtcacttgccagatgcaatatgcatgattcacgtagaacgtttcacccctgttccttcactcctgttcaacgggatcatggctctcatttacctttgcgtggaggatatctttcagctaatcaactattattccttcagttattggtttttcgtggggctgtcaatcgtgggacagctctatctacgctggaaggaacccgaccgccctcgaccactgaagttatctgtcttctttccgatagtcttctgtctatgcaccatttttctggtggcggtgccactgtatagtgatacgattaactcactcattggtatcgccatcgccctctcggggctgcccttttacttcctgataattcgggtgcctgaacataagcgccctctgtacctgcgaagaattgttggctccgctactcggtacctccaagtgttgtgcatgagcgtggctgcagaaatggatcttgaagacggcggtgagatgccaaagcagcgggaccctaagtcaaattag

SEQ ID NO: 241807 - DNA, 1455 bp, synthetic construct
  misc_feature 1..1455: note = Description of Artificial Sequence: Synthetic coding sequence
  source 1..1455: mol_type = other DNA
atggtggactcaacagaatacgaggtggccagccagcccgaggttgagacttcgccactcggagacggagccagcccgggaccagaacaggtaaaactgaaaaaggagatctactcagccagcttcggtctttccctcgtcatttgggccgtaggcggtctattttctgtatttggtgccctctgctatgcagagctggggacaaccatcaagaagtctggtgcttcttacgcatacattttggaggccttcggcggatttcttgcgttcatcaggctctggacaagcttgctcattattgagcccacatcacaggcgattatcgcaattacgttcgctaattacatggtacagcccttattcccttcctgttttgcgccttatgcagcttcccgccttttggcagctgcttgtatctgtttactgacatttataaattgcgcgtatgtcaagtggggcactcttgtgcaggacatcttcacatatgcaaaggtacttgcgctcatcgccgtgatcgttgctggcatcgtgcggttagggcagggcgcatcaacccacttcgagaactcgttcgagggatcctcattcgctgtgggggacatcgccctcgccctgtattccgccttattcagttatagtgggtgggacactttaaactatgttactgaagagattaagaatccagagcgtaacctgccgctcagtatagggattagtatgcctattgtgacaataatctacatcctcactaatgtggcttactatacggttctcgatatgagagatatcttggcctctgacgccgtcgctgtgactttcgcagaccagattttcgggatcttcaactggataatccctttgtccgtcgccttgtcatgcttcgggggactgaatgcaagtattgtggcggcatcacggctgttcttcgtggggagtcgtgaagggcacctgccagatgccatatgtatgatccacgtggagcgctttaccccagttccctctctgttattcaacgggattatggcgcttatatacttgtgtgtcgaggacattttccaactgattaactactactcattcagttattggttcttcgttggcctgtccatcgttggccaattatacctccgttggaaggaaccagatcgccctagacccctaaagttgtccgtttttttcccaattgtgttttgcctctgtactatctttctggtcgctgtgcctctatactcagacactataaactcactcataggaatcgcaattgcattaagcggactccccttctattttctgattatcagagtgccagaacacaagagacctctctatctgcgcagaatcgttggctctgccacaagatatcttcaggtcctgtgtatgtccgtggcagctgagatggatttagaagatggtggggagatgcctaagcaaagggaccccaaatccaattag

SEQ ID NO: 241808 - DNA, 426 bp, synthetic construct
  misc_feature 1..426: note = Description of Artificial Sequence: Synthetic coding sequence
  source 1..426: mol_type = other DNA
atggtggattccacagaatatgaggtggctagccagcctgaagtagagaccagtccacttggagacggtgcctcacccggtcccgaacaggtcaaacttaagaaggagatctctctgctcaacggggtttgtctcatcgtcgggaatatgattgggagtgggatttttgtgtcccccaagggcgtattgatttactctgcctccttcggactgtccttggtgatctgggcggtgggcggactgttcagtgtatttggagccctttgctacgcggaactcgggaccaccattaagaagagtggtgccagttacgcatacattctggaggcttttgggggatttctcgccttcattaggctctggacatccctactaataatcgaaccgactagccaggctatcatcgccatcacgttcgcaaattag

SEQ ID NO: 241809 - DNA, 135 bp, synthetic construct
  misc_feature 1..135: note = Description of Artificial Sequence: Synthetic coding sequence
  source 1..135: mol_type = other DNA
atggtcgatagtacagagtacgaggtcgcttctcaaccggaggttgaaacaagccccttaggggacggcgcatcacctggaccagagcaggtgaagctgaagaaggaaatctccttacttaatggggtgtgctag

SEQ ID NO: 241810 - DNA, 495 bp, synthetic construct
  misc_feature 1..495: note = Description of Artificial Sequence: Synthetic coding sequence
  source 1..495: mol_type = other DNA
atggttgacagcaccgaatacgaggttgcgtcccagcccgaagtcgagactagccctctgggtgatggggcatcccctggtcctgagcaagttaaactcaagaaagagattagcctcctcaacggtgtctgtctcatcgtgggtaatatgatcggttcagggatctttgtgtcgcccaaaggcgtgcttatttactctgcgagctttggactttctctagtgatttgggcagttgggggtcttttctccgtcttcggagctctatgttacgcagaactcggtaccactatcaagaaaagcggtgcgagttacgcctacatcttagaggccttcggaggcttcttagcctttattcgtctgtggacctctctcctaataatcgaacctacaagccaggcaatcatcgccattacctttgctaactacatggtgcagccactcttcccttcctgcttcgcaccatacgctgcttcaagactgctggctgccgcttag

SEQ ID NO: 241811 - DNA, 369 bp, synthetic construct
  misc_feature 1..369: note = Description of Artificial Sequence: Synthetic coding sequence
  source 1..369: mol_type = other DNA
atggtggatagtaccgagtatgaagtggcaagtcaacccgaagtggagaccagtccacttggcgacggagcatctcctggacccgagcaggtgaagctgaaaaaggagatctcactccttaacggagtctgtttaatcgtgggaaatatgattggaagcggtatctttgttagccccaaaggagtgctgatctatagtgcaagtttcggattgtcgctcgtaatctgggctgtgggcggactgttctctgttttcggggctctctgttacgctgagctcgggaccaccattaaaaagtcaggagcctcctatgcctatattttagaagcttttggcggtttcctcgccttcatccggttatggacttag

SEQ ID NO: 241812 - DNA, 1536 bp, synthetic construct
  misc_feature 1..1536: note = Description of Artificial Sequence: Synthetic coding sequence
  source 1..1536: mol_type = other DNA
atggtggatagcaccgagtatgaggttgcaagccaacctgaggtagagaccagccccctgggcgacggggcatcaccaggacccgagcaagttaaactaaaaaaggaaatcagcctgctaaatggcgtgtgcctgattgtcggcaacatgattggctcgggcattttcgtctcaccaaagggcgttctgatttactccgcctcatttgggttgtctttggttatctgggcggttggcggtctcttttctgtctttggagctctctgctacgccgaactggggaccacaatcaaaaagtccggtgcctcttacgcatatatactggaggccttcggcggattcttggctttcatccgactctggacctcgttgctcataatcgagcctacatctcaggccataatcgcaatcacttttgccaattacatggttcagcctctgttcccgtcctgttttgcaccctacgccgcttcacgcctactcgccgcagcctgcatctgcttattgacttttattaactgtgcttatgtaaaatggggcactcttgtacaagatatctttacatacgctaaggtccttgcactgatcgccgtaatcgtggctggcatcgtccgcctggggcagggagcaagcacccatttcgagaattccttcgagggaagttcctttgcagtcggagacatcgcactggccctgtatagtgcactgttctcctacagcggctgggacacccttaattatgtcactgaagaaatcaaaaaccccgagagaaacctgcctttgtcaatcgggatctccatgccaatcgttacaatcatttacattctcacaaacgttgcttattatacagttctggatatgagagatattctggccagtgatgcagtggccgtgacatttgccgaccagattttcggaatctttaactggatcatacctttgagtgtggcattgtcctgcttcggcggtctgaatgcctctattgtggcagcttctcggttgttttttgttgggagccgggagggccaccttccagacgcaatttgtatgatccatgtggaacggtttacacctgtgccaagcctgctattcaatggaatcatggcactcatctatctgtgcgtggaagatatcttccagttgatcaactactacagcttttcttattggttcttcgtcggactgagcattgttggccaactttatctgagatggaaggaacccgaccggccacgtccgctgaaattaagcgtcttttttccaattgtattttgcctctgcacaattttcctcgtggccgtgcctttgtatagtgacaccattaactctctaatagggattgcaatcgcactctctggcctccccttctatttcttaattatacgtgtgcccgagcataagcggcctttgtacctacggcgaatcgttggcagtgcaacgaggtatctgcaggtactttgcatgtcagtggccgctgaaatggatctcgaagacggtggcgagatgcctaaacaaagagacccaaagtctaattag

SEQ ID NO: 241813 - DNA, 348 bp, synthetic construct
  misc_feature 1..348: note = Description of Artificial Sequence: Synthetic coding sequence
  source 1..348: mol_type = other DNA
atggtcgactccacagagtatgaggtcgcttcacagcctgaggtggagactagccctctgggtgatggcgcaagcccaggacctgaacaggtgaaattgaaaaaggaaatctcacttctgaatggggtgtgtctgatcgtaggaaacatgatcgggagcggcattttcgtttctccaaagggtgtccttatttacagtgcctcttttggcttgagcttagtgatatgggcggtaggagggttgttctccgtgttcggagcgttgtgttacgctgagctcggcactacgatcaagaaatctggggcatcttatgcgtacattctagaagccttcggcggatttctctag

SEQ ID NO: 241814 - DNA, 93 bp, synthetic construct
  misc_feature 1..93: note = Description of Artificial Sequence: Synthetic coding sequence
  source 1..93: mol_type = other DNA
atggtggatagcacagagtacgaagtagcgagccagcccgaggtggagacatcgccgctaggtgacggtgcctcccctggacctgagcagtag

SEQ ID NO: 241815 - DNA, 933 bp, synthetic construct
  misc_feature 1..933: note = Description of Artificial Sequence: Synthetic coding sequence
  source 1..933: mol_type = other DNA
atggtcgacagtaccgagtatgaagtggcttcccagcccgaggtggagaccagtcccctcggggacggcgcatctcccggtcctgagcaggttaaattgaagaaggaaattagcctgctcaacggagtatgtctcattgtcggtaacatgattggcagcgggattttcgtgtcacccaagggagttttaatttattccgcgtccttcgggctctctctggtcatttgggccgtcggcggactcttcagcgtgtttggcgctttatgttatgcggaactcgggactacaatcaagaaaagtggcgcttcttacgcgtatattctggaagcttttgggggatttctggctttcattcggctgtggacaagtttgttgatcattgagccgacttcccaagcaattatcgctatcacctttgcaaactatatggtccaaccgttgtttcccagctgttttgcgccttacgctgcctcccggctgttggcagccgcatgcatctgtcttctgactttcatcaattgtgcctacgtgaaatgggggacactcgtacaggatatctttacgtatgcaaaggtgctcgccctcatcgccgtgatcgtcgctggaatcgtccgcttaggtcagggggctagtacacattttgaaaattcattcgagggttcatccttcgccgtgggagacattgctcttgcgctctacagcgcgttgttcagttatagtggatgggacacactgaattatgttaccgaggaaataaaaaatcccgagcggaacttgcccctcagtatcggtatttctatgccgattgtcaccatcatttacatccttaccaacgtggcgtactacacggtcttggacatgcgagatatcctggcctccgacgctgtggccgtggcattcctttgtggtctgaagcgccgtcctagcccctag

SEQ ID NO: 241816 - DNA, 321 bp, synthetic construct
  misc_feature 1..321: note = Description of Artificial Sequence: Synthetic coding sequence
  source 1..321: mol_type = other DNA
atggtcgatagcacggaatatgaagtggcgtctcaaccggaagtggagactagtcccctgggtgatggggcatcacccggtccggaacaagtgaaactgaagaaagaaattagcttgttaaacggtgtgtgcctgattgtgggaaatatgatcgggtccggtatttttgttagtcctaagggggtgttaatttatagcgcctccttcggcttgtccctggtaatctgggccgtaggaggcctctttagtgtgttcggtgctctgtgttatgccgagctgggcaccacaatcaagaaaagcggagccagttatgcatattag

SEQ ID NO: 241817 - DNA, 351 bp, synthetic construct
  misc_feature 1..351: note = Description of Artificial Sequence: Synthetic coding sequence
  source 1..351: mol_type = other DNA
atggtggattccactgagtacgaggtggcctcacagccagaagttgagacctcacctcttggcgacggcgcatctccaggcccagagcaggtcaagctaaaaaaagagatatcgttacttaacggggtgtgcctcatcgtcggcaacatgatcggctctggaatcttcgttagtccaaagggagttcttatttatagcgcatctttcggcctgtccctcgtgatttgggcggttggcggactgttcagtgtctttggggctctctgctacgctgaattgggcaccactatcaagaagagtggcgctagctatgcctacattctggaagcattcggcggatttctggcatag

SEQ ID NO: 241818 - DNA, 1890 bp, synthetic construct
  misc_feature 1..1890: note = Description of Artificial Sequence: Synthetic coding sequence
  source 1..1890: mol_type = other DNA
atggggtgcaaagtgctgctaaacattggacagcaaatgctccgccgaaaagtagtggattgcagccgtgaggaaacccgcttgagccggtgcctgaatactttcgacttggtcgcattgggtgtgggtagcaccttgggggcaggagtgtatgtgcttgcaggcgctgttgcacgtgaaaatgccggtcccgctatagtcatctctttcctgattgctgcgctcgccagcgtcctagcaggcctttgttatggagagttcggtgccagggtcccaaagaccggctctgcgtacctgtacagctatgtaacagtaggggaactctgggctttcatcaccgggtggaacctgatcttatcatatattattggcaccagcagcgtggctcgcgcttggtccgccacttttgacgagctgattggtaggcccatcggagagttctccaggactcacatgactctgaatgctcccggtgtgttagctgagaatcccgatatcttcgccgtgattattatcctcattttgacgggtcttttgactctaggggtgaaagaatctgctatggttaacaagatttttacttgcataaatgtgctcgttcttggctttatcatggtgtccggtttcgtcaaaggttccgtgaagaattggcaactgaccgaggaagattttggaaacacctccgggcgactgtgcctgaataatgatactaaagagggcaaacctggcgtcggcggatttatgcctttcggatttagtggagtgttatctggagccgcaacctgcttttatgcctttgtgggctttgattgtatcgccaccaccggggaagaggtcaaaaacccccagaaagctattcccgtgggcatagttgcaagtctgttgatttgcttcatcgcgtatttcggagtctcagcagctctgacccttatgatgccttacttctgccttgacaataattcacccctcccagatgcattcaaacatgtgggatgggagggcgcaaagtatgctgtagcagtgggttcattgtgtgccctgtctgcgtctttgttggggtccatgttccctatgcccagagttatctatgccatggccgaagacgggttgctttttaaattcctggcaaatgtgaatgataggacgaaaactcctattattgccacccttgcaagtggagcagtggcggctgttatggctttcctgtttgacctaaaagacctggtggatttaatgtctatcggaaccttgctggcctactctctggtggccgcttgcgtccttgtgctgcgttatcagccagaacagccaaatctggtataccagatggcctcaacctctgacgagctagaccctgccgatcagaatgagctagcatcgacgaatgattctcagctcggtttcctccctgaagctgagatgttctctctgaaaaccattctcagccctaagaatatggaaccctccaagatctccgggttgattgtcaacattagcacatctctgattgctgtgttgatcatcacattctgtatcgtcacagttttaggtagagaggcactgacgaaaggggcactctgggcggtgttcttactggcagggagcgcacttctatgcgctgttgtgactggtgtcatttggagacagcccgaaagcaagaccaagctctcttttaaggtgccattcctccctgttttgccgatcctgtccatcttcgtaaacgtttatctcatgatgcagttagaccagggcacgtgggtgcgctttgctgtatggatgcttattgggttcatcatttactttgggtacggactgtggcactcagaggaagcttctctggatgctgatcaggcgagaactcccgacggcaatctggatcagtgcaagtag

SEQ ID NO: 241819 - DNA, 366 bp, synthetic construct
  misc_feature 1..366: note = Description of Artificial Sequence: Synthetic coding sequence
  source 1..366: mol_type = other DNA
atgggatgcaaggtgctgctcaatattggccagcagatgctgcgccgaaaagtggtcgactgctcacgagaggaaaccaggctgtcccgctgtctgaatacattcgacctcgtcgcactgggggttggatcgactctgggagcaggggtgtacgttctggccggtgcggtggcacgcgagaatgcagggcctgccatcgtgatttccttcctgatcgccgcattggctagtgtgctcgctggtctttgctacggagaatttggcgctcgggtgcctaaaactggttctgcatacctctactcttatgtgacagttggggagctctgggctttcataacaggttggaatctcatcctgagctactag

SEQ ID NO: 241820 - DNA, 2097 bp, synthetic construct
  misc_feature 1..2097: note = Description of Artificial Sequence: Synthetic coding sequence
  source 1..2097: mol_type = other DNA
atgaagattgagaccagtgggtataatagtgataagctcatttgcaggggcttcatcgggacacctgcccctcccgtctgtgactcaaaattccttctgagcccatcctcagacgttagaatgataccatgtagagcagccctaacatttgctagatgcctgatcaggaggaaaattgtcacactcgacagcttagaggataccaagttgtgcagatgcctctcaactatggacctgatcgccctgggcgtgggcagtacattgggcgcaggcgtgtatgtgttggccggagaagtggctaaagctgactctggcccaagcatcgtggtgagctttctcatagccgcactggcttccgtcatggctggcctctgttacgctgaattcggtgccagggtaccaaagaccgggagcgcctatctctacacttacgtcactgtgggcgaattgtgggctttcatcacaggctggaatctcatcttatcttacgtgatcgggacatcttctgtagccagagcctggtctggcacattcgacgagctgctgtccaaacagataggccagtttctcaggacctacttcagaatgaactacactggtctggctgagtacccggacttctttgctgtttgtctgatcctcctgctggccggactcctctcttttggagtaaaagaatccgcatgggttaataaagtgtttactgccgttaatatactggtactgttgtttgtcatggtggctgggttcgtcaagggcaatgtggccaactggaagatttctgaggaattcctgaagaacatttccgctagcgcgagagagcctccttctgagaatggcactagtatctatggggcaggaggcttcatgccttatggttttacagggaccttggcaggagccgcaacctgcttttacgcctttgttggctttgattgtattgccacgaccggtgaagaagtccgaaatccgcagaaggcaattccaatcggcatcgttacaagtttactcgtgtgcttcatggcctacttcggcgtgtcagccgctttgacactgatgatgccatattaccttctggatgaaaaaagcccattgcctgttgccttcgagtacgttggatggggcccagctaagtacgtggtggcggcaggctccctctgcgctctcagtacaagcctcctcggcagcatttttcctatgccacgagtgatctatgcgatggctgaagacggccttctattcaaatgtctggcacagattaatagcaaaactaagaccccaattatcgctacgctttccagcggagctgtggctgcgctaatggcttttctctttgacttaaaagccctggtggatatgatgtctattggtaccctgatggcgtattctcttgtggccgcttgtgtcctgatccttcgatatcagcccggactcagttacgatcaacccaagtgcagtcctgagaaagacggcctcggatcctcgccgagggtgacttccaagtctgagtctcaagtaaccatgctgcagaggcaaggcttttcaatgaggaccctgttctgcccttcacttttaccaacacagcagagtgcaagcctggtctcctttctcgtgggtttcctcgccttcctggtcctgggtctgagcgtactcaccacgtatggggtccatgccattacacgcctagaagcatggagtctagcgttgctggcactatttttggtcttatttgtggccatagtgttaacgatctggcggcagccgcaaaaccaacagaaagtggcttttatggtgccattcctgcccttcctgcccgcattctctatcctggtgaatatttacctgatggtacagctgagtgcagatacatgggtgaggttttccatttggatggctatcggctttctgatctactttagctatgggatcagacactcgcttgagggccacctgcgcgacgaaaataacgaggaagatgcataccctgataatgtgcatgcagccgcagaagagaagtccgcaattcaggcaaacgaccatcaccccaggaacctgagctctccctttatttttcacgagaagacttccgaattttag

SEQ ID NO: 241821 - DNA, 2094 bp, synthetic construct
  misc_feature 1..2094: note = Description of Artificial Sequence: Synthetic coding sequence
  source 1..2094: mol_type = other DNA
atgaaaatcgaaaccagtgggtacaactcggataagctgatttgtcggggatttattggcactccagcccctccagtgtgtgattcaaaatttcttctgagcccatctagcgacgtcagaatgatcccatgtcgcgcagctctgacattcgccagatgcctgatcaggaggaaaatagttacactggacagtctagaggacacgaagttgtgccgatgtttgtctacaatggatctgatcgcccttggcgtgggaagcaccctgggcgcaggcgtgtacgtcttagccggagaagttgctaaggcagatagtgggccttcaattgtggtgagttttctcatcgctgctctggcttctgtgatggccggattgtgctacgccgagtttggtgccagagtgccgaagaccggctctgcttacctgtacacctatgttacagtcggagagctctgggccttcataaccggctggaatctaatcctgagctacgtcataggaacctcttctgtcgccagggcttggagcggtacattcgatgaacttctgtctaaacagattggtcaattcctgcggacatactttaggatgaactataccggactggccgagtatccagacttcttcgctgtgtgcctgatactgttgcttgctggactcctgtcctttggcgtgaaggagagcgcttgggtgaacaaagtgttcactgccgtcaacatactggtcctactgtttgtgatggtggctggctttgtgaagggaaatgttgctaattggaaaatcagtgaggagtttttgaaaaacatcagcgcatccgcccgtgagcctccttctgagaatgggacctctatatatggagctggaggtttcatgccgtatgggttcaccggcacgctcgctggagccgctacctgtttctacgcctttgtcggatttgattgtattgccaccacaggggaagaggtccggaatcctcaaaaagctatccccatcggaatcgtgacatcacttttagtgtgctttatggcttacttcggcgtaagtgctgctctaaccctgatgatgccttactatctcctcgatgaaaagagccctctccctgtggccttcgaatatgtcggctggggacccgctaaatacgtggtggccgcaggcagcctgtgtgccctgagcacctctctgctcggaagcatgttcccactgccgaggatcctcttcgcaatggccagagacgggcttctgtttcgattcctggccagagtgagtaaaagacagtcgcccgtagcggctaccctgaccgcgggagtgatctctgcactgatggctttcctgttcgatttaaaggctctcgttgatatgatgtcaatcgggaccctaatggcctactcactcgtagcagcatgcgtcctaattctgcgctatcaacccggactgtcctacgaccagccaaagtgcagtcccgaaaaggacggactgggaagttccccgagagttacttcaaagagcgaatcgcaggttaccatgcttcagcgccagggctttagcatgcgtacccttttctgcccttcactgctcccaacccagcaaagcgcttccttagtgtcctttctggtgggattcttggctttcctcgtgttagggctgtcggtcctcaccacttacggggtccacgcgattacccgcctggaggcctggagcctggcccttctcgccctttttctagtcctgtttgtggcaatcgtgctgactatctggagacagccacaaaatcaacagaaggttgcatttatggtcccattcttaccattcttgcctgcgttctcaattttggtgaatatctacctcatggttcaattaagtgccgacacttgggtaagatttagcatttggatggcgattggcttcctgatctatttctcttatggtataaggcactccctggaaggccacttgcgcgatgagaacaacgaggaagatgcatacccagataacgtccatgcagccgcagaggagaaatcagcaattcaggctaacgaccaccaccctcgcaacctctcctccccgtttatatttcatgagaagacttctgagttctag

SEQ ID NO: 241822 - DNA, 2094 bp, synthetic construct
  misc_feature 1..2094: note = Description of Artificial Sequence: Synthetic coding sequence
  source 1..2094: mol_type = other DNA
atgaagatcgaaactagcggctacaatagcgacaaactgatttgtcggggttttatcggcactcctgcgccaccagtgtgtgattcaaagtttctcctgtccccatcctctgacgtcaggatgattccctgtagggcagccctgacattcgcacggtgcctgattcgccgaaagatcgtcacacttgactctttggaggacactaagctatgccgttgtcttagcacaatggacctcattgcgttgggcgtaggctccacgctgggggcaggagtctatgttctcgctggcgaggttgctaaggccgattctgggccaagtatcgtagtgagtttcctgatcgccgcactggcgtcagtgatggctggtctttgctacgccgagtttggcgcacgggtgcccaaaactgggtccgcctacctgtacacttatgtgaccgtgggagagctgtgggccttcattaccggctggaacctgatactgtcctacgttatcggaacctcatcagtagcccgagcttggagcgggacttttgatgagttgctgtcaaaacaaataggacaatttttaaggacatactttcgcatgaactacaccggactggcagagtaccctgatttctttgcggtgtgtcttattctgctgttggccggtctgttgtcttttggcgtcaaggagtcggcatgggtcaataaagtcttcacagccgttaacatcctcgtgctgctctttgtgatggttgcagggtttgttaagggcaacgtcgcaaactggaagattagtgaagagtttttaaaaaatattagcgccagcgcacgggaacctccgtcagagaatgggacctctatctatggagctggagggttcatgccgtacggttttactggcacactggccggagccgctacatgcttctatgccttcgtaggatttgattgcatcgccactaccggagaggaagtgaggaacccccagaaagctatcccaattggcatagtaacatccttgctcgtttgctttatggcctatttcggagtaagtgcggcactgacattgatgatgccctattatctgctcgatgaaaagagtccgctccccgtggcattcgaatacgttggctggggacctgccaagtatgttgtggccgcaggatcactgtgcgcgctgtctaccagtttgctgggatctatgtttcccctgcctcgcatactgttcgcgatggccagggatgggctcctcttcaggttcctggcgagagtgtccaaacgccagagtcccgtcgccgctaccctcacggcaggagttatcagtgctctgatggcttttctgttcgacctgaaagcccttgtagatatgatgtccatcggcacactgatggcatactccctggtggccgcatgcgtgctgatcctgcggtaccaacccggactgtcatacgatcagccaaagtgttccccagaaaaggacggactggggtcctcaccccgtgtgacgtcgaaatccgaatcacaagtcacgatgctgcagagacaaggcttcagcatgcgaacacttttctgtccgtcactgctacccactcagcagagtgccagtctcgtgagcttcctcgtggggttcctagcttttttggtcctgggtttgtccgtactcaccacatacggagtgcacgcgattactagactggaggcctggtcacttgccttgctggctctgtttctggtcctgtttgtggccattgtgctgaccatttggaggcagccccagaaccagcaaaaagtcgcattcatggtcccatttctcccttttctgcctgccttttccattcttgtcaatatatacctgatggtccagctgtctgccgatacctgggtcaggtttagcatttggatggcgattggattccttatttacttttcctatgggatccgacacagtctggagggccatctacgcgacgaaaacaatgaagaggacgcctatcccgacaacgtccacgccgcagctgaagagaagagcgccatacaggcgaacgaccaccatcccagaaatttatcaagcccattcatcttccacgaaaagactagcgagttttag

SEQ ID NO: 241823 - DNA, 1977 bp, synthetic construct
  misc_feature 1..1977: note = Description of Artificial Sequence: Synthetic coding sequence
  source 1..1977: mol_type = other DNA
atgattccgtgcagggcggctttgacattcgctagatgtttgataagaaggaaaatcgttacactggacagcctcgaggataccaagctttgtcggtgcctgagcacgatggacctgattgccctcggtgttggcagcacactgggggctggcgtgtacgtcttggcaggtgaggttgctaaagcagactcaggaccatctatcgtcgtatccttcctcatcgctgctctcgcatctgttatggcgggattgtgttacgcggaattcggcgcaagagtaccaaaaactggctccgcatatctgtacacttacgtgaccgtaggagagttgtgggctttcataaccggatggaatctcatcctgagttacgtcattggcacatcatctgttgccagagcatggtctggcacatttgatgagctgttaagcaaacagatcggccaattcctgagaacttacttccgcatgaactacacgggtttagccgagtaccccgactttttcgccgtatgcctcatcctgctcctagccggactgttgtcatttggggttaaagaatctgcctgggtgaataaagtgtttaccgctgtgaatatcttggtgcttctcttcgtcatggtggctggctttgtcaaagggaatgttgccaactggaaaatctccgaggaatttctgaaaaacatctccgcttcagcgcgtgaacctccctcagagaatggaacttctatctacggggcaggaggctttatgccatacgggtttactgggactctggcaggcgcagctacatgcttctacgcattcgtagggttcgattgcatcgcaacaaccggagaggaggtccgaaatcctcagaaagccataccaattggtattgtaacatctctgctggtgtgcttcatggcttacttcggcgtttctgcagcacttactctgatgatgccgtattacctgctggacgagaaaagtcccctgccagtggcatttgagtacgtgggctggggcccagctaaatacgtggtagctgccggatcactttgcgctttgtctaccagcctgcttggaagtatctttcccatgccacgagtgatctacgctatggccgaggacgggttactctttaagtgccttgctcagattaattccaagacaaagacgcctataattgccaccttatccagtggagcagtcgcagctctgatggcttttctattcgacctgaaggcactggtggacatgatgtccatagggaccctgatggcttactctctggttgccgcttgtgttcttattcttaggtaccaacccggactatcctacgatcagcctaagtgttcgcccgagaaagacgggctcggctcttctccaagggtgacctcaaagtccgagagtcaagtgacaatgcttcagcggcaaggcttcagcatgagaacactgttctgtccgagcctattacctacccagcaatcagccagcctggtgtccttcctggttgggtttttggcttttctagtcctgggcctgagtgtcctgaccacctacggagtacacgcaattacgcggctggaagcgtggagcttagcgctactcgccttgtttttagtacttttcgtggcaattgtgctgaccatctggaggcagccccagaaccagcaaaaagttgctttcatggttcccttcctcccctttctgcccgctttttctattctggtcaacatctatctgatggtgcagttatccgctgatacctgggtaaggttcagcatctggatggccatcggctttcttatctatttttcttatggaattcgccatagcctcgaaggacacctgcgagacgaaaataacgaagaggacgcctatcccgataatgttcacgcagccgcagaggagaagtccgccatccaagccaacgaccatcaccctcgcaatctctcgtccccatttatatttcacgaaaagacgagtgagttttag

SEQ ID NO: 241824 - DNA, 1977 bp, synthetic construct
  misc_feature 1..1977: note = Description of Artificial Sequence: Synthetic coding sequence
  source 1..1977: mol_type = other DNA
atgattccatgcagagcggctctgactttcgctagatgtcttatccgaaggaaaatagtgaccctggattccctggaagatactaaactgtgccggtgtctcagtacaatggatctgatcgccttgggggttggtagcactctgggcgcaggcgtctacgtgctagcgggagaggtagcaaaggctgacagtggcccttccatcgtggtgtcctttttgatagcagccctcgcaagcgtgatggccggattatgctatgccgaatttggagctcgggtccctaagactgggagcgcctacttatatacatatgtcactgttggcgagttatgggcattcatcaccggctggaaccttatcctgagttatgtaatcgggacctcttctgttgcgagggcatggagcggcaccttcgacgaactcctgtcaaagcaaattggccagttcctacgcacctactttaggatgaattacactggactagctgaataccccgatttcttcgccgtttgtctgatcctgttgctggccggtctcctttcctttggtgtgaaggagagtgcgtgggtgaataaggtttttactgcggtgaacatactcgttctgctgtttgtcatggtggccggattcgtgaaagggaatgttgctaattggaagatcagcgaagagttcctgaagaatatttccgcctcagcacgagaaccaccgtcagagaacgggacgtcaatatacggagcagggggattcatgccttacgggttcactggcacactggccggtgcagcaacctgcttctacgccttcgtgggattcgactgcattgccacaactggcgaggaggtgaggaacccccagaaggctatcccgattgggatcgtaacctcattgctggtttgtttcatggcctacttcggagtatctgctgccctgactcttatgatgccatactatctcctcgacgaaaaaagccccctcccagtcgcttttgaatatgtcggctgggggccagcaaagtatgtcgtggccgctggcagtctttgtgctctttccacctccctgctgggaagcatttttcctatgcctagagtgatatatgcaatggccgaggacggactgcttttcaagtgtctggctcagattaattccaagaccaagacccccattatcgcgaccttgtcctccggcgcagtggccgctcttatggccttcctatttgatcttaaagcgctggtcgacatgatgtcaatcggcactcttatggcctatagcctcgtggccgcatgcgtgcttatcttaagataccagcctggactgtcttacgaccagcctaagtgttcgcctgagaaagacggactaggaagcagtcctagagtgactagtaagagcgagagtcaagtcacgatgttgcaaagacagggctttagcatgaggacccttttttgcccaagtctccttccgactcagcagtctgctagcctggtctcctttttggtgggcttcctcgccttcctagtcctgggtctgtccgtgcttactacttatggtgtccacgccataacccggctcgaggcgtggtccctggcgctgctggccctgttcctcgtgcttttcgttgcaattgttttgacgatctggagacagccccagaatcagcagaaggtcgcatttatggtgccctttctgccgttcttgccagccttttcaattctggtgaatatctacctcatggtgcagttgagcgctgacacatgggtcaggttctctatttggatggccatcggcttcctcatttatttctcatacggtataaggcatagtctggaaggccacctacgggacgagaataacgaggaggatgcatatcctgacaatgtgcacgcagctgctgaagaaaagtctgccatccaggcgaatgaccatcaccccaggaatctgtctagtccattcatcttccacgaaaagacctccgagttttag

SEQ ID NO: 241825 - DNA, 1464 bp, synthetic construct
  misc_feature 1..1464: note = Description of Artificial Sequence: Synthetic coding sequence
  source 1..1464: mol_type = other DNA
atgggcgatacaggactgaggaaacggcgagaagacgaaaaatccatccagagccaggagcctaagaccactagtcttcagaaggagctggggctcatttcagggatttccattatcgtcgggacaataattgggtccggtattttcgtgagccctaaaagtgtgctgtccaacactgaggccgtcggaccctgcctgatcatttgggcagcctgtggcgtgctagcgactcttggggcattgtgttttgcagagttgggaactatgataaccaagagcgggggtgaatatccgtacctcatggaagcttacggccctataccagcataccttttttcatgggccagcctgattgtcatcaagcccacctccttcgccatcatatgcctgtcgttttcagagtacgtctgtgcccctttttacgtcggatgtaagcccccacaaatagtagttaaatgtctggcagcagcagctatattgtttattagcactgtaaattctctgtccgttcgccttggaagctacgtccagaatattttcaccgccgcaaaactggtgatagtagctatcatcattatatcaggattggtcctacttgcacaggggaataccaagaacttcgacaacagttttgagggcgctcagctttccgtgggagcaatctccctggccttttacaacggcctttgggcctatgacggctggaaccagcttaactatattactgaagagctacgaaacccttaccggaatttacctcttgccattataattgggatccccctggtgaccgcctgttacatcttgatgaatgtgtcttacttcaccgtgatgacagcaactgagctgctgcagtcccaagcggtggccgtgacattcggggaccgcgttctgtaccctgcaagctggattgtgccactcttcgtggctttctcgacaatcggcgctgccaacggtacatgcttcactgccggtcgcctaatctatgttgccggtcgggaaggacacatgctgaaagtactgagctatatctcggtccggcgactcacccccgcaccggctatcatattctatggaatcatcgcaaccatttacatcatccctggggacataaactccctggtgaactactttagtttcgccgcttggttattttacggactgacgatactgggactgatcgtcatgcgattcactagaaaggaactggaacgcccaatcaaagtgccagtggtgatccctgtcctgatgacccttatctccgtctttttagtgctggccccaattatctcgaaacctacctgggagtatctgtattgcgttcttttcatcctcagcggcttgctcttctatttcctgtttgttcattataaattcggttgggctcaaaaaattagcaaacctataactatgcacctgcagatgctgatggaggtcgtgcctccagaagaggatcccgagtag

SEQ ID NO: 241826 - DNA, 1464 bp, synthetic construct
  misc_feature 1..1464: note = Description of Artificial Sequence: Synthetic coding sequence
  source 1..1464: mol_type = other DNA
atgggcgatacaggcctgcgtaaacggagagaggatgagaaaagcatccagtcccaggagccaaagacgacctccttgcaaaaagaactgggccttatcagtgggatatccatcatcgtcgggaccatcatcgggtccggaatttttgtgagccctaagagcgtcctttcgaataccgaggcagtgggaccctgtttgatcatatgggctgcctgcggggttctggcaacactgggtgcgctatgttttgctgaactcgggactatgattacgaagagtggcggagagtatccgtacctcatggaggcttacgggcctattccagcatacctcttttcctgggcgagtctgattgtgataaaacctactagctttgctataatatgcctgagtttctcagaatacgtgtgtgcccctttttacgtgggatgtaagcccccacagatcgtcgtcaagtgccttgctgccgcagctatcctgttcataagcaccgtaaattcactgtctgtgcgacttggaagctacgttcagaacattttcacggcggcaaagctcgttatagtggccattattattattagtggattggtgctgctggcgcagggtaacactaaaaatttcgacaactcttttgaaggggctcagctgtctgtaggcgcaatctcactggctttctacaacggcctctgggcctatgatggctggaaccagctcaactacattaccgaggagctgcgcaacccctacagaaatctgcccctcgccattatcattggcatcccattggtgacggcatgctatattcttatgaacgtctcgtattttactgtcatgacagctaccgaattgttgcaaagccaggccgtggccgtcacattcggtgacagggtcctttatccagcctcttggattgtccccctgttcgttgcgttttctacaatcggcgctgccaacggaacatgctttactgccggaaggctcatttatgtggcaggcagagagggacatatgttgaaggtcctcagctacatatctgtgcgcagactgaccccagctccagcgatcatcttctacggaatcatagccaccatctatatcattcctggcgatattaacagtctcgttaactacttctctttcgccgcatggctcttttacggcttaaccattctgggcttgatcgtaatgcggttcacgcggaaggagctggagagacccattaaagtgcctgtcgtcatcccggtgctgatgactctcattagcgtgtttctcgtcttggccccaattatatctaagcccacctgggaatacttgtattgtgttctatttatcctatcgggcctcctgttttactttctgttcgtgcactataagtttggctgggctcagaagatttctaaacctattaccatgcacctgcaaatgctgatggaagttgtgccccctgaggaggatccagagtag

SEQ ID NO: 241827 - DNA, 1908 bp, synthetic construct
  misc_feature 1..1908: note = Description of Artificial Sequence: Synthetic coding sequence
  source 1..1908: mol_type = other DNA
atggccagagggctccccacaattgcctcacttgccagattgtgtcagaagcttaacagactaaaacctctagaggattctacgatggagacaagcctccggaggtgtctgtcaactctagatctcacgctcctcggcgtcgggggaatggttggcagcggcctctacgtacttaccggggctgtggctaaagaagtcgccggtccggcagtgttgctatcctttggggtcgctgcagttgcctccttattagccgcactctgctatgcagaatttggagcacgtgtcccccgaacaggcagcgcatacctgttcacatatgtctccatgggggagctatgggcctttctcattggttggaacgtgttgctagaatacataattggaggggctgctgtcgcaagggcttggtccggatacctggattcaatgttctcacattccatcaggaacttcactgagacgcacgttggttcctggcaggtgccattgctgggacactatcccgattttttagctgcgggaattattctgctggcctcagcctttgtaagctgcggagctcgggttagcagctggttaaaccatacattcagcgccatatctctcctggttattctctttatcgtgatcctgggattcattctcgcccaaccgcacaattggagcgcggacgagggaggattcgccccttttgggttcagtggagtcatggctggaactgccagctgcttctacgcttttgtcggcttcgacgtgatcgctgctagtagcgaggaagcccaaaacccacgacgcagcgttcctcttgccattgcgatctctcttgctatagccgctggcgcatacatcttggtgtctaccgtgctcaccttgatggtgccctggcacagcttagatcccgacagcgccctcgcggatgcgttttaccagaggggctacaggtgggccggttttattgtggcagccggaagtatttgcgccatgaatacggtgctgctgtctctgctgttctccttacctaggatagtgtatgctatggctgcagatggattatttttccaggtattcgctcacgtgcacccgagaacccaggtgcccgtagccggtaccctagcattcgggctgctaaccgccttcctggccctgctgctggacctagagtcccttgtgcaattcctgtctttgggaaccttgctggcctatactttcgtcgctacatcaatcattgtgctccgcttccagaaatccagcccaccctccagtcccggacctgcctcacctggacctttgacaaagcaacaaagcagcttttccgatcacttgcagctggtgggcaccgtgcacgcttccgtccccgagccgggagaacttaagcccgctttaaggccctatttgggctttctggatggatactcacccggagctgtggttacgtgggccctcggcgtcatgctggcatccgcgatcactatcggctgtgttctggtcttcggtaacagcaccctgcacctgccacactgggggtatatcctgctgctcctcctgacctctgtgatgtttttgctatccctcttggtcttaggcgcacaccagcagcagtaccgcgaagacctatttcagatccccatggtgccactcattcctgccctatctatagtgctgaacatatgtctgatgctgaagcttagctacctgacctgggtgaggttctctatctggctactcatgggcctggccgtgtattttggttatggaatccgacattcaaaggagaaccaacgtgaacttcccggtttaaactccacgcactatgtggtctttcccagaggcagcctcgaggagactgtgcaggcaatgcagcctccgagtcaagctcctgcacaggatccaggacacatggagtag

SEQ ID NO: 241828 - DNA, 1908 bp, synthetic construct
  misc_feature 1..1908: note = Description of Artificial Sequence: Synthetic coding sequence
  source 1..1908: mol_type = other DNA
atggccagagggctgcctaccatagcttctctagcaaggttgtgccaaaagctcaatcgattgaaacccctcgaagactctacgatggaaaccagcttgaggcggtgcctgagcactttggacctaacactgctgggcgttggcggaatggttgggtccgggttatacgtactgacgggagccgtggcaaaggaagtggctgggccagctgttctgttgtctttcggagtggccgctgtcgccagcctgttagccgctctgtgttacgcggagtttggcgctcgcgttcctcgcacagggtccgcttatttattcacatacgtttccatgggtgagctgtgggcttttctgattgggtggaatgtgctgctggagtatattatcggcggtgcggctgtcgccagagcgtggtctggatacttggatagcatgttctctcacagcatcaggaattttaccgagactcacgtcgggtcttggcaggtgcccctgctgggacattatcccgacttcctcgccgcaggcattatcctgctggcatctgctttcgtgtcatgtggggctcgagtaagctcttggctcaatcacaccttctcagccatcagtctcctggtgatactcttcatcgttatccttggctttatcttggctcaaccgcataactggagcgctgacgaaggaggtttcgccccattcggattctccggggtgatggcgggaaccgctagctgcttctacgcattcgtggggttcgatgtcatcgcagcaagctccgaggaagcacagaatccccgtcgatcagtgcccctggccatcgcaatttcactcgccattgccgctggcgcttacatactggtgtccaccgtgctgacacttatggtgccatggcactccctcgatccggattcagctctggcagacgctttctaccagcgtggctatagatgggcgggttttatcgtggcagccggaagcatatgtgctatgaatacagtgcttctgagtctcttattcagccttcctagaattgtttacgcaatggcagccgacgggctcttcttccaagtgttcgctcatgtccatccaaggacacaggtgcccgtggccggaaccctggcttttgggctgctgactgccttcctcgcactcctgctcgacctggagtctcttgtccaattcctcagcctcggaacactgctggcatatactttcgtggctactagcatcatagttctccggtttcagaaaagctcacctcctagctccccaggccctgcctctcctggaccgctgactaaacagcagtcatccttctcggaccacttacaactggtgggtactgtgcacgcttctgtaccagagccgggagaactgaaaccagccttgcggccatatttaggttttctggatggatacagtccaggcgctgtggtgacctgggcccttggcgttatgctcgcaagtgccattaccatcggatgcgtgctggtgttcggcaattctaccttgcatcttccccattggggctatatccttcttttgttattaacatccgtgatgttccttctgtccctgctggtactcggagcacaccagcagcagtatagggaggacttattccagattccaatggtgcccctcataccagcgctctcgatcgtgttaaacatatgtctaatgttgaaactgtcctatttgacatgggttagattctcaatctggctgctgatggggcttgccgtgtactttggctatggtatacgacatagtaaggaaaatcagagggagctccccggactgaactccacccactacgtagtgttcccaagagggagtttagaagaaactgtgcaagcaatgcagccaccgtcacaggcacccgctcaggatccaggacatatggagtag

SEQ ID NO: 241829 - DNA, 249 bp, synthetic construct
  misc_feature 1..249: note = Description of Artificial Sequence: Synthetic coding sequence
  source 1..249: mol_type = other DNA
atggccagaggcctgccaactatagcctccctggcaaggctgtgccaaaagctgaatagactaaagccccttgaggattccaccatggaaactagcctccgtcggtgtctttcaacactcgacttaaccctgctgggcgtgggtggaatggttggctctgggttgtatgtgctgacaggcgctgtggctaaagaagttgccggacccgctgtactgctctccttcggcgtagcagcagtggcctcttag

SEQ ID NO: 241830 - DNA, 2922 bp, synthetic construct
  misc_feature 1..2922: note = Description of Artificial Sequence: Synthetic coding sequence
  source 1..2922: mol_type = other DNA
atgtataacatgcgaagactcagccttagcccaaccttttcaatgggattccatttgctcgtaaccgtttccctgctgttcagccatgtcgatcatgttatcgctgagactgaaatggaaggcgagggaaacgagactggagagtgtaccggatcctactactgtaagaagggagtgatccttccaatatgggagccacaggatccaagttttggggataagatcgccagagctacggtctactttgttgcaatggtgtatatgttcctgggcgtgtctataattgccgacagattcatgtctagcatcgaggtgataacctcccaagagaaggagatcacaattaagaagcccaatggagagactacaaaaacgacagtccggatctggaacgagactgtgagcaatctgaccctcatggcccttggctccagtgcccctgagattctgctgagtgttatcgaagtgtgcggtcacaacttcactgccggagacctggggccttccacaatcgttggaagcgccgcatttaacatgtttataatcatagcattgtgcgtttatgttgtgcccgacggagagacacgaaaaattaagcacttgcgcgtctttttcgtgacagcagcctggtccattttcgcttacacatggctgtatataatcttgagcgttattagcccaggcgttgtcgaggtgtgggaaggcctgttgactttctttttcttcccaatctgcgtcgtgttcgcttgggttgcagaccggagactgttgttctacaagtacgtatacaaaagatacagggccggtaagcagaggggaatgattattgagcacgaaggcgatcgtccctcaagcaaaaccgaaatcgagatggacggcaaggtagtgaacagtcacgtagagaatttcctggacggcgctctggtcctcgaagttgatgaacgggaccaggacgacgaggaggcgcgtagagaaatggcaaggatacttaaggagttaaagcagaagcaccctgataaggagattgagcagctgattgagttagctaactatcaggttctcagtcagcagcagaaaagcagagctttttatcgaatacaggctaccagactcatgaccggcgctggcaacattctgaagagacatgccgcagaccaggctcgcaaggctgtgagtatgcatgaggtcaacactgaagtgactgaaaacgaccccgttagtaagatctttttcgagcagggtacctaccagtgcttggaaaactgcgggacagtggctttaacaatcatcaggcgcggaggcgatctaacaaataccgttttcgtcgattttaggactgaagatggcacagcgaacgctgggtctgattatgagttcactgaggggactgtggtctttaagcccggtgacactcagaaagagatacgggtgggcattatcgatgacgatatatttgaagaggatgagaacttccttgtccacctcagtaacgtcaaagtttcttccgaggcatccgaggatggtatcctcgaggccaaccacgtgagtacactggcatgtttgggctcaccgtcgactgcaaccgtcacgatttttgatgacgaccacgccggtatattcactttcgaagagccagtcacacacgtttccgagtctataggtatcatggaagtaaaggtgcttagaacaagtggagctcggggaaatgtgatcgttccttacaagaccatcgagggcacagctcgtgggggtggcgaggacttcgaggacacgtgtggagagctagaattccaaaatgatgagatcgtcaagaccatatctgtaaaggtaatcgacgacgaggagtatgagaagaacaagactttctttctcgagattggcgagcccagactggtcgaaatgtcggaaaagaaagctcttctactgaacgagctgggcggtttcacgataacgggcaaatatctgtttggtcagcccgtgttcaggaaggtgcacgcaagggaacaccctatactgagcacggtcattacaatcgccgatgaatatgacgataaacagcctctgaccagcaaggaggaggaagaacgcagaatcgccgaaatgggccgtccaatcctgggcgaacacactaagctggaggtgatcattgaggaatcttatgaattcaagagtacagtagacaagctgataaaaaaaactaacctggccctggttgtcggaactaacagctggcgggaacaatttatcgaagccatcaccgtgtctgcgggagaggatgacgatgatgatgaatgtggagaggagaagctgccctcttgtttcgattatgtcatgcacttcttaaccgttttctggaaagttcttttcgccttcgtgccgccaaccgaatattggaatggctgggcatgctttatcgtttcaatccttatgatcggcctgctcacagccttcatcggggatttggcttcacacttcggctgtaccataggcttaaaagattcagtgactgccgtcgtgtttgtggccctgggcactagtgtcccggataccttcgcctctaaagttgccgcaacccaagaccagtacgccgacgcttcaatcggcaacgtcactgggtccaacgcggtgaatgtcttccttggtattggcgtggcctggagtatagctgcgatttaccacgccgctaacggagagcagttcaaggtgtcccccggtactcttgcatttagcgtgacactatttaccatttttgcatttatcaatgtcggagtacttctgtacagacggcgtccagagatcggtggggagctcgggggacctcggaccgctaaactcctcaccagctgcctgtttgtgctcctgtggttgttgtacatttttttttcatccctggaagcttactgccatatcaagggcttttag

SEQ ID NO: 241831 - DNA, 2922 bp, synthetic construct
  misc_feature 1..2922: note = Description of Artificial Sequence: Synthetic coding sequence
  source 1..2922: mol_type = other DNA
atgtataacatgcgcaggctgtctctttcaccgacatttagcatgggattccatcttctggtcacagtgtccctcctcttctcccatgtcgatcatgtgatcgccgagacagaaatggagggcgagggaaacgaaactggggagtgcactggatcttactactgcaaaaaaggagtcattctcccaatctgggagcctcaggacccctctttcggcgacaaaatcgccagagctaccgtatacttcgttgccatggtttacatgttcttgggagtgtctattatcgccgataggtttatgtcctcgattgaggttatcacatcccaggagaaggagataaccattaagaagcccaacggggagaccaccaagactactgtccgaatttggaacgaaaccgtcagtaatctcacactcatggcactcggatctagtgccccagagattcttctgtccgtaattgaggtgtgtggccataacttcacagccggagacctgggcccatccactattgtgggcagcgccgcttttaacatgttcatcatcatagcactgtgtgtgtatgtagtcccagacggtgagaccagaaagatcaaacatctgagagtgttctttgttaccgccgcttggtcaatcttcgcctatacctggctctatatcatactatcggtaataagccctggcgtggttgaggtctgggaaggcctgctaactttcttcttcttccccatctgcgtagtgtttgcctgggtagcagatcgtcggcttcttttttataaatacgtgtacaaacggtaccgcgcaggcaaacagagaggcatgatcatcgagcacgaaggtgatcggccatcaagtaaaacagaaatcgagatggacgggaaagttgttaactcccatgtagaaaacttcctggacggggctctggtcctggaagtggatgaacgggaccaggacgatgaggaggccaggagagaaatggccaggattctcaaggaactcaagcaaaaacatcccgataaggagattgagcaactcattgaattagctaattatcaggtgttatcccagcaacagaaaagccgcgctttttacagaatacaagcgacgagactcatgacaggagcaggaaatatcctcaaacgtcacgctgccgaccaagctcgtaaagctgtgagcatgcatgaggtgaacacagaagtgaccgagaacgacccagtttccaaaattttttttgaacagggaacttatcagtgcctagaaaattgtggtacggtagcgctgactattatccgcaggggcggagatcttacaaacactgtattcgtggacttccggacagaagatggcactgcaaacgctggatcagactatgaattcactgaaggaacagttgtgtttaagcctggggatactcagaaggagatacgggtcggaatcattgacgatgacatctttgaagaggacgagaatttccttgtacatctctctaacgtgaaggtgagcagcgaggcttccgaagatggcatcttagaagccaaccacgtctctacccttgcatgtttgggttccccatctactgccacggtaacgatctttgatgacgaccacgccggaattttcaccttcgaggaacccgttacccacgtatctgagagcattgggatcatggaggtgaaggttctgcgcacttccggagcaaggggaaacgtcatagttccttacaaaactatagaagggactgctcgaggcggtggcgaagatttcgaggacacgtgcggagagcttgagtttcagaacgatgagattgtcaagaccatctctgtgaaggtcatcgacgacgaggagtacgagaaaaacaaaaccttcttcctcgaaattggcgaacccaggctcgtggaaatgtcagagaaaaaagcactattgctgaacgaactgggtggctttacaatcactgggaagtacttgtttgggcagcctgtcttccgcaaggttcacgctcgggaacaccctattcttagcactgtcatcacgatcgcggacgagtatgatgacaagcagcccctaacgagcaaggaagaagaggagcgccgtattgccgagatggggcgaccgattctgggggagcacactaagttagaagtcataatcgaagaatcctacgagtttaaatctactgttgataagctgatcaagaagaccaatctggcgctcgttgtaggcaccaattcctggcgtgagcagtttatagaggccattaccgtctcagccggagaagacgacgatgacgacgaatgtggggaggagaaactaccctcgtgctttgactatgttatgcacttcctaacggtattttggaaggtactcttcgccttcgtgccccctaccgaatactggaatggctgggcctgctttatcgtgtctatcttaatgatcgggctgttgaccgctttcatcggggacttagcttcacatttcgggtgtaccatcggactaaaagatagtgtgaccgccgtagtattcgtggccttgggcactagtgtacctgacacctttgctagcaaggtggccgctactcaagatcaatatgctgacgccagtatcggaaacgtgaccggctcaaacgccgttaacgtttttctggggattggagtggcttggtccatcgccgcaatctatcatgcagctaacggagagcaatttaaggtgagccctggaactctggcgttttcagtgaccctcttcacaatctttgcttttatcaacgtcggcgtcctcctgtatcgtaggcggcctgaaatcggtggcgaacttggcggaccgagaaccgccaaactcctaacgtcttgtctattcgtccttctctggctgttgtatatattcttctcaagtttggaagcttattgtcatattaaaggcttttag

SEQ ID NO: 241832 - DNA, 2814 bp, synthetic construct
  misc_feature 1..2814: note = Description of Artificial Sequence: Synthetic coding sequence
  source 1..2814: mol_type = other DNA
atgtacaacatgcgacgtcttagcctgagcccaacatttagcatgggatttcacctgttagtcaccgtctccctgctgtttagccacgtggaccacgtgatagcggagactgagatggagggcgaggggaatgagaccggagaatgcacgggcagctattattgtaagaaaggagtgatcctacccatctgggaaccccaggaccccagcttcggggacaagattgccagggccacggtgtactttgtggccatggtgtatatgtttttaggtgtgtccatcatagctgacaggtttatgagttctatcgaagtgattacatcacaggagaaggaaattacaattaaaaagccgaacggggagactactaagacgacggtgagaatatggaacgagactgtttccaacttgaccctgatggcattaggcagcagtgctcccgaaatacttctttcggtcatcgaagtctgtggccacaactttactgctggagacttaggcccttcaactatagtggggtccgccgcatttaacatgtttataatcatcgcactgtgtgtgtatgtggtacccgatggggagactcggaaaataaaacacctgagggtgttcttcgtaacagccgcttggtctatttttgcttatacttggctttacataattctttctgtaatttccccaggcgtcgtggaggtgtgggaaggccttctcacgttttttttttttcccatttgcgtcgtgttcgcctgggtcgcagacagacgtctcctcttctacaaatatgtatacaaacggtatagggccggaaagcaacgtggcatgattatcgagcacgaaggcgacagaccttcatctaaaacagagatcgagatggacggtaaggttgtgaacagtcatgtggagaactttcttgacggcgcacttgtgctcgaagtagacgaacgtgaccaggacgatgaagaggccagacgcgaaatggcccgtattctaaaggagcttaagcagaagcaccccgacaaggagattgagcagttaattgagttagccaactaccaggtgctaagccagcagcaaaaatcaagggccttctacagaatccaggctacacgtctgatgacaggtgcgggaaatattttgaaaagacatgccgcagaccaggcaagaaaagctgtctcgatgcatgaagttaatactgaggttactgagaatgatcctgtatcaaagatattttttgagcaaggcacgtatcagtgcttagaaaactgcggtactgtggccttgacgataatcaggcgcggtggcgatctgactaacactgtgtttgttgactttaggacggaagatggtactgccaacgccggaagtgattatgaattcaccgaagggacagtggtattcaagcctggcgacacccaaaaggaaattcgggtgggaataatcgatgacgatatctttgaagaggatgagaactttttggtccatctgtcaaacgtgaaagttagtagtgaggcatctgaagatggcatcctggaggctaaccatgtgtctacgctcgcttgccttggcagtccaagtaccgctaccgtcaccattttcgacgacgaccatgccggtatctttaccttcgaggagcccgtgactcatgttagcgagtcaattgggatcatggaagtgaaggttctgagaacttccggcgctaggggcaatgttattgtgccctacaagactatcgaggggacggctcgcggaggcggagaggacttcgaggatacctgcggggagctcgagttccaaaacgacgaaattgtaaaaatcattacgatcaggatcttcgaccgggaggagtacgagaaggagtgctctttctctttggtacttgaggagcccaagtggatccgacggggtatgaaagggggtttcaccattacggacgagtacgatgacaagcaacccttgacctctaaagaggaggaggagcggagaattgctgagatgggtagacctattttgggcgaacataccaaactggaagttattattgaggagtcatatgaatttaaaagtaccgtagataagttaataaaaaaaacaaacctggctctggtcgtgggcaccaacagctggagggagcagtttatcgaggcaattacagtcagtgccggagaagacgatgatgacgatgagtgcggagaagaaaagctgcccagctgttttgattatgtgatgcattttttaaccgtcttctggaaggtgttgttcgcgttcgtgccccctacagagtactggaatggatgggcatgcttcatcgtgagcatcctgatgatcggactccttacagcatttattggagatctagccagccatttcggatgcaccatcggcctcaaagattccgttacagctgtggttttcgtggctcttggcacatcggtcccagacaccttcgcgtctaaagttgccgctacccaagatcagtacgccgatgccagtattggcaacgtgacaggctccaacgccgtcaatgtttttctgggaatcggcgtggcctggagcatcgcagcaatttaccatgccgcaaacggggaacagtttaaagtcagtcctggaaccttggccttcagcgtaacattattcaccatattcgcttttattaatgtaggtgttctcctctacaggagacgcccagaaattggcggagaactgggcggtccacggacagcaaagttgctgacgtcctgcctgttcgtcctgctgtggttgctatacatattttttagctcactcgaagcctattgtcatataaaaggcttctag

SEQ ID NO: 241833 - DNA, 2922 bp, synthetic construct
  misc_feature 1..2922: note = Description of Artificial Sequence: Synthetic coding sequence
  source 1..2922: mol_type = other DNA
atgtacaacatgcgaaggctgtctctctcaccaacctttagcatggggttccacttattagtcacggtttcacttctgttctcacacgtggatcacgtgattgcagagaccgagatggaaggcgaaggcaatgaaaccggggagtgcaccgggtcttattactgcaagaagggcgtaattctccccatctgggagccacaggatccttccttcggcgataagatcgcccgtgccacggtgtatttcgtggcaatggtgtacatgttcctgggggtatccatcattgcagatcgctttatgtcttcaatcgaagtaatcacttctcaagagaaagagatcaccatcaaaaagccgaacggagaaaccacgaaaacaacggtgcgcatatggaatgagaccgtgtctaatctaacgctgatggccttgggctcctccgcccctgaaattctacttagcgtgatagaagtctgcggccataactttaccgcgggagatctaggtccttctaccatcgtcggctcagcagcgttcaatatgtttataattatcgctctgtgtgtctacgtcgtgcctgacggtgaaactcgaaaaattaaacatctccgtgtgttctttgttacagcagcctggtcaatttttgcctatacctggctctacattatcttatccgtcatcagccctggtgtggtcgaggtctgggaaggcctgcttacttttttcttttttcctatctgcgtggtctttgcatgggttgcagataggcgacttttattttacaagtacgtctacaagcggtaccgcgctgggaaacaaagggggatgattatcgaacacgaaggcgataggccctccagcaagacagagatcgagatggatggaaaggtagtcaactcccacgttgagaattttctggacggagctctagtcctggaagtagatgaacgcgaccaggacgacgaagaagccaggcgtgagatggctcggatactgaaagaactgaaacagaaacatccggacaaggaaatcgagcagctgatagagctggccaactaccaggttctctcccagcagcaaaaatccagggccttctatcggattcaagcaactcgccttatgacgggggctgggaatatcctcaagagacatgcggcagatcaggcgaggaaggccgtttcaatgcacgaagtgaacactgaggttaccgaaaacgatcctgtaagcaagatctttttcgagcaaggcacataccagtgcctcgaaaactgcgggactgttgccttgaccataattagacgcggaggcgacttgactaatactgtgtttgtggacttccgtactgaggacggcactgcaaacgcaggttctgattacgaattcacagagggtactgttgtgttcaaacccggagacacacagaaggagattcgcgtggggattatagacgacgatatctttgaagaggacgagaatttcctggttcacctcagtaacgtaaaggtcagttccgaggcaagtgaggacggcatccttgaagccaaccacgtttccaccttagcctgtcttggctctccttctactgccacagtcacaatcttcgatgacgatcacgcaggcatctttacgtttgaggaacccgtgacccacgtgtccgaaagcattggaatcatggaggtcaaggtcttgagaacctcaggggcacgcggtaacgttattgtgccttataagaccatcgaggggaccgccaggggtggcggagaggactttgaagacacatgtggcgaacttgagtttcaaaatgacgagatagtgaaaacaatttcagttaaagtgatagatgatgaggaatacgaaaagaataaaaccttcttcttggagatcggtgagcccaggcttgtggaaatgtccgaaaagaaggcactgctcctgaatgagctcggaggatttaccattaccgggaagtatttgttcggccagcctgtgtttcgcaaggtgcacgccagagaacaccccatcctgtctacggttatcacgattgcggacgaatacgatgacaaacagccgctgacctcaaaggaggaagaagagaggagaattgctgagatgggaaggcctatccttggcgagcataccaagcttgaagtcattattgaggagtcttacgaattcaagtctaccgtcgacaaactgatcaaaaaaactaacctggcattagtggtcggaacaaacagctggagggaacaatttatcgaggcaatcaccgtcagcgcaggcgaagatgacgatgacgatgagtgtggagaagaaaagctaccctcttgcttcgattatgtgatgcactttctgactgtcttctggaaagtcctctttgccttcgtgccccctactgaatactggaacggatgggcctgtttcatcgtctcaatactgatgatcggccttctcactgcgtttattggcgatctggcaagccatttcggctgtaccattgggctgaaagacagtgttaccgccgtcgtgttcgtggccctggggacgtcagtccccgacacatttgctagtaaagtggcagcgacacaggaccagtacgcagatgcctcgatcggaaatgtaaccggatcaaatgcagtaaacgtttttcttggcatcggcgtggcctggagtattgcagctatctatcatgctgctaatggtgagcaattcaaggtgtctcccggaacactggccttcagcgtgacactctttacgatattcgcttttatcaatgtaggtgtgctgttatatcgaagacgccctgagatcggaggcgagctaggaggccctcggacggccaaattgctcactagctgcctgttcgtgcttctctggctgctgtacattttcttctctagcttggaggcatattgccatatcaagggcttttag

SEQ ID NO: 241834 - DNA, 2814 bp, synthetic construct
  misc_feature 1..2814: note = Description of Artificial Sequence: Synthetic coding sequence
  source 1..2814: mol_type = other DNA
atgtacaacatgcgtagactatctttgagcccaacattctcaatgggattccatttgttagtgacggtatcactgttattttcccacgtggaccacgtgattgctgagacagagatggagggagaaggaaacgaaaccggtgaatgtacagggtcttactactgcaagaagggagtgatactgcctatttgggagccgcaggacccttctttcggggataagattgccagagccacagtctattttgtggcaatggtgtacatgttcttgggggtcagcatcattgccgatcgctttatgagtagcattgaagttatcacctcacaagagaaggagatcacgatcaagaaaccgaacggagaaacgaccaagactaccgtccgtatttggaacgagaccgtttcaaacctgacactcatggctctgggaagttcagcccctgaaatcctgctaagcgtcatcgaggtctgtggtcacaacttcacggccggagacctgggcccatcaacaattgtcggctcagccgcttttaatatgtttatcatcatcgccctctgcgtctacgtggttcccgatggggaaactagaaagattaagcaccttcgtgtgttcttcgtgacagcggcatggagcatttttgcgtacacctggctgtacatcatcttatcagttatcagtcccggagtggtggaagtgtgggagggtctcctcacctttttcttcttccctatatgcgtggtgttcgcctgggtcgcggacagacggcttttgttctataaatatgtgtacaagcggtatcgggctggcaaacagcggggtatgattattgagcacgagggagaccgaccatcatcaaaaacagaaatcgagatggacggcaaggtcgtcaacagtcatgtggagaactttctggatggtgcgctggtgctagaggtggatgagagagaccaagatgacgaagaggcacgccgagagatggctcgcattctgaaggaactcaagcagaaacatcccgataaggaaattgaacaactgatcgagctggccaattaccaggtgctgagccaacagcagaagagcagggcattctatagaattcaagccacacgcctgatgacaggggctggtaacatcctgaagaggcatgccgcagaccaggccagaaaagccgtctctatgcacgaagtgaatactgaggtgaccgaaaatgatccagtgtccaagatcttcttcgagcaggggacgtaccaatgcctcgaaaactgcggcaccgtcgcactcactataatacggaggggtggcgaccttaccaatactgtctttgtggattttcggaccgaagacggaaccgccaatgctggcagcgactacgaattcactgagggaacggtggtctttaagccgggagacactcagaaagaaattcgggtcggtatcattgacgatgatattttcgaagaggatgaaaattttctggtgcacctcagcaatgtcaaggtcagcagcgaggcatccgaggatgggattctggaggcgaaccacgtctcgactctggcctgtctgggctcacccagtacagctaccgtgaccatatttgatgatgatcacgccggtattttcacgttcgaggaacccgtgacacatgtcagcgagtctatcgggattatggaggtgaaagtcctacgcaccagtggagcacgcggtaatgtgattgtgccatataaaacaatcgaggggacggccaggggaggcggagaagactttgaagacacttgcggagagttagagtttcaaaacgatgaaattgtgaagatcattacgattaggatttttgaccgtgaagagtacgaaaaggagtgtagttttagcctggttctcgaggagcccaagtggattcgtcgaggcatgaagggagggttcacaatcacagatgagtatgatgacaaacaacctttaacatccaaagaagaggaagagcgcagaattgccgagatgggtcggccaatcctgggggagcacaccaaactcgaggtgattatcgaggaaagttatgaattcaagtccacagtggataagctgatcaagaaaaccaacctggccctagtcgtaggaacaaatagctggagagaacagttcatcgaggcaattactgtcagtgctggtgaggacgacgacgacgatgagtgtggcgaagaaaagttaccgagttgttttgattatgtgatgcacttcctgacagtgttctggaaggtcctcttcgctttcgtccctcccactgaatactggaacggctgggcatgttttatcgtgtcaatcttaatgattggcttacttacggctttcattggcgacctggcatcccacttcggctgcaccataggcctgaaggactcagttacagcagtggtcttcgtagctctgggcacctctgtgcctgacacattcgcttcaaaggtggccgctacacaggaccaatatgctgacgcctcaattggcaacgtgacaggcagcaacgccgtcaacgttttcctaggtatcggagtcgcctggtctatcgctgccatataccatgccgcaaacggcgagcagttcaaagtttcacccggaacactcgccttttctgtgaccctgttcacaattttcgccttcataaacgttggggttttactctacaggcgtcggccagaaatcggcggtgaattgggtggaccccgtacagccaaactgctcaccagctgcttgttcgttttgctctggctgctctatatcttcttctcttccctcgaggcatattgtcacatcaaaggtttttag

SEQ ID NO: 241835 - DNA, 2907 bp, synthetic construct
  misc_feature 1..2907: note = Description of Artificial Sequence: Synthetic coding sequence
  source 1..2907: mol_type = other DNA
atgtataacatgcggagattgtccctgtctcctaccttctccatgggctttcatctgctcgttaccgttagcttgttattcagccacgttgatcatgtcatagcggagactgaaatggaaggcgaagggaacgagaccggcgagtgtaccgggtcatattactgcaaaaaaggggtcattctgccaatttgggagccgcaagacccaagctttggagacaagatcgcccgtgctacggtgtactttgtcgccatggtctatatgttccttggtgtttccatcatagctgataggtttatgtcttcaatagaggtcattacttctcaggagaaggaaatcacaatcaaaaaacctaacggggaaacaaccaagaccacggtccggatttggaatgagacagtaagtaacctgacattgatggctctaggttccagtgcccctgagattttgctttctgtaatcgaagtgtgtggacacaactttaccgctggcgatttaggcccatcaacaatcgtaggcagtgctgccttcaatatgtttattatcatagctctttgcgtctatgtagtgcccgacggcgagacaagaaagattaagcacctgcgggtgttcttcgtaactgccgcatggtccatattcgcttatacgtggttgtacattattctctccgtaatctcaccaggggtagtagaggtgtgggagggcctactgacctttttcttcttccccatctgcgtcgtatttgcctgggtcgccgacagacggctgctgttttacaagtatgtttacaaaaggtaccgcgcaggcaaacaacgcggaatgattatcgaacatgagggagacagaccatcatccaagactgaaatagaaatggacgggaaggtagtgaactcgcacgttgaaaactttttggatggagcactggtacttgaggtggacgaacgggatcaggacgacgaagaagcaaggcgggagatggccaggatacttaaagagctaaagcagaagcacccagataaagagatcgaacagctgattgagttggccaattaccaagtcctgtcacagcagcaaaagagccgagcattctaccggatccaagccacaaggctgatgacgggtgcgggaaacattttgaaacgacacgctgcagatcaggcaagaaaagccgtgagtatgcacgaagtaaatactgaggtgacggagaacgacccagtgagtaaaattttctttgagcaaggcacgtatcaatgccttgagaattgtggcacagtggcgcttacgataatcaggcgcggtggggacctaacgaacaccgtgtttgttgattttcggacagaggacggcaccgccaatgcagggtccgactatgagtttaccgaagggacagtagtttttaagcctggggatacacagaaggaaatcagagttggtatcatcgatgacgatatttttgaagaagacgaaaacttcctggtgcacctgagcaatgtcaaggtgtcctccgaagccagcgaggatggcatacttgaagctaatcacgtctccaccctggcctgtttgggaagtccctcgacagctacagtcaccatcttcgatgacgaccacgctgggatcttcactttcgaagaacccgtgacccacgtcagcgagagtattggaatcatggaagtaaaagtactgaggacatctggtgccagaggcaatgttattgtcccgtacaaaactattgagggaacagctcgcggaggcggagaggactttgaagatacatgtggggaacttgaatttcagaacgacgagatagtcaaaaccatttccgtcaaggtgatcgatgatgaagagtatgaaaagaataagaccttcttcctggagatcggcgaacctcggctggtcgagatgtctgaaaaaaaggcccttctgcttaacgaactgggcggatttacaatcaccggacaaccagtctttcgaaaagtccatgcgagggaacaccccattctgtcaactgtgataaccattgcagacgagtacgatgataaacagccattgaccagtaaggaggaggaagagcggagaattgctgaaatgggcaggcccatacttggcgaacatacaaaacttgaggttattattgaggagagctatgagttcaaaagcacagtggataaactgattaaaaagactaatcttgccctggtggtgggcactaactcctggcgagaacagtttattgaagcaatcacagtgtccgccggagaagacgatgacgacgatgagtgtggtgaagagaagctgccctcatgtttcgactacgtgatgcacttcctgaccgtgttttggaaggtgttgttcgcatttgtcccgcctacagagtactggaacggatgggcatgcttcattgtgtccatattaatgattggcctcctaaccgcttttattggggacctggcgagccatttcggctgcaccattgggctaaaggacagtgttaccgccgttgtgttcgtagcactgggaacaagtgtccccgacactttcgccagtaaagtcgccgctactcaagaccaatacgccgacgcttccatcggaaatgtcaccggcagtaacgcggtcaacgtgtttctggggatcggggttgcttggtcaatagccgctatctatcatgccgcaaatggcgagcagtttaaagtgtcacccggaacgcttgcgttctccgtgacactctttaccatcttcgccttcattaacgtgggcgtgctgctgtatagaagacggccagagattgggggagagcttggcggaccacgtacggctaaacttcttaccagttgtctatttgttctcttgtggctgttgtacattttttttagcagcctcgaggcctactgtcacatcaagggattttag

SEQ ID NO: 241836 - DNA, 2814 bp, synthetic construct
  misc_feature 1..2814: note = Description of Artificial Sequence: Synthetic coding sequence
  source 1..2814: mol_type = other DNA
atgtacaacatgcgacgtctctcactgtcaccaacgtttagtatgggctttcacctgctggtgacagtgagcctactgttttcccacgtcgatcacgttattgctgagaccgagatggagggcgagggcaacgaaaccggagagtgtacgggctcttattattgtaaaaagggtgtgatcctgcccatctgggagcctcaggaccctagcttcggagataaaatcgcacgtgcaacagtatattttgtcgccatggtatacatgttcttaggtgtgtccatcattgcagaccggttcatgtcctccatagaagtcatcactagtcaggaaaaagagatcactattaagaagccaaacggggaaacaactaagacaactgtgcgcatttggaatgagacagtcagcaatctcacattgatggcactgggttcttccgcccctgaaatactgctgagcgtcattgaggtgtgtgggcataattttaccgctggagatctggggccaagcacaatcgtggggagcgccgcattcaacatgtttatcattattgccctctgtgtgtatgtcgtgccagatggggaaactagaaagattaaacatctgagggtgttcttcgttacagctgcatggagcatcttcgcctacacctggttgtatatcatcctctccgtcatttcaccgggagttgttgaggtgtgggagggtctactgactttctttttctttcctatttgcgtggtgttcgcctgggtcgcagacaggcgcttgcttttttataagtacgtttataagagatatagagcaggcaagcagcgcggtatgataatcgagcacgaaggggacaggccctcgagcaaaacagagatagagatggacggcaaggtggtcaactcgcatgtggaaaacttcctggatggagccctggtgctagaagtcgacgagagggatcaggacgacgaggaggctcggcgtgaaatggcgcgaattctgaaagaattaaaacaaaagcaccccgataaagaaatagagcagctcatcgaactggcaaattatcaggttttgtcacagcagcaaaagagcagagcattctaccggattcaggcaaccaggctgatgactggtgctggcaatatcctaaaacgccacgcagccgaccaggctcggaaagctgtctcaatgcatgaggttaataccgaggtgaccgaaaatgaccctgtgagcaagatcttttttgagcagggcacatatcagtgcctagaaaactgcggtacagtcgctctgacaataatcaggcgaggtggtgatctgacaaacaccgtgtttgtggactttcgtactgaagatggaaccgcaaatgcaggatccgattacgaattcaccgaggggacagtggtgttcaaacctggggatactcagaaagagattcgcgtcggtataattgacgacgatatttttgaggaagacgaaaattttctggtgcatctctcaaacgttaaagtgtcctctgaggcgtccgaagacggaatcctggaggctaatcatgtgagtactctggcatgtctgggctccccttccacagcgaccgtgactatcttcgacgacgaccatgccggtatctttaccttcgaggagcccgtgactcatgtgtcggaatccataggaattatggaagtaaaggtgctgcggaccagcggtgcacggggtaatgtgatcgttccgtacaagacgatcgaaggtacagcgagagggggaggggaagacttcgaggatacctgcggcgagttggagttccaaaacgacgagattgtgaagattataacgatccgcatatttgaccgcgaagagtacgagaaagaatgttccttcagcctggtgctggaagagcccaagtggattcgccgtggaatgaagggagggttcaccataacagatgaatatgacgacaagcagccactcacctctaaggaagaggaggaacgcaggatcgcggaaatgggacgcccaatcctgggcgagcacaccaagcttgaggtgataatcgaagagagctacgagttcaagtccaccgttgataaattaatcaagaaaaccaacttggccctcgtggtcggaaccaattcttggcgcgagcagtttatcgaagccattacagtgtcagcgggtgaagatgatgatgatgacgagtgcggagaagaaaagttgccttcttgtttcgactacgtaatgcactttctgacagtcttttggaaggtactgttcgcctttgtacctccgacagagtattggaacggttgggcctgcttcattgttagtattcttatgatcgggctgctaaccgcattcattggagacctggcgagtcacttcggatgcacaatcggactcaaggactctgtcactgctgtggtgttcgtcgccctggggacaagcgttccagacacttttgcctccaaggttgcggcaacacaggaccagtacgctgatgcctccattggcaatgtgaccggaagcaacgctgtaaatgtattcctcggtatcggcgtagcctggtcgatagccgcaatctaccacgcagccaacggagaacagtttaaagtgtcgccgggtaccctggctttcagtgtgactctttttacgatctttgccttcattaacgtgggtgtgctcttgtacagaaggaggccggagataggcggtgagctgggaggcccacgcacggccaaactcctgacctcctgtctcttcgtgttgctgtggctactttatatttttttttcctcactggaagcttactgtcatatcaaggggttttag

SEQ ID NO: 241837 - DNA, 2814 bp, synthetic construct
  misc_feature 1..2814: note = Description of Artificial Sequence: Synthetic coding sequence
  source 1..2814: mol_type = other DNA
atgtacaatatgaggcgcctctcactgtcccctacattcagcatgggattccaccttctggtgaccgtatctctactgttttcccatgtcgatcacgtgatagctgagacggagatggaaggtgagggcaatgaaaccggtgagtgtactggttcatactactgcaaaaagggggtcattctgccaatctgggagcctcaggaccccagcttcggggataagatcgctagagctaccgtatactttgtggcgatggtttacatgtttctgggcgtgtctattatagcagacagattcatgagctccatagaagtgatcacttcgcaggaaaaggagattacaatcaaaaaacctaacggagaaactacgaaaaccaccgtgagaatatggaatgagacagtgtccaacctgacattaatggcccttgggtcttccgctccagagatattgctgtctgtcatagaggtgtgcgggcacaattttaccgcaggagacttaggccctagcactattgttggcagtgccgcattcaacatgttcataatcatcgctctgtgtgtgtacgtggtaccggacggggagacccggaagatcaagcacttacgggtgttctttgtgacagctgcatggagtatttttgcttatacctggctgtacatcattctttctgttatatccccgggagttgtcgaggtctgggaaggccttttgaccttcttcttcttccctatctgtgtggtcttcgcctgggtggccgacagaaggttgctgttttacaagtacgtttataaaaggtatcgagcagggaaacaaaggggaatgattatagagcatgagggagacagaccttcttcaaaaacagaaattgaaatggatggaaaagtcgtcaactcgcacgtggagaacttcctggacggtgctctggtcctggaagtagatgagcgcgaccaggacgacgaagaagccaggagagaaatggctcgtatcctgaaggagctgaagcagaagcaccccgacaaagagatcgagcagctgatagaactggccaactatcaggtgttaagccaacagcagaagagcagggccttttaccggatccaggccacaagactgatgacgggcgcagggaacattctgaagcggcatgctgctgaccaggctcgcaaggcagtgagtatgcacgaggtgaacacagaggttaccgagaatgaccccgtcagtaaaatcttcttcgaacaggggacttatcagtgtttagagaattgcggcacggtggcgttgaccatcatccgcagaggaggggacctgactaataccgtgttcgtcgatttccgtaccgaagatggcacggcaaatgccggatcagactatgagtttaccgaaggaactgtggttttcaagccgggagacactcagaaagaaatacgcgtgggcatcatagacgacgatatatttgaggaggacgagaacttcctggtgcatctgagcaacgtcaaagtctccagcgaggctagtgaggacggcattctcgaggcaaatcacgtgagtacactggcctgcctggggtctcccagcactgcaaccgtcactattttcgacgatgaccatgctggcatcttcacctttgaagaaccagtaacacatgtgtctgagtcaatcggtataatggaagtcaaggtattacgtacgtcaggagctaggggtaatgtcattgttccctataagacaatcgaaggaaccgcacgagggggaggtgaagatttcgaggacacatgcggggagctggaattccagaacgacgaaatcgtgaagattataaccattcgcattttcgatagggaggaatacgagaaggaatgcagcttctcactcgttctggaagaaccaaaatggatccgcagagggatgaaaggcggattcactattaccgatgaatatgacgataaacagcctctcaccagcaaggaagaagaggagaggagaatcgctgaaatgggacggcctatactcggagagcacacaaagctggaggtgattatcgaggagagttacgagtttaagtctaccgtagacaaactaattaaaaaaaccaacctggctctggttgtgggcacaaattcatggagagaacagttcattgaagccattacggtgtctgcgggagaggacgacgatgatgacgagtgcggtgaggaaaagctgccatcttgtttcgattacgttatgcatttccttaccgtgttctggaaggtgcttttcgccttcgtgcctccaactgaatactggaacggttgggcatgctttattgtgtccatactgatgataggactactgaccgcatttatcggcgacctcgctagccactttggatgcacgatcggccttaaggattcagtgactgcggtagttttcgttgcgctggggacaagcgtccccgacacctttgcctcaaaggttgcagctacgcaggaccagtacgctgacgccagcatcggtaatgtaacgggaagcaatgccgtgaatgtgttcctcggaatcggggtcgcctggtccatagccgctatctaccacgccgctaatggcgaacagtttaaagtctcacctgggacgttagctttctccgtcacattgtttacaatttttgcgttcatcaatgtgggtgtcttgctatacagacggagaccagagatcggcggagaacttgggggacctcgcacggcaaagctgctgacttcttgcttatttgtcctgctgtggctcctgtacatctttttctcttccctggaggcttactgccacatcaagggattttag

SEQ ID NO: 241838 - DNA, 1995 bp, synthetic construct
  misc_feature 1..1995: note = Description of Artificial Sequence: Synthetic coding sequence
  source 1..1995: mol_type = other DNA
atgagaaggctgtcgctgtctccaacttttagcatgggatttcacttgctggtgactgtctcactgctgttctcacacgttgatcacgtcatcgccgagaccgagatggaaggagagggcaatgaaacaggggagtgcaccggaagctactactgcaaaaagggcgtcattctgcccatttgggaaccacaagatcccagcttcggagataagattgcgagagcaactgtctattttgttgccatggtgtacatgttcttgggcgtgagtatcatcgctgaccgattcatgagtagcatagaagtaattacctctcaggaaaaggagattacaattaaaaaacccaacggcgagacaactaaaactaccgtcagaatttggaatgaaacggtcagtaacctgacattgatggctttgggctccagtgctccagagatcctgctgtctgtcattgaagtctgcggacataactttacagcgggagacctaggaccgtctactatcgtcgggtctgccgctttcaatatgtttatcatcatagccctgtgcgtgtatgtggtcccagacggcgaaaccaggaagattaaacacctgcgggtcttctttgtgacagctgcttggagtatctttgcatacacctggttatatattattctctcagtgattagcccaggggttgtggaagtgtgggaggggttgctgacttttttcttcttccctatctgcgtcgttttcgcatgggttgctgaccgcaggctgttgttttataagtacgtgtacaaaaggtaccgagcaggcaagcagagagggatgatcatcgaacacgaaggggatcgtccgagcagcaaaaccgaaatcgaaatggacggcaaggtagtgaacagccacgtagaaaatttccttgatggtgccttagtgctggaggtagacgagagagaccaggatgatgaagaggctaggagggagatggccaggattctgaaggagctaaaacagaaacacccagacaaggagatcgagcaattaatcgagcttgccaactaccaagtgctgtcacaacagcagaagtccagagccttttatcgtattcaagctacacgccttatgactggggcagggaatattctgaaacggcatgccgcagatcaggccagaaaagctgtatcaatgcacgaggttaatactgaggttacggaaaatgaccctgtaagcaaaatcttctttgaacagggaacataccagtgtctagagaattgtggtacggtagcattgaccatcatcagaaggggcggtgacttaacgaacacagtttttgtggacttccggaccgaagatggcaccgcaaatgccggatcagattacgaatttacagagggaactgtggtctttaaacctggagatacgcagaaagaaatccgcgtgggaatcattgacgacgacatcttcgaggaggacgaaaatttcctggtgcacctcagcaacgtgaaagttagcagcgaggccagcgaggatggcatcctggaagccaatcacgtgagtaccctggcttgcctcggctctccatccacagctaccgtgacaatctttgacgatgaccatgcgggaatcttcacgtttgaggagcctgtgacccacgtgtctgagagcattggaataatggaggtcaaggtgctgaggaccagcggtgccagaggcaatgtgatcgtcccgtataaaaccattgagggaacagccagaggaggaggcgaagattttgaagatacctgtggagagttggagtttcagaatgatgaaatcgttaaaacgatctcggttaaagtgatagacgatgaggagtatgagaagaataagacctttttcttggaaatcggggaaccaagattggtggagatgagtgaaaagaaggggagatcgctgcccttagaatacctcaccgtgcgaaatatgcggaaaagcgccgtgtcgccactgtgtctccggaaccagaacggctag

SEQ ID NO: 241839 - DNA, 2898 bp, synthetic construct
  misc_feature 1..2898: note = Description of Artificial Sequence: Synthetic coding sequence
  source 1..2898: mol_type = other DNA
atgtacaacatgaggagacttagtctgtctccaacgttctctatgggattccacttactggtgacagtaagcttgctgttttcccacgtggaccatgtgatcgccgaaaccgagatggagggggaagggaatgagacaggggaatgtactggctcctactactgcaagaaaggagtgatccttccaatttgggagccccaagacccctcatttggcgacaaaatcgcacgagccacagtttacttcgtcgcgatggtgtacatgttcctgggagtttcaatcattgccgaccgctttatgagttcgattgaggttataacctcccaagagaaagagattacaattaagaagccaaacggcgagacaaccaagactacagttcggatttggaatgaaaccgttagcaatctaactctaatggcactggggtcgtctgcccctgagatcctcctatccgtgatagaagtgtgtggacataattttactgccggagatctaggcccttccacgatcgtcggttccgcggctttcaatatgttcatcattatcgccctttgcgtgtatgtggtgccagatggcgagaccaggaaaataaaacatctgcgtgtattctttgttactgccgcatggagcatctttgcctatacatggctttacatcattctttcagtaattagcccgggtgtggtcgaggtctgggagggcctcctaaccttcttctttttccccatctgcgtggtgtttgcctgggtggcagaccgcagactgctgttctacaagtatgtgtataagcgttatagggctgggaaacaaagaggcatgataattgaacacgagggcgatcgcccatcgtcaaaaaccgagatcgagatggatggtaaggtggtcaatagccatgtcgagaatttcctcgacggcgctctggttcttgaggtagacgagcgggatcaagacgacgaagaagctcgaagagaaatggccaggattctgaaggaactaaaacagaagcaccctgacaaagaaattgagcagctgatcgagcttgcaaactaccaggtacttagtcagcaacaaaagtccagagcattctacaggatccaggcaacccggctgatgaccggcgcaggcaatatcctgaaacgtcacgcggctgaccaggctcgtaaagctgtatccatgcatgaagtgaacacagaggtgaccgagaatgaccccgtttctaagatttttttcgaacaggggacgtaccaatgcctggagaactgtggtaccgtggcattgacgatcatacgtagggggggtgacttgacaaataccgtgttcgtggattttcgcaccgaggacggcactgctaatgccggaagcgactacgaatttacagagggcaccgtggtgtttaaacccggagatacccagaaagagattcgcgtaggcattatagatgatgacatctttgaagaggacgaaaactttctcgtccacctgtctaatgtcaaggtttcttctgaggcctctgaagatggcatcctcgaggcaaatcacgtatctactctggcctgcttgggtagtccgtccaccgccacggtcacaatcttcgacgacgaccacgccggtatcttcacttttgaagaacccgtgacccatgtgagtgagagtattgggatcatggaggtgaaagtattgagaacttccggagctcgtggtaatgtgatcgtgccctacaaaaccatcgaagggacagctcgagggggaggagaggattttgaggacacctgcggcgagctcgaatttcagaatgacgaaatcgttaaaattataacgatcaggattttcgaccgcgaagagtacgaaaaggaatgtagcttttcactggtgttagaagagcctaaatggataaggagagggatgaagggaggctttacaatcactggaaagtacttatttgggcagcccgtcttccggaaagtacatgcgagggagcaccctattctgtccaccgttattaccatcgccgacgaatacgacgataagcagccactgacgagcaaggaggaggaggagcgccgaatcgcagaaatgggcagaccgatcctcggagaacataccaagctggaagtaatcatcgaggaaagctatgagttcaagagcacggtcgacaaactgatcaaaaaaaccaatctggccctcgtggtcggcacaaattcctggcgggagcagttcattgaggccatcacagtgtctgccggtgaggatgatgacgacgacgagtgcggcgaggagaaactcccctcgtgctttgactacgtgatgcactttcttaccgtgttttggaaagttctttttgcatttgtgcctcctaccgagtattggaacggctgggcttgctttattgttagcattctcatgattggtctccttactgcattcattggcgatcttgcctcgcacttcggctgcacaataggactgaaggactcagttaccgccgttgtgtttgtggctctgggaactagtgttcctgatacttttgcctcgaaggtcgccgcaacacaggatcaatacgctgacgcctctataggcaacgttacagggagcaacgccgtgaacgtcttcctgggcattggggtggcttggtcaattgccgctatctatcacgcggctaatggagagcagtttaaggttagtccaggcaccttagccttttctgtgacgttgtttacaatttttgcctttatcaacgtgggggtcctgctttaccgccgtcggccagaaattggaggggagttaggagggcctcgcactgccaaactactgacttcttgtttatttgtgcttctgtggctcctctacatttttttctcctccctagaagcttattgccatattaaagggttttag

SEQ ID NO: 241840 - DNA, 222 bp, synthetic construct
  misc_feature 1..222: note = Description of Artificial Sequence: Synthetic coding sequence
  source 1..222: mol_type = other DNA
atgtataatatgagacgactctccctctctcctaccttttccatgggcttccatctactcgtcactgtaagtctgctctttagccatgtagaccacgtcattgcagaaactgagatggagggagaaggtaatgagacaggggaatgcaccggaagctactattgcaagaaaggcgttatcctcccaatctgggaaccccaggatccaagcttcggggactag

SEQ ID NO: 241841 - DNA, 264 bp, synthetic construct
  misc_feature 1..264: note = Description of Artificial Sequence: Synthetic coding sequence
  source 1..264: mol_type = other DNA
atgtacaacatgcggagactcagcctgtctcctaccttctcaatgggttttcatttgctagtgactgtatctctcttgttctctcatgtggaccatgtcatcgccgagacggagatggagggagagggaaatgaaactggtgagtgtacaggttcctactattgtaaaaaaggtgtcatcctgccgatttgggagcctcaggatcccagtttcggcgataaaatcgcaagggcaaccgtctactttgttgctatggtgtactag

SEQ ID NO: 241842 - DNA, 264 bp, synthetic construct
  misc_feature 1..264: note = Description of Artificial Sequence: Synthetic coding sequence
  source 1..264: mol_type = other DNA
atgtacaatatgcggcgtctcagcctgtctccaacattctctatggggtttcacttacttgtcaccgtgagcctgctgttttctcacgtcgaccacgtgatcgccgagaccgaaatggagggtgagggaaatgagaccggggagtgtactgggagctactattgcaagaagggtgtaatcctaccgatctgggagccacaggatccctctttcggcgacaagatagccagggcaacagtatacttcgtggcgatggtatactag

SEQ ID NO: 241843 - DNA, 2883 bp, synthetic construct
  misc_feature 1..2883: note = Description of Artificial Sequence: Synthetic coding sequence
  source 1..2883: mol_type = other DNA
atgtacaacatgcgcaggttgtccttgagtccaacatttagcatgggctttcacctgctcgtgactgtgagcctgctgtttagccatgtggaccatgtcatcgcagaaacagagatggagggagagggaaacgagaccggagagtgcactggctcttattactgcaagaagggggtcatcctgccaatatgggaacctcaagatccttccttcggcgacaagattgcaagggccaccgtgtattttgtggcaatggtgtatatgttcctgggagtttcgatcattgcggacagattcatgagttctatagaagtcatcacctcccaagaaaaagagataactataaaaaaaccaaatggggaaacaaccaaaacaacagtgagaatctggaacgaaacagtttccaatctgactttgatggcactgggatcctctgccccagagatcctgctcagcgtcatcgaggtctgcggacacaattttaccgcaggtgatctcgggccttccactatagtggggagcgctgcattcaacatgttcatcattatcgccctttgcgtgtacgtggtgcccgacggtgagactcgcaagatcaaacacctgagggtgttcttcgttactgcagcgtggagcattttcgcctatacatggctctatattatactctcagtaatctctcccggagttgtcgaggtgtgggagggattactcacattctttttcttccctatctgcgtcgtgtttgcttgggtggcagaccgcaggctgctgttctacaaatatgtgtataaacgataccgcgctggcaaacaaaggggaatgattattgagcatgagggcgatagaccaagtagcaagacagagattgaaatggacggtaaggttgtgaattcgcatgttgagaattttcttgacggcgctttagtgttggaagtggatgagagagaccaggacgacgaggaggccaggcgggagatggccagaatccttaaagaattaaagcagaaacaccctgataaggagattgagcagttgatcgagctggcaaattaccaggtactttctcagcagcagaagtcccgggcattctatcgaattcaggccacccgcctgatgaccggagctggtaatatcctaaagcgccacgccgctgaccaagcgaggaaagctgtcagtatgcacgaggtgaatacagaagtcactgagaatgatccagtgtccaaaatcttttttgaacagggaacctaccaatgtctcgagaactgcgggacagtagcactgacaatcatccgaagaggtggcgatctcaccaataccgtgtttgtggattttagaacggaggatggcacagccaatgcaggctcagactacgagtttaccgaaggcacagtggtttttaaaccgggagatacccagaaggagattcgagtcggtatcatagacgatgacatctttgaagaagacgagaacttcttggtgcacctttccaatgtgaaagtgtcatccgaagcttcagaagatgggattcttgaagcaaatcacgtaagcaccctggcctgcctcggatctccatcaactgccacagtgacaatattcgacgatgaccacgcgggaatctttacgtttgaagaaccagtgactcacgtgtcggaatccataggaattatggaggtaaaggtgctgcgcacctccggtgcgaggggcaacgtaatagttccgtacaaaaccatcgagggcacagccaggggcggtggggaggacttcgaggacacatgcggtgagctggagttccagaacgacgagatcgttaagatcattaccatcagaattttcgatcgagaggagtacgagaaagagtgtagctttagtttggtgctggaagaacctaaatggataagaaggggaatgaaggagggattctggttgtcgtcccagccggtgtttcgaaaagttcacgcacgcgaacaccctatcctgagtacagtgatcacaattgctgacgaatacgacgacaagcagccattgaccagtaaggaagaagaagagagaaggatagcagaaatgggcagacctattctcggcgagcacaccaaactggaggtaataattgaagaatcgtacgagtttaaaagcaccgtggacaaactgattaagaagactaaccttgcacttgtcgtgggcaccaatagctggagggagcagttcatcgaggctatcaccgttagcgctggagaggacgatgacgatgacgagtgtggcgaggagaaacttccatcatgtttcgattatgttatgcattttttgaccgtgttctggaaagtgctctttgcctttgtcccccctactgagtattggaatggatgggcctgctttatagtcagcattttaatgatcggactgctgacagcctttatcggagatctggcctctcatttcggctgtactataggacttaaggatagcgtcacagctgtcgttttcgtagctctcggaacttctgtgcccgatactttcgcttccaaggttgcggctacccaggatcagtatgccgatgctagtattggaaacgtgactggatctaatgcagtcaacgtcttccttggaatcggcgtcgcatggagcattgccgcaatttaccacgccgctaacggcgaacaatttaaggtgtcgccaggcacactggccttcagcgtcactttgtttacaatttttgctttcattaacgtcggagttctcctatacagaagacgccctgagatcggcggagagctggggggtccgaggacggcaaagctcctgacctcttgcctatttgtactgctgtggctgctgtacatcttttttagctctttagaggcatattgccatatcaagggcttctag

SEQ ID NO: 241844 - DNA, 2814 bp, synthetic construct
  misc_feature 1..2814: note = Description of Artificial Sequence: Synthetic coding sequence
  source 1..2814: mol_type = other DNA
atgtacaacatgagaagactgagcttgagccctactttctccatgggctttcatcttctagtaaccgtgtcccttctgttttcacacgtagatcacgtaatagcagagacagagatggagggtgaagggaacgaaaccggagaatgcaccgggtcctattattgtaaaaaaggggtcattctccccatctgggaacctcaggatccttcctttggtgataagatcgccagagcaaccgtgtacttcgtagccatggtgtacatgttccttggagtcagtataattgctgaccgttttatgtcaagcatcgaggtcataactagtcaggagaaagagatcacgatcaaaaagcccaacggcgagaccactaaaacaactgtaaggatctggaatgagactgtaagcaaccttacattgatggccctgggatcgtcagcacctgagatactcctatccgtgattgaggtctgcggccacaactttacagcaggggatctcgggccttcaaccattgtcgggtctgctgcatttaatatgtttatcattattgctctatgtgtgtatgtggtaccagatggcgagacacgcaagatcaagcatctgagggtgttcttcgtgactgctgcgtggtcaatttttgcgtatacctggctgtatattatactttccgtgatatcccccggagtggtggaagtgtgggaaggcctcctaacgtttttcttctttccaatctgcgtcgtgttcgcctgggttgccgaccgcagactgctcttttataagtacgtgtataagagatatagggccggtaaacagcggggtatgattattgaacatgaaggcgacaggccttcctccaaaacagaaattgagatggacggtaaagtagtgaattcccacgtcgaaaactttctggacggcgcattggttctggaagtggatgaacgggatcaagatgatgaggaagcacgccgagagatggctagaatcctgaaagagctgaaacagaagcatccagataaagagatcgagcaactgatcgaactggccaattaccaggtcctgtcccagcaacaaaagagccgcgcattttaccgcattcaggctacaaggttgatgactggggctggtaacattcttaagagacacgcggctgatcaggcaaggaaggcagtgagcatgcacgaggtcaacaccgaggtaactgagaacgatccggtatctaagatctttttcgagcagggtacttaccaatgcttggaaaactgcggcaccgtcgctcttaccatcatcaggcgcggtggggacctgacaaatacagtgtttgtggacttccgcaccgaagatggcacggccaatgcaggctccgattatgagtttactgagggaaccgtggtcttcaagccgggagacacacaaaaagaaatccgggtaggtataatcgacgacgatatttttgaggaggacgagaatttcctggtccatctcagcaacgttaaggtctccagcgaggcctcagaagatgggatcctggaggcgaatcatgtcagcactctggcatgtctgggatccccttcgacagctacagtgacaatctttgatgatgaccacgcaggcattttcacattcgaagaaccagtgactcatgtgagtgaatcaattggcatcatggaagtcaaggtccttcggacttctggcgcaaggggcaatgtgatcgtgccctacaagaccatagaagggacagccaggggtggcggagaggactttgaagacacgtgtggcgaactggaatttcagaatgacgaaattgttaaaataattaccattcgaatttttgaccgcgaggaatatgaaaaagaatgcagtttcagcttggtgctggaggagcccaagtggatccgacgcggtatgaaagaagggttttgctttaccgatgagtacgatgacaagcagcccctaacctcaaaggaggaagaggagcgaagaattgctgagatgggacgccctatcttgggagagcacacgaagcttgaggttattatcgaggaatcttacgagtttaagtcaaccgttgacaaactgataaagaaaactaatctggctttggtggtgggcactaactcatggcgcgaacagtttattgaagccattaccgtgtcagccggagaagacgacgacgatgacgagtgcggcgaggagaagctccccagttgcttcgactatgtgatgcattttctcaccgttttttggaaggtgctgttcgccttcgtcccaccaacagagtactggaacggatgggcttgttttattgtgagcattctcatgatcggccttctcacggctttcattggcgacctcgctagccacttcggttgtaccattggcttaaaggacagtgtcaccgccgttgtcttcgttgccctgggaaccagtgtgcccgatacctttgcttctaaagtggctgccacacaggatcagtacgccgacgcctctatcgggaatgtcacaggcagcaacgccgtcaacgtgttccttggtataggcgtcgcgtggtcgattgcagccatttaccatgccgctaacggcgaacaatttaaagtgagcccgggaacattggccttctccgtaaccctttttacaattttcgcatttatcaatgtgggggtgcttctgtatcgcaggcgaccagagattggcggagagttggggggaccaagaactgctaaacttttgacatcgtgcctctttgtgctgctatggctgctatacatattcttctcatccctggaggcctattgccatatcaaggggttctag

SEQ ID NO: 241845 - DNA, 417 bp, synthetic construct
  misc_feature 1..417: note = Description of Artificial Sequence: Synthetic coding sequence
  source 1..417: mol_type = other DNA
atgtacaacatgagacggttgagcctgagccccaccttttccatggggttccatttgctggtgacagtttcattgctcttttcacatgtggaccatgttatagcggagactgagatggagggagaaggcaacgaaacaggggagtgtaccggctcttattactgcaagaaaggagtcatactgcccatctgggagcctcaggatccaagttttggtgacaagatagcacgcgcaacagtgtattttgtggcaatggtttatatgtttttgggcgtatccatcattgctgatcggtttatgtcgagtattgaagttataacaagtcaagagaaagaaatcacaataaaaaaacccaacggcgagaccaccaaaaccaccgtgcggatatggaacgagactgtgtccaacctcacctag

SEQ ID NO: 241846 - DNA, 2907 bp, synthetic construct
  misc_feature 1..2907: note = Description of Artificial Sequence: Synthetic coding sequence
  source 1..2907: mol_type = other DNA
atgtacaacatgcggaggctgtcactcagccccaccttttctatgggctttcatctgctggttaccgtcagccttctgttcagccacgttgatcacgtcatagcggaaactgagatggaaggcgaaggaaacgagacaggggaatgcaccggaagttactactgcaaaaagggcgtgatactgccgatatgggagcctcaggaccctagcttcggcgacaagatcgctagagctacagtttattttgtcgctatggtctatatgttcctgggcgtgtcgataatcgccgatcgcttcatgagcagcatcgaagtgataacaagtcaggaaaaagagatcacgatcaaaaaacctaacggagagaccacaaaaacgacagtgagaatctggaacgaaaccgtgtcaaatctaactctaatggccctgggctcatctgcgccagaaatcctcctgtccgtcattgaagtctgcggccacaatttcacagctggggacctagggccaagcaccatagtgggtagcgcagctttcaatatgtttatcatcattgccctgtgtgtgtacgtggtgcccgatggggagacccggaagataaaacatttgcgcgttttttttgttacagccgcttggtccatattcgcctacacctggctatatattattctctccgtgattagcccaggagtggtcgaggtttgggagggccttctcactttctttttctttcccatctgcgttgtcttcgcctgggtggcagatagacgcctgcttttttacaaatacgtgtataagagatacagggccggaaaacagcggggtatgatcattgagcacgagggtgaccgcccatcaagcaaaacagagattgaaatggatggaaaagttgttaatagccacgtggaaaacttccttgacggcgctttggtgctggaagtcgatgagagagaccaggatgatgaggaagctaggcgcgagatggctcgaattctgaaggagcttaagcaaaagcatcctgacaaagaaattgaacagttaattgaactcgccaactatcaagtcctctcacagcagcaaaagagccgtgccttctataggatccaagccacacgtctcatgacaggagcgggaaacatcctgaagagacacgccgctgaccaagctcgtaaagccgtatcaatgcatgaggtgaacacagaggttactgagaacgaccccgtttccaagatcttctttgaacagggaacatatcagtgcctagagaactgcggaactgtggctctgaccatcattaggcgaggcggagatctcacgaacacagtgttcgtcgatttccgcactgaggatggaaccgcaaatgccggttccgactacgagtttacagaaggcacagttgtgtttaaacccggtgatacgcagaaggaaataagggttggaattattgatgatgacattttcgaagaagatgaaaacttccttgttcacctaagtaacgttaaggtctcttcagaggcatccgaggatggcatactggaggcaaatcacgtcagtaccttggcatgtttgggatctccttccaccgctacagtcacaatttttgatgacgaccacgctgggatcttcacctttgaagaaccggtgactcacgtgagcgaaagtattggaattatggaagtgaaggttttgcgtacatccggcgcacgtgggaacgtcattgtgccatataagaccattgaaggaaccgctcgcggtgggggagaggattttgaggatacgtgcggcgaactagaatttcaaaatgacgagatcgtcaaaactatctcagttaaggtgatagatgatgaggaatacgaaaagaacaagacattctttctggagattggagaaccccgactggtggaaatgagcgagaagaaggcactacttctgaacgagctaggcggatttacaataacgggccagccagtctttcgcaaagtgcacgcacgcgagcaccccatcttgagcactgtgatcacaatagccgacgagtatgacgacaagcagcccctcaccagtaaggaggaggaggagcggaggatcgctgaaatgggcaggcctatcctcggcgagcacactaagttggaagttattatcgaggagagctacgaatttaaatcgactgtcgacaaactgatcaagaagactaacctcgccctggtggtcggcaccaacagttggagagagcaattcatagaagccatcaccgtgtcagcgggtgaagatgacgacgatgatgagtgcggtgaagagaagctgccaagttgttttgattatgtaatgcactttctgaccgtattctggaaagtattatttgccttcgtgccacctactgagtactggaacggttgggcttgttttatcgtcagtatcctgatgattgggttattgacagccttcatcggggacttggccagccacttcggttgcaccatcggcctgaaggatagcgtaacagctgtggttttcgtggccttgggcacttcagtcccagacacttttgcttcgaaggtcgctgctacccaggatcagtacgccgacgccagcatcggcaacgtcacaggaagcaatgcagtcaacgtgtttctgggtatcggagtcgcttggtcaattgcagcgatataccacgccgcaaacggtgaacagttcaaggtctctcccggaacattggctttctcggtgactctcttcactattttcgcctttatcaatgtgggcgtgctgctttataggaggcgcccagagattggtggcgaattaggaggacccaggactgccaaactgctcactagctgtctgttcgtactgttgtggctactgtacatcttcttttcatctctagaagcctattgtcacattaaaggtttctag

SEQ ID NO: 241847 - DNA, 2766 bp, synthetic construct
  misc_feature 1..2766: note = Description of Artificial Sequence: Synthetic coding sequence
  source 1..2766: mol_type = other DNA
atggcgcctttggctctcgtgggtgtcaccttgctgcttgccgctcccccttgttcaggggcagcgacgcctaccccttcattgccacctccccctgctaatgactcagatactagtaccggcggttgtcaggggtcctatcgatgtcagcccggagtactgctccccgtgtgggagccagacgacccctctctcggggataaggcagcccgtgctgtggtctacttcgtcgctatggtatacatgttccttggggtgagcattattgccgatcggttcatggctgctatcgaggtcataacatccaaggagaaagagatcactatcactaaggcaaacggcgagacatccgtaggcaccgtaagaatttggaacgagacagtgagcaatctgactttgatggcactcggcagttccgctccagagattctcctcagcgtgatcgaggtgtgtggacacaacttccaggcgggtgaactcggtcccggtacaatcgtagggtcggctgccttcaacatgtttgttgttattgctgtgtgcatctacgtcataccagccggtgagagcaggaagatcaagcatcttagggtgtttttcgtgactgcttcttggagcattttcgcctatgtttggctgtatctcattctggccgtcttctcccccggagtggtgcaggtttgggaggcgctgctcactctggttttttttcccgtttgcgtcgtgtttgcttggatggccgacaaacggctgctgttttataagtacgtgtacaagcggtatagaaccgatccccgatctggcatcatcataggggctgagggcgacccccctaagagtattgagctggacgggaccttcgtgggtgctgaggctccaggtgagctggggggacttggaccaggacccgctgaagctagagagcttgacgctagccgcagagaggtcatccagatcctgaaagacctcaagcaaaagcaccctgataaggatcttgaacagctggtaggcatcgccaattattacgccctgctgcaccagcaaaaatctcgggctttctatcgaattcaggctaccagactcatgaccggagccggtaatgtgttgcgcaggcacgccgcagatgcatcgagacgcgctgcccctgctgagggagcaggcgaggatgaggatgacggagcatctcggatcttcttcgagccgtctctgtatcattgtctggagaactgcggttccgttctcctgtctgttacctgtcagggcggagagggaaattcgaccttctacgttgattatcggaccgaagatggctcagcaaaagcgggtagcgattacgagtactctgaggggaccctggtgtttaaacctggtgagacccagaaggaactgcgaatcggcattatagacgacgacatctttgaggaagacgaacacttctttgtccggctgttgaatttgagggtgggtgacgcccagggaatgttcgaacccgatggcggtggccgtcccaaagggcgacttgtcgcccctcttctggccacagtgactattcttgatgacgaccacgccggtattttcagttttcaggatcgactgctgcacgtaagcgaatgcatgggcaccgtagacgtcagggtggtgcgctcttctggcgcacgcggaacggttcgattaccttacagaacagtagatggcactgcaagagggggaggcgtgcactatgaggatgcatgcggcgagttggagttcggggacgatgaaacaatgaagaccctgcaagtaaagatcgtagatgatgaggagtacgagaagaaggataacttcttcatcgagctcggacagccccaatggttgaagcgcggaatctcagcactgctgctcaatcagggtgatggtgataggaagctaactgctgaagaggaggaagctcgcaggatcgccgaaatgggtaaaccggtgctaggcgagaactgcaggctggaggtcattatcgaggagagttacgattttaaaaacaccgtcgataagctgatcaaaaagaccaacctggccctggttattgggactcatagctggcgtgaacagttcctcgaagccattacggtctcagctggggatgaggaagaggaagaggacggaagccgggaagagagattgccttcttgcttcgattatgtgatgcacttcctaaccgtgttctggaaagtactgtttgcatgcgtacctccaacagagtactgccacggatgggcctgttttggagtgagtatattagttattggcctgcttaccgcactgattggagacttggctagccactttgggtgcacagtaggtctgaaggatagcgtgaacgcggtggtgttcgttgctttaggaacctctattcctgatacgttcgcctcaaaagtggcggcactgcaagaccagtgtgctgacgcttcaatcggcaatgtcaccggttcaaatgccgtgaacgtcttcctcgggttgggagtcgcttggtccgttgctgctgtgtattgggctgtgcagggcaggccgttcgaagtgcgaaccggtaccttggccttctcagttacgcttttcactgtgttcgcatttgtagggatcgccgtcctgctctaccgcagacggccacacataggtggcgagctgggcggaccaagaggtccaaaacttgccactacagctctgtttctgggattgtggctgctgtacatcctgttcgcctccctcgaggcgtactgccacatcaggggcttctag

SEQ ID NO: 241848 - DNA, 2478 bp, synthetic construct
  misc_feature 1..2478: note = Description of Artificial Sequence: Synthetic coding sequence
  source 1..2478: mol_type = other DNA
atgtttgtggtgatcgccgtgtgtatctacgtcattccagccggagagagcaggaaaattaaacacctgagagtgttcttcgtcacagcttcctggagtatttttgcatacgtttggctttacctgatccttgctgtgttctctcctggagttgtgcaggtgtgggaggccttgctgacactggttttcttccccgtgtgtgtggtctttgcctggatggcagataagcggttactgttctacaagtacgtgtataagagatacaggacagaccctagatccggtattatcattggagcagagggtgatccgccaaaatccatagaactggacggtacattcgtaggggcagaggcacctggtgaacttggagggcttggacccggacccgcagaggcgagagagctcgacgcctcgagacgggaagttattcagatactgaaagaccttaagcaaaagcaccccgacaaagaccttgaacagttggtcggaatagccaactattacgcactcctgcaccagcagaagtcgagggctttctaccgaatccaagccacaaggctaatgacaggtgctgggaacgtgcttcgtagacatgcagctgacgcctctagaagagcggctcccgctgaaggtgccggagaggacgaagacgatggtgcaagccgcatcttctttgagccttctttatatcactgtcttgagaattgtgggagcgtgcttctcagcgtcacatgtcagggtggtgaaggtaattccacattctatgtagactataggactgaagatggatcagctaaggcaggcagtgattacgagtactccgagggaactttagtatttaaacccggagagacacagaaggagctccggattgggattatagatgacgatatttttgaggaagatgagcacttcttcgtgcggcttctaaacctgcgtgtgggcgacgcccaaggcatgtttgaacctgatggaggcggtagacctaagggcagactcgtggcaccattgttagcaaccgtgacgatcctcgacgatgatcacgccggaatcttctcatttcaggacagactgctccacgtctcagagtgcatgggaaccgtcgatgtgagggtggtgaggtcctcgggggctcgcggtaccgtgagactcccgtatcgaacggttgatgggacagcacggggtggaggagtgcactatgaggatgcctgcggagagttagagtttggcgatgacgaaaccatgaagacattacaggtcaaaatcgtagatgatgaggagtatgagaagaaggacaacttctttatcgaactggggcagccccagtggctaaaaagaggtatttctgcactactgttgaatcagggggatggcgataggaaacttaccgcggaagaggaggaagcacgaaggatcgccgaaatgggtaagcccgtacttggcgaaaattgtcgcttagaggtcatcatagaggaatcttacgactttaagaatacagtggacaagttgataaagaagacgaacttggctctggtgatcggcacgcattcctggcgggagcaattcctggaggctataactgtgagcgcaggggacgaagaagaggaggaggacgggtcaagagaagaaagactgccaagttgctttgattatgtgatgcatttccttaccgtcttttggaaagtcctattcgcctgcgtgccgccaacagaatattgtcacggctgggcatgtttcggcgtctccatcctcgtgattggactccttacagctctgatcggtgatctcgccagtcactttgggtgcactgtaggtcttaaagatagcgtgaacgcagttgtattcgtggccctgggtacatccattccgggaaataccctgggcgattttggaggcgtgggctcacaaatgagccaggccggagctacacaagatccggcaaagatgcgacacgtaaggcagcagggtgggggagctgccggtccagtccgtcgcagggtgcaccgacagcgggatcgactacagaggggcgaacgtgtcccttggccaggacggagacttgtatgcgggagacgcgtgctgggaggagctggtccaccccttagaggagcacactggcacgcaggcctgcttcgccatgccttgcaccgccttcgtttgagaggacattgtagagctgccgttcctgcgccagccgcacatcggaggagagccggtcgacccgcacggacacaagccagacaccacagggcattacctgggccactggcccctgtgcatcccctaaggcagccaggcggtgtattaccacaccctggactgcttgggccacgggcagagacacggcctcaccggccaccgggtgctcgggattcagccgcaccagccctgggaccttggtcaccttttccccctagactgggtttactttcctgggactccgccagtctgctgagaccactcccttggttgtag

SEQ ID NO: 241849 - DNA, 1155 bp, synthetic construct
  misc_feature 1..1155: note = Description of Artificial Sequence: Synthetic coding sequence
  source 1..1155: mol_type = other DNA
atggggacggtcgatgtcagggttgtgcgttcctctggcgcaagaggcaccgttcggctcccgtacagaactgttgacggcacagccagagggggaggcgttcactatgaggatgcttgcggcgagctggagttcggcgacgacgaaaccatgaagactctccaagttaagatcgtggatgacgaagaatatgaaaagaaagacaacttctttatcgaacttgggcagcctcagtggctgaagcgagggatctccgccctgctgctgaatcagggcgatggggatcgtaaactgaccgcagaggaggaggaggcgcgaaggattgccgaaatgggcaagcctgtcttgggggagaattgccggcttgaagtaatcattgaggagtcatacgattttaagaatacagtcgataaactgatcaaaaagactaacctggccttggtgatcgggacgcatagctggcgcgaacaatttctagaggctataactgtatcagccggagacgaggaggaggaggaagacggctcccgggaggaaaggctccccagttgttttgactacgttatgcactttctgaccgtgttttggaaggtgttattcgcgtgtgtcccccctaccgaatactgtcatgggtgggcctgctttggggtctcaattttagtgatagggctacttacggccttaatcggcgatttggcctctcactttggctgtaccgttggtcttaaagactctgtaaacgccgtcgtcttcgtggccctgggcacatcgatccctgatacattcgcctccaaggtggcagctctgcaagatcaatgcgccgacgcttcgatcgggaacgtgacaggtagcaacgccgtgaatgtgtttctgggattgggagttgcttggagcgtcgcagccgtctattgggcagtgcagggtcgaccctttgaggtgcgcacgggaaccctagccttttctgttacattgttcactgtgtttgcctttgtcgggatagctgtgttactgtaccgtcgtcgacctcatattggcggagaactggggggtccaagagggccaaagcttgccacaaccgccctgttcctgggtttgtggctgctgtacatcttgttcgcatcgctagaggcgtactgtcacatccgcggattctag

SEQ ID NO: 241850 - DNA, 2034 bp, synthetic construct
  misc_feature 1..2034: note = Description of Artificial Sequence: Synthetic coding sequence
  source 1..2034: mol_type = other DNA
atggccgataagcgcctactgttctataaatacgtgtacaaacgctataggactgaccctcggtccggaattatcattggggctgagggcgacccacctaaatcgatcgagttggatgggactttcgtaggggcagaagcgcctggcgaactgggcggattgggcccaggccctgctgaagcgagagaactggacgcaagcaggcgagaagtcatccagattctcaaagaccttaaacagaaacatccagacaaggatctggaacagttagttgggatagccaactattacgccctgcttcatcagcagaaatctagagctttctacaggatccaggccaccagactaatgaccggggcaggaaatgttcttagacgacatgccgcagacgcctcaaggcgcgcagcaccagcagagggtgctggagaggatgaggatgatggcgcaagtcggatattcttcgaacctagtctgtatcattgtctggaaaattgcggctccgttctgctgtctgtaacatgccaaggtggtgagggaaattcaacattttatgtggactacagaacagaagacggtagtgcaaaagctggatccgactatgagtatagcgagggcaccttagtgttcaaacctggagaaactcagaaggaactgaggattggcatcatcgacgatgatatcttcgaagaggatgagcacttctttgttcgcctcttgaatctgagggtcggggatgctcagggcatgtttgaaccagatggagggggaagacctaagggacgattggtggcaccccttctggccacggtgacaattttagacgatgaccacgctggcatcttttcattccaggaccgattgttgcatgtgagcgagtgcatgggtaccgtggatgttagagtggtccgttcctcaggcgcacgaggcaccgtaaggctgccttaccggactgtcgacggtaccgcaagaggcggtggggtgcattacgaagatgcctgtggggaactcgaattcggtgacgatgagactatgaaaaccctccaggtgaagatcgttgacgacgaggaatacgagaagaaagataatttctttatagaactgggacaaccacagtggctcaagcggggaatctccgccctgcttctcaatcagggtgacggggacagaaagctgacggccgaggaggaagaggcgcgacgtattgccgagatgggcaaaccggttcttggtgagaattgtagacttgaagtgatcatcgaggagtcttatgattttaagaatacagtggataaattaattaaaaaaaccaacttggcactcgtcattggtacgcattcctggagggaacagtttctggaggccattacagtgtcggcgggagacgaagaagaagaggaggatggttcccgggaggaaaggctgccgagctgtttcgactacgtaatgcatttcttgacagtgttctggaaagtgctgtttgcatgcgtgccccctaccgaatactgtcacggttgggcatgttttggcgtgagtattttagtgataggactacttaccgcacttattggagacctggcttcgcacttcggatgcaccgtggggctgaaagacagcgttaatgccgtcgtgtttgtggccttaggcacatcaatacctgacacgttcgcctctaaagtggctgccttgcaggaccagtgtgctgacgcatctattggcaacgtgactggttcaaacgctgtaaatgtgtttcttgggctaggagtggcgtggagcgtggctgctgtttactgggccgtgcagggcagacctttcgaggtcagaaccggtacgctcgccttcagcgtcaccttatttacggtgttcgcctttgtgggtattgcggtgctgctgtaccggaggcggccacacattggtggtgagttgggaggacctcggggtcctaagctggccacgacagcactgtttctagggctgtggctcctgtacatactattcgcaagcttagaggcttactgtcacatcagaggcttctag

SEQ ID NO: 241851 - DNA, 2448 bp, synthetic construct
  misc_feature 1..2448: note = Description of Artificial Sequence: Synthetic coding sequence
  source 1..2448: mol_type = other DNA
atggttttgaggagtggtatatgtggactctcccctcacagaatttttccgtccttgctcgtggtggttgctctagtgggcttactccctgtactgaggtctcacggcctccagctctccccaaccgcttcaaccatccggtctagtgagccaccacgggaacgaagcatcggcgacgtgaccactgcaccgccagaggttacgcccgagtccagaccggtaaaccactcagttactgaccatgggatgaaacccagaaaagcctttcctgtcctgggaattgattatacccacgtgaggactccattcgagataagcctgtggatcctgctcgcttgccttatgaaaattggcttccatgtgatacccacaataagctcgatcgttccagaatcatgtctgctgatagtcgtcggccttttggtgggaggcctgataaaaggcgtaggcgagacaccgccttttctgcagtccgacgtctttttcctgttcctgctgccccctatcattctagacgccggttactttctgcccctgcgtcagtttactgaaaatttgggaaccatactaatttttgcagtcgtaggcactctttggaatgctttttttctcggaggattgatgtacgctgtatgtctcgttggcggagagcaaataaataatattggcctgctggataacctgctctttgggtctatcatttccgccgtagacccagtggccgtcttggccgtgttcgaagagatccacattaatgagctactgcacatccttgtcttcggggaatccttattaaatgacgccgttactgtcgtcctgtatcacctgtttgaagaattcgcaaactatgaacacgtagggattgtagacatttttctggggttcttgtctttttttgtggtcgcccttggtggcgttctagtgggtgtcgtgtatggcgtcattgctgcttttacaagtcgttttacatcacatattagggtcatcgagcccctgttcgtgtttctctacagctacatggcttaccttagcgcggaactgtttcacctgagcggcataatggccctgatcgcgtccggcgttgtgatgcgaccttacgttgaggctaatatatcacacaaatcccatactacaatcaagtatttcctgaagatgtggtcgtccgtttcagagaccctcattttcatctttttgggcgtttcgactgtggccggtagccaccattggaattggaccttcgttatttcaaccctcctgttctgtctcatcgctcgcgttttgggtgtcctaggtcttacctggtttattaacaagtttcggatcgtgaagctcacgcctaaggaccagtttatcatcgcttatggaggattgagaggcgctatcgcattttctctgggctatctgctagataaaaagcacttcccaatgtgtgatctgttcctgactgctattatcaccgtgatcttctttaccgtatttgttcagggaatgactattcggccactggtcgacctgttagctgtaaaaaagaagcaggagacgaagaggtccataaatgaagaaattcatacgcagtttctggatcacctgctcacaggcatcgaagacatttgcggccattacggccaccaccactggaaagataaactgaataggttcaataagaagtatgtaaaaaagtgcttaattgccggagaaagaagcaaggaaccacaactgattgcattttatcataagatggaaatgaaacaggcaattgaattagttgagtctggcggaatgggcaaaattccaagcgccgtgagcacggtcagtatgcagaacatacatcccaagagtttgccgtccgagaggattctgcctgccctgtccaaagataaagaggaagaaattcgcaaaatattacggaacaacctgcagaaaacacggcagcgcttaagatcttacaaccgccacacattggtggcagacccttacgaggaagcctggaaccagatgctgctgcggagacagaaagccagacagctggaacagaagattaacaactacctgactgtgcctgcccataagcttgattcacctacgatgtcacgggctcgtattgggtctgatcccttagcgtatgaaccaaaagaagatctccccgtcatcactatagatccagcgtctccccagagccctgagagtgtagaccttgttaatgaggagctgaaggggaaagtactgggtctgtccagagatcctgcaaaggtcgcagaggaagacgaggatgacgacggcggtatcatgatgaggtccaaggagacctcgagtccaggcacagacgatgtgttcacccccgctccctctgatagcccatctagtcagcggatccagagatgcctgtccgacccgggtccacatcccgagcctggagagggggaacccttttttcccaagggtcagtag

SEQ ID NO: 241852 - DNA, 408 bp, synthetic construct
  misc_feature 1..408: note = Description of Artificial Sequence: Synthetic coding sequence
  source 1..408: mol_type = other DNA
atggtgctgcggtccgggatctgcgggttatcaccacatcgtattttccctagcctcttggttgtggtcgccctcgtcggccttcttcctgtgctacggtcgcatggcctacagctgtctcccaccgccagtactataagaagttcagaaccccctcgtgagcgaagcattggtgatgtaaccactgccccaccagaggtaacgccagaatcacgcccagtgaatcactctgtcactgaccacggaatgaaacctcggaaggcctttccggttcttggaattgattatacccacgtacggacgccctttgagatttctctatggattcttctggcctgcctcatgaagataggcttcccttgcgatccacattacttgaagcaccggccaggcgagttacccgcttag

SEQ ID NO: 241853 - DNA, 1668 bp, synthetic construct
  misc_feature 1..1668: note = Description of Artificial Sequence: Synthetic coding sequence
  source 1..1668: mol_type = other DNA
atggtcctgagatccggcatttgtggcctctctccccatagaatctttccctcgctacttgtggtggttgctctcgtcggacttctcccggtgctcaggtcccatgggctacaactgtcacccaccgcctccacaatcagaagcagcgaaccccctagggaaaggtctattggagatgttaccaccgcccctcctgaagtcacaccagagtctcgacctgtaaatcattctgtgacagaccacggtatgaaacccagaaaggctttccccgtacttggcatcgattacacccacgtccgcaccccttttgagatcagtctgtggattctgctggcctgtctaatgaagattggattccacgttatcccaacgatcagcagcattgtgccagagtcttgtctgctcatcgtggttggcctcctagttggaggcctgatcaaaggcgtcggcgagactccgccatttcttcaatctgatgtgttttttctcttcctgctgccacccattattctggacgcagggtatttcctgcctctgcggcagtttaccgaaaatctggggacaattctcatatttgccgtggttggcaccttatggaacgctttttttctcgggggattgatgtacgccgtgtgtctcgtgggcggagaacaaattaacaacatagggctcctggataatctgctctttggttcaattatttccgcagtggatcccgtggccgttctagcagtgttcgaggaaattcacattaacgagctgctccacattcttgtgttcggagaatcgttgctaaacgatgccgtcactgtcgttctgtaccatctgttcgaagaattcgccaattacgaacatgtaggcatcgtggacatcttcctgggcttcctgtcatttttcgttgtggcactaggtggcgtgctggtgggcgtggtgtacggcgttattgcagctttcacatcacgctttacttcccatatccgtgtgatagagcctctgtttgtattcttgtactcctatatggcttatctgtccgccgagctctttcatctgagcgggataatggctctaatcgccagcggtgtggttatgcgtccctatgttgaggcaaacattagccataaaagtcacaccacgatcaaatactttctgaaaatgtggtcctccgtcagcgagactctgatcttcattttcctaggagtctcaaccgtagctgggagccaccactggaactggaccttcgtgatatccaccctgctgttctgtctgatcgccagggtgctgggggtgctgggtctcacctggttcattaacaagtttcgcatcgtgaaactaacgcctaaagaccagttcatcatcgcgtatggtgggttaagaggcgctatagcattctccctggggtatctgctggacaagaagcatttccccatgtgtgacctgtttttgacagcaattataacggtgattttcttcacagtgttcgtccaagtattgggccagggacgtgccggaccttgtttgggcgaccctcaccgcctgttcccgtggaaggaaaggaaagcttgcgatctgaagtgcgactcatctccatcctcgaccacgaatctcctgtgcgaccttgggagggctacacccccattttgggcttctgtgtcgtcaattgtcaaatag

SEQ ID NO: 241854 - DNA, 960 bp, synthetic construct
  misc_feature 1..960: note = Description of Artificial Sequence: Synthetic coding sequence
  source 1..960: mol_type = other DNA
atgaccattcggccactagttgacctcctagcagtgaagaaaaaacaggaaacaaagcgatcgataaatgaagagattcatacccagtttttagaccaccttctaaccgggatcgaggacatttgtgggcactatgggcatcaccattggaaggataaactgaaccgctttaataaaaagtacgttaagaagtgtctgattgctggtgaaaggtcgaaagaacctcagctcatcgcgttttaccataagatggaaatgaagcaagccatagagttggtcgagtccgggggaatgggaaagatcccttctgctgttagcaccgtgtctatgcagaacatccatcccaagtccctaccttccgaacggatcctgcccgcattgagtaaagacaaggaagaagagattcggaagattcttcgaaacaatttacaaaagactcggcagcgactccgtagctacaaccgtcataccctagtggctgacccctatgaggaggcctggaatcaaatgctgctaagacgccagaaagcaaggcaactcgaacagaagatcaataattatctcacagtgccggctcacaagcttgacagtcccacgatgtccagggccaggattggctctgacccattagcctacgagcctaaggaggatcttccagttatcaccattgaccccgcatcccctcagtccccagagtcggtcgatttggttaatgaagaactcaaaggtaaggtcctgggacttagtcgcgatcctgctaaagtcgcagaggaggacgaagatgatgacggcggaattatgatgcgatcaaaggaaacctcatctcccggtaccgacgacgtgttcacccccgctccttcagatagtcccagttcacagcggatccagagatgtcttagcgaccctggacctcatccagagcctggcgaaggagagcccttcttccccaagggacaatag

SEQ ID NO: 241855 - DNA, 675 bp, synthetic construct
  misc_feature 1..675: note = Description of Artificial Sequence: Synthetic coding sequence
  source 1..675: mol_type = other DNA
atggaaatgaaacaagcaattgaactggtagagtctggcggtatgggaaaaatcccaagtgctgtaagcactgtctctatgcagaatattcacccaaaatcgcttccttctgaacgcatcttacccgctctgagcaaggataaggaagaggagattcggaaaattttgaggaacaacctccaaaagaccagacagcgcctgagaagttataataggcacactctcgtcgccgacccctacgaagaggcatggaatcagatgttattgcgcagacagaaggctcgccagctcgagcagaaaattaacaactatcttacagtccctgcccacaagctggatagccccacgatgtctagagcacgtatcggctctgaccctcttgcatacgagcccaaggaagacctccctgtcatcactattgacccagctagtcctcagtctcccgagtctgtggacctcgtcaacgaggaacttaaaggcaaagtgttagggttatctcgcgacccagctaaggtcgctgaagaggacgaggatgacgatggcggaattatgatgaggagcaaggagacctccagtccagggaccgatgacgttttcactccagcgcctagtgacagtccctcttcgcaacgcattcaaagatgcctctccgatcctggacctcatcctgagtag

SEQ ID NO: 241856 - DNA, 1431 bp, synthetic construct
  misc_feature 1..1431: note = Description of Artificial Sequence: Synthetic coding sequence
  source 1..1431: mol_type = other DNA
atggcatatttaagtgccgagctattccacttgtctggaattatggctttaatagcctcaggggtcgtgatgaggccatatgtggaggctaacatttctcataagtctcacacaaccatcaagtatttcctgaagatgtggagtagcgttagcgaaacactgatattcatattcctaggtgtgtccactgtagccggtagtcaccactggaactggactttcgtgatcagcacactgctgttttgcttgatcgcacgggttctgggggtgctcgggctgacgtggtttatcaataaattccgcatcgtgaagctcactcccaaagatcagttcatcatcgcctatggagggctccggggtgccatagcattttctctcggatatcttctggacaaaaaacatttccctatgtgcgatctgttcttgactgcaattattacagtcatcttcttcaccgtgttcgtacagggcatgacaatccggcctcttgtggacctgctggccgtgaagaagaagcaggaaactaagcggtctatcaatgaagagatacatactcaatttctggaccatctcttgaccgggatcgaggatatatgcgggcattatggccatcatcactggaaggacaagctcaacagattcaacaaaaaatacgtcaaaaagtgcctgatagccggtgaacgctccaaggaaccacagctgatcgcgttctaccacaaaatggaaatgaagcaagccatcgaacttgtagagagcgggggaatgggtaagatcccatctgccgtgtccactgtgtcaatgcagaacattcatccaaaaagcctgcctagtgagcgcatcttgcctgccctctctaaggataaggaagaagaaatccggaaaatactgagaaacaacctgcagaaaactcgtcagcggctgcgcagctataaccgccacaccctcgtggcggatccttacgaagaggcatggaaccagatgttgctgaggcgacagaaggcacgccagctggagcaaaaaatcaacaattatctcactgtcccggctcacaagctcgactccccaacaatgtctcgggcaagaatcggttccgacccacttgcgtatgagccgaaggaagacttgcccgtcataactatcgacccagccagccctcaaagcccagagtccgtagacttggtgaatgaagagctcaaaggaaaggtgcttggtctgtccagggatccggctaaagtggccgaagaagatgaagatgatgatggagggattatgatgcggtctaaagaaacatctagccccggtaccgacgacgtcttcacaccagccccaagcgattccccaagctcacagcggatccagcgctgcctgtctgatcccggtcctcatccggagccaggagagggggaacctttcttccctaaaggccagtag

SEQ ID NO: 241857 - DNA, 1626 bp, synthetic construct
  misc_feature 1..1626: note = Description of Artificial Sequence: Synthetic coding sequence
  source 1..1626: mol_type = other DNA
atgaactgtcgcgaacttcccctgactctatgggttctgatctccgtgagtactgccgaatcctgtacctccaggcctcacattacagtcgtagagggtgagccgttttacctgaagcactgtagctgctcactggcacatgaaattgagaccactaccaagtcctggtacaaatcaagcggttctcaggaacatgttgagttaaacccgagatcgtcgtcaaggatcgctctccacgactgcgtactcgagttctggccggtagaactcaacgacactggctcctatttttttcagatgaagaattatactcagaagtggaagctcaatgtcatccgacgcaacaagcactcttgcttcacagagagacaggttacctccaagattgtggaggttaagaaattcttccagattacatgtgagaacagttactaccagactcttgtcaacagcacctctctgtacaagaattgtaagaaactgctgctcgaaaacaacaagaacccgaccataaagaaaaatgctgaattcgaagaccagggctattatagctgtgtgcattttctgcatcataatgggaaactgttcaatatcacgaaaacttttaacatcactatagtggaagaccgcagtaatatcgtgccagttctcctgggccctaaactgaatcacgtggccgtggagctaggcaaaaatgtgcggctcaactgctccgcccttctgaatgaggaagacgtgatttactggatgttcggcgaagagaatggtagcgatccaaacatccatgaggagaaagagatgagaataatgacccctgagggaaaatggcatgcatcaaaggtcctgagaatagaaaacatcggagaatccaatttaaatgtgttatataactgcaccgtggcctccacggggggaactgacactaagtcatttattctcgtgcgaaaggctgatatggccgacataccaggccacgtgttcactaggggaatgattatagcagtgttgatcctggtagcagtcgtttgcttggtaacggtatgcgtgatttaccgggttgatctcgtattgttctaccgacatctaactcggagggatgagaccttaaccgacggcaagacttacgacgcatttgtgtcctacttgaaggagtgtcgcccagaaaacggcgaggaacatacctttgccgttgagattttgcctagagtcctggaaaaacactttggatataagctgtgtatcttcgaaagggacgtggtcccaggcggagccgtcgttgacgaaatccactccctgattgagaaatcacgcaggctgataatcgtgctcagcaagtcctacatgagcaacgaagtcaggtatgaactggagagtgggctgcacgaggccctggtggaacggaagataaagataatcctaatcgaatttacaccggtgaccgatttcaccttcctccctcaatcactgaagttgctcaaaagccatcgagtccttaagtggaaggctgacaagtcattatcctacaacagtagattctggaagaatctactctatctcatgccagccaagaccgtgaagccaggaagggatgagccagaagtgctaccagttctgtccgagagttag

SEQ ID NO: 241858 - DNA, 2505 bp, synthetic construct
  misc_feature 1..2505: note = Description of Artificial Sequence: Synthetic coding sequence
  source 1..2505: mol_type = other DNA
atgtggggactcggagcgcgtggacctgaccgaggactgcttctagcacttgcgctagggggtctggctcgcgctggaggggtggaagtggaacccggaggagcccatggagagtccggcggatttcaagtcgtgacttttgagtgggcacatgtgcaagatccatatgtaatcgctctttggatcctcgtggcttccctggccaagatcggtttccatttaagccataaagtgacgtctgtcgtgcccgaaagcgcactgctgattgtgcttggcctagtgctcggtggcatcgtgtgggctgccgatcacatcgccagcttcacacttacccccaccgtcttctttttctatctgttaccacctattgtcctcgatgccggatatttcatgcccaatagactgttcttcggtaatctaggcaccatcctactttacgctgtcgttgggactgtgtggaatgctgcgaccacgggactgagcttgtacggggtatttctaagcggcctaatgggggatctccagatcggactgctcgacttcctgctgttcggtagtttaatggcggcagtggatcccgtggcggtactggccgtttttgaagaggtccacgtgaatgaggtcctgttcattatcgtgtttggtgagtctcttctgaatgatgccgttaccgtggttctgtacaatgtatttgagagttttgtggctctaggcggtgataatgtgacaggcgtcgattgtgtgaaaggcatagtgtcattcttcgtagtctcattagggggaacccttgtcggggtagtcttcgccttcttgctgtctctggttacccgattcacaaagcacgtgagaatcatagaacctggattcgtgtttattatctcttatctgtcctacctaactagcgagatgctgtccttatcagctatactggctattaccttttgtgggatctgttgtcagaagtacgtgaaggctaacattagtgaacaaagcgcaactaccgtcagatacactatgaaaatgttggccagttccgccgagacgatcatctttatgtttctgggcatctccgcagttaacccattcatctggacttggaacactgcatttgtgctgctgacactcgtgttcattagcgtctacagggccatcggcgtggtcctccagacttggttactgaatcgttataggatggtgcaacttgagcctatagaccaggtggtgctgagttacggtggcttgcggggagctgttgcatttgctcttgtggtgctacttgacggtgacaaagttaaggaaaagaatctattcgtgtctaccactattattgtcgtgttcttcacagtcatctttcaggggctcaccatcaaaccactcgtccagtggctcaaggttaaacgatctgagcatagggaacccagactgaatgagaagcttcatggcagagcatttgaccacatactctccgcaattgaggacatctcaggccagatcggccacaattatttacgggacaagtggtcccactttgacagaaaattcctcagccgggtgctgatgcggcgtagtgcccagaagtcccgggaccgtattctgaacgtgtttcacgaactcaatctaaaggatgccatcagttatgttgcagagggagaacgaagaggatccttagcttttattcgttctcctagcactgataacgtcgtgaacgtggattttaccccccgaagcagcacagtggaggcctctgtgtcttacctgctccgcgaaaatgtgtccgcggtatgtctagacatgcagtcgttggaacagaggagacgcagcattagggacgctgaagacatggttacgcaccacacattgcaacagtacctgtataaaccacgccaggaatataagcatctttattccagacatgagcttaccccaacagaagatgaaaagcaggatagagaaatctttcatcggactatgcggaagcgcttggaatccttcaaatcgaccaaactgggcttgaatcaaaacaagaaggccgctaagttgtataagagggaaagagcccagaagcggagaaatagttcaattccgaacggaaaactccccatggagagccctgcacagaactttacaatcaaagaaaaagatctggaattaagcgacactgaggaacctcccaattacgatgaagaaatgtctggagggattgagttcttagcctctgtaactaaggatactgcctcggatagtcctgctgggattgataaccccgttttcagtccagatgaggccctggaccgtagcctcctcgctagactccccccttggctttcgccgggtgagactgtggtgccctctcagagggccagaacccagatcccctatagcccaggaactttttgtagactgatgccatttcgattgagtagtaagagtgtggacagcttcctgcaggcggatggacctgaagaacgaccgccagccgctctgcctgaatctacacacatgtag

SEQ ID NO: 241859 - DNA, 1077 bp, synthetic construct
  misc_feature 1..1077: note = Description of Artificial Sequence: Synthetic coding sequence
  source 1..1077: mol_type = other DNA
atgtcagccgacgccgctgctggcgcacccctgccgaggctttgctgcctcgaaaaagggccaaatggctatggcttccaccttcacggcgagaagggtaaactgggacagtacattcgtctggtcgaacccggtagccccgctgaaaaggctggccttctggcaggggacaggttggtggaggtcaatggcgagaacgtggagaaggaaacccatcagcaagtggtgagccgaatacgcgctgcactgaatgccgtgcggctgctcgtggtggatcctgagacagatgaacaactgcaaaagctgggagtccaggtcagggaggagttgctgcgagcgcaggaagcccctggccaggctgagccccctgccgcagccgaggtgcagggtgcaggcaatgaaaacgagccacgggaagctgacaaatcccatcccgaacagagagagctaagacctagactgtgtacaatgaagaaaggccctagcggatatggattcaatctgcacagcgacaagagcaaaccaggccagttcattagatcagtagaccctgactcccctgcagaggcctccgggctccgtgctcaggataggatcgtggaggtaaacggggtctgcatggagggcaagcagcacggagatgtggtctccgcgattcgagctggaggggacgagaccaaactgctcgttgttgaccgggaaaccgatgagttctttaagaaatgccgtgttatccctagccaggaacacctcaatggaccattaccggttcctttcactaatggtgagatccagaaggaaaatagtcgggaagccctggcagaggccgcactagaatctcccagacctgctctcgttagaagtgctagcagcgacacttccgaagagctaaattcccaggactcccctcccaagcaggactccaccgcccctagttccacgtcaagttcagatcctatactggattttaacatttccctcgctatggcaaaggagcgggcacatcagaaaaggtctagtaaacgcgcacctcaaatggactggagcaagaaaaatgaactgttttctaatttgtag

SEQ ID NO: 241860 - DNA, 822 bp, synthetic construct
  misc_feature 1..822: note = Description of Artificial Sequence: Synthetic coding sequence
  source 1..822: mol_type = other DNA
atgtcggctgacgcggctgcaggcgctcccttgcctcgcttgtgctgcctggagaaggaaacccaccagcaggtggtaagcagaattagggctgcgctgaacgctgtgcgcctcctagtcgtagaccccgaaaccgacgaacaactacagaagttgggagttcaggttcgggaagaactgctaagagcccaggaggcgcctggtcaggccgaacctcctgcggcagccgaggtgcaaggtgcaggcaatgagaacgaacccagggaggccgataagagtcatcccgagcagagggaactgaggccacggttgtgtaccatgaagaaggggccaagcgggtacggtttcaacctgcactctgacaaatccaaacctggacagtttattcgttccgttgaccccgactcccctgctgaagctagcggacttagggcccaggataggattgtcgaggtcaacggggtgtgcatggaaggcaagcaacacggggacgtcgtatcagccattcgggcaggaggcgatggaagtggagggggaaaccagcgaggtgccgaattcccaagacagccaccgaagacaggacttcacagtgcactggtctacctcctattgagaccccaccccaggctccagcacctgcccggacacgggcagcgcgaaggacccccagaaacacaacagcagaccgggccagccgacgggctcgaacaggagaagcgtacactgcaacaaccactttccgccctgttgccaccgagtgactggcaggggagggcctctatcccgccacacctgtttccatccccccagttactcccttag

SEQ ID NO: 241861 - DNA, 1014 bp, synthetic construct
  misc_feature 1..1014: note = Description of Artificial Sequence: Synthetic coding sequence
  source 1..1014: mol_type = other DNA
atggccgctccagagcccctgcggcctaggctatgtaggcttgttcgcggagagcagggctacggatttcacctccacggtgaaaagggtagaaggggccaatttattcgcagagtcgagcctggctccccagctgaagccgctgcgctcagagctggcgacagactagttgaggtgaacggtgtcaacgtggagggtgagacgcatcaccaagttgtgcagcgtatcaaggccgtggaaggccagacacgcctgctggtggtggaccaggagaccgatgaagaacttcgcagacgtcagttgacctgcactgaagagatggctcaacgtggactgccaccagctcatgacccatgggagccaaagcccgactgggcacataccgggagtcattctagcgaagcaggaaagaaagatgtcagtggccctctgcgggagctccgccctcggctttgtcacctgcgcaaaggaccacagggctacgggtttaacctgcactctgataaatcccggccaggacagtacatccggtcagtggaccctgggagccccgcagcccgatcaggattgagggctcaggacagattaattgaggtcaatgggcaaaacgtggaagggctccgccatgccgaagtggtggcttccattaaggcgcgtgaagacgaagctaggttgctcgtcgtggatccagaaaccgacgagcattttaagcgactccgagtcacacctacagaagagcacgttgagggaccgttaccaagccctgtcaccaacggcacaagtcccgctcaactcaacggcggttctgcttgctctagccgctctgatcttcccggatcggataaggacaccgaggatggatctgcctggaaacaagacccctttcaggagtctggactgcatctctctccgacggccgcagaagccaaagaaaaagcaagggccatgagagtgaacaaaagagctccgcagatggactggaatcgcaagagggaaatcttctccaatttttag

SEQ ID NO: 241862 - DNA, 981 bp, synthetic construct
  misc_feature 1..981: note = Description of Artificial Sequence: Synthetic coding sequence
  source 1..981: mol_type = other DNA
atggctgcgccagagccactgagaccacggttatgtcgccttgtgcgcggagagcaagggtacggatttcatttacatggggagaagggaagaaggggccagtttatcagacgtgtggagccaggaagcccagctgaggcagccgctctccgggcaggggacaggctggtcgaggtgaacggggttaatgtggagggcgagactcatcaccaggtcgtgcagaggatcaaggccgtcgagggacagacaagacttttagtcgtggaccaagaaacggatgaggaactccggaggcgccagttaacttgcacagaagaaatggcgcagagagggttaccacctgcccacgatccttgggagccaaagcctgattgggcacacactggctcacactcatcggaagccggtaaaaaggacgtctcaggccctctgcgtgagctgagacctaggctgtgtcacctgagaaaaggacctcaggggtacgggttcaatctgcacagcgacaagtctcgacccggacagtacatcagatctgtggatccaggaagtccagccgcacgttccggattgagagcccaggacagactgattgaagtcaacggtcaaaacgttgaaggtctccgacatgctgaagtcgtggccagtattaaggcgagagaagatgaggcacgcctcttggtcgtcgatcccgaaactgatgagcacttcaaaagactgcgagtgacccctaccgaagaacatgtggagggaccgctgccaagcccagtaaccaatggaacgtcccccgcacagctgaatgggggatcagcatgttcaagccggtccgatttgcctgggagtgataaggacaccgaagagtccggattgcacctgagtcccaccgccgcagaggccaaagagaaagccagggccatgcgcgtcaacaagagggctccccagatggactggaaccgcaagcgggaaatcttttctaatttctag

SEQ ID NO: 241863 - DNA, 2397 bp, synthetic construct
  misc_feature 1..2397: note = Description of Artificial Sequence: Synthetic coding sequence
  source 1..2397: mol_type = other DNA
atggccttgcagatgttcgtcacttatagtccctggaattgtctattgttgcttgtggctctggagtgttcagaggcaagcagtgaccttaacgaatcggctaattcaactgctcagtatgcatccaatgcgtggtttgctgctgcatcctctgaaccagaggaaggtattagcgtgttcgagctggactacgattacgtccagataccctatgaggtcacactgtggatcttattggcttcattggctaagatagggtttcatctgtatcacaggcttcccggactaatgcctgaaagttgtctcctcatactggttggggctctggtgggagggataatttttggaacagaccacaagtcccccccagtgatggatagttccatctactttctgtacctcctaccgccaattgtgctcgaaggaggctacttcatgcccacaagacccttcttcgaaaacatcggttcaatcttgtggtgggctgttcttggcgctctgatcaacgccctgggtatcggtctgtcactctacctgatttgccaggtgaaggcgttcgggctgggggatgtgaacctgcttcagaacctcctctttggatcgttaatatcagcagtcgatccagtggccgtgcttgccgttttcgaggaagctagagtgaacgaacagctatatatgatgatttttggtgaggccttgctgaacgacggcatcactgtggtcctttacaatatgttgattgccttcacaaagatgcacaagttcgaggacatagagactgtcgatattcttgcaggctgcgcacgcttcatcgtcgtgggcctcggcggagtgctattcgggatcgtcttcggattcatctcagcttttataacgcgattcacacagaatatctctgccattgagcctctcattgtttttatgtttagttacttgagctatctggccgcagaaactttgtatttgagcggcattctcgcaattacagcttgcgccgtgacgatgaagaaatatgtagaggagaacgtgtcccagacatcttacactaccatcaagtatttcatgaagatgttgtcgtcggtctcagaaacactcatattcatattcatgggagtctctacagtgggcaaaaaccacgagtggaactgggcctttatctgcttcacactcgctttttgtcaaatttggcgggcaatcagcgtttttgcactcttttacatcagtaaccagtttcgtacctttccattcagtatcaaagatcagtgcataattttttattcaggagttcgcggagccggaagcttttctttagcattcttgctccctcttagtctcttcccaagaaagaaaatgtttgtaacagccacgctcgtggtcatctatttcaccgtgttcatccaagggattacagtgggaccgctggtccggtatctggacgtcaaaaaaacaaataagaaggaatcgatcaatgaagagctgcacatccgtcttatggatcacctgaaagcaggcatcgaggatgtatgcggtcattggagccattaccaagtgcgtgataagttcaagaaatttgatcaccgatacttaagaaaaattctcattagaaagaacctccctaagagtagtatagtgtccctttataaaaaactggaaatgaagcaggccattgagatggtagagactggcattctctcctccactgccttctcaattccgcatcaggcacaaagaatacagggcataaagagactgtctcctgaggacgtggaaagtattagagatatcctaacgtccaacatgtaccaagtgcgacagcgaacactgtcctataataaatacaacctcaagccccaaacctccgagaagcaggccaaagagattttgatccgcaggcagaacacgttaagagaatctatgcgcaaaggccattcgctcccatggggaaagccagcaggaaccaagaatattcgctaccttagctatccttacggtaacccccaatccgccggtcgggatacaagggccgcaggattttctgacgatgactcttctgatcctgggtcaccgtctatcaccttcagcgcgtgtagtaggatcggcagccttcagaaacaggaggcacaggagatcatccccatgaagagcctccaccggggacgaaaagccttttctttcggctatcagcgcaacaccagccaggaggaataccttggcggagtgcggagggttgctctgcgccctaaacctctctttcacgccgtggatgaagaaggggaatctgggggagaatccgaaggcaaggcgtcacttgtggaagtgcgctcaagatggactgctgaccatggccacggcagagatcaccatcggagccacagccccctgttgcaaaaaaagtag

SEQ ID NO: 241864 - DNA, 2691 bp, synthetic construct
  misc_feature 1..2691: note = Description of Artificial Sequence: Synthetic coding sequence
  source 1..2691: mol_type = other DNA
atgctccgtgctgctttgagtctgcttgctctgcctttggctggagccgctgaagagccaacacagaaacctgaatcccctggtgagccaccgccagggctcgagctgtttaggtggcaatggcacgaggtggaagcgccttacctcgtggctctctggatcctggtggcttccttagccaagatcgtgtttcacctgagccggaaggtcaccagcttggtcccagaatcctgcctgctgatcttactagggttagtgctggggggtatagttttagccgttgccaaaaaagctgaataccagttagagcccggaaccttcttcttattccttttgccccctatcgtgctcgacagtggttactttatgcctagtaggctgttctttgataacctgggagctatcctgacatacgccgttgtgggcaccctatggaatgcctttactaccggggctgccctatggggcctccagcaggctggcctggtggctccaagggtgcaggctggtttgcttgacttcctactgtttggctcattaatttcagcagtcgatcccgtcgcagtcctggctgtgtttgaggaagttcatgtgaacgagactctgttcatcatcgtcttcggggagtctcttctcaatgatgcggtgaccgtggtcctatacaaagtgtgtaattcttttgttgagatggggagcgcaaacgtgcaggctacagactatctcaagggcgttgcctctctatttgtggtcagcctcggaggcgctgccgtagggttggtgttcgctttccttctggctctgactacgcgatttactaaaagagtgcgaatcattgagcccttactcgttttcctcctggcctatgctgcctacttaactgctgagatggccagcctgtctgccatattggcagtgacaatgtgtggcttaggatgcaaaaaatacgtcgaagcaaatattagccacaagtctcgtaccactgtcaaatatactatgaagactctggcatcttgcgcagaaaccgtcatcttcatgctgttgggaatttccgcagtcgacagctcaaagtgggcctgggacagcggacttgtcctgggaaccctgattttcatcttattcttcagagctcttggagtcgtgctgcagacctgggttcttaaccagtttcggctggtgcccctggataaaatagatcaggtcgtgatgagctatggcggactacggggagccgtggcattcgccctggtgatcttgttggatcgtacgaaagtccctgctaaggactacttcgttgcaacaacgattgtagttgtgtttttcacagtgatcgtgcaagggctgacaataaagcctctcgtgaaatggctgaaggttaagaggagcgaacatcataaacctaccctcaaccaggagcttcacgaacacactttcgaccatatactagcggcagtggaggacgttgtgggccaccatggctaccattactggcgcgaccgttgggagcagtttgacaagaaatatttaagtcagctcctcatgcgccgatcagcatacagaatccgggatcagatttgggacgtatattatcgcttgaacattagggacgcaattagctttgttgaccaggggggtcatgtcctcagcagcaccggactgacactcccttctatgccttcccggaattctgtagctgaaacatctgtgactaatttgttgcgcgaatctggtagcggggcttgcctggacctccaagtgatcgatacagtaaggagtggaagagaccgggaagatgctgtgatgcatcacctgttgtgtggcggactgtacaagccccgaagacgatacaaggcatcatgctccaggcacttcataagcgaggacgctcaggagaggcaggacaaggaagtctttcaacagaacatgaagaggcggttggagtcctttaagagtaccaaacacaatatctgtttcactaagagcaagccaagaccaaggaagaccggaagaagaaaaaaagacggtgttgccaacgcagaagctacaaacggaaagcatcgaggcttgggctttcaggatactgcagcggtgatcttgactgtggaatctgaggaggaagaggaagaatcggactctagtgaaacggaaaaggaggatgacgaagggattatcttcgtggctcgggcaacatcagaggttctgcaggaagggaaagtgagcgggtcactggaggtttgtccttcacctcgcattatacctccctcgcctacgtgtgccgagaaagagctgccatggaagtccggccaaggcgacctcgccgtatacgtctcctccgagaccactaagatcgtacccgtagacatgcagaccggatggaaccagtctatttcctcattagagagtttagccagccccccatgcaatcaggcacctattctaacttgcctccctcctcaccctcggggtacagaggagccccaagtacccctgcacttgccttccgatccgaggagttcattcgcctttccgcctagtcttgctaaggctggacgaagccgatctgaaagctctgctgatttgccccagcagcaggagttgcaacccctcatggggcacaaggaccacacacacttgtcacctggaactgcaacatctcattggtgcatccagtttaacagaggatccaggttgtag

SEQ ID NO: 241865 - DNA, 1308 bp, synthetic construct
  misc_feature 1..1308: note = Description of Artificial Sequence: Synthetic coding sequence
  source 1..1308: mol_type = other DNA
atgcgtaggtcagcctaccgtattagagatcagatctgggacgtctactaccgtctgaacatcagggacgccataagcttcgtcgatcaaggagggcacgtgctctcctctactggcctgaccctgcccagcatgcctagcagaaactctgtggcagaaaccagcgtgaccaacctgcttagggagagtggcagcggagcttgtctagacctgcaagtaatagacaccgtacgctcagggcgagatcgcgaagacgccgtgatgcaccacttactgtgtggtggattgtataaacctagacgaaggattgagctcaggacagaaccatgcggcatgctactgaaaaccttcctacagacagacatggatcaggccttcctggggacgaagcctgctgctgtggccacatctagtcagcgcatgcgcagaagtggtaggactcggagatcgtcttcacggatgaaaaggcgtctcgagtctttcaagagtacaaaacataacatttgttttactaagtctaagccacgccctcgaaaaaccggaaggcgcaagaaggacggggtggctaatgccgaagccacgaacggcaaacaccggggtctgggcttccaggatactgccgctgttattctcacagtagaatccgaagaggaggaagaagagagcgacagcagtgagactgagaaagaagatgatgagggcattatttttgtggcccgagcaacgtctgaagtgctgcaggagggaaaggtttccgggagcttagaggtgtgtccaagccccaggataattccaccaagccccacatgcgccgagaaggaattaccctggaaatccggacaaggagacctggcagtgtacgtgagtagcgaaacaacaaaaatagtgccagtggacatgcagaccggctggaatcagtctatttcttcacttgagagccttgcaagcccaccttgtaatcaggctcctattctcacctgcctccccccacaccctcgaggaaccgaggagccccaagtgcccctgcatttaccatccgacccgcgaagctctttcgcgttcccaccctcactggcgaaagcagggctggccgtgcgggcagctctgacttctcctagtagtcgatcttgtagtccttcttgggcaaccaggaccacacccataagcgcacaggctcctctgcccccaactggagcttcctctagtaccgaggctgccggatgttcgagccggccaagagggggtgcgggagggggaattcctgtcggttcagccccatgggtgatgggtcgagctctggaaacttag

SEQ ID NO: 241866 - DNA, 2106 bp, synthetic construct
  misc_feature 1..2106: note = Description of Artificial Sequence: Synthetic coding sequence
  source 1..2106: mol_type = other DNA
atggctagaagaggatggcgcagggcaccgctgaggcgaggggtcgggtcttccccaagggcccgacgattaatgagaccgctttggctgctacttgccgttggagtttttgactgggccggagcttctgacggaggcggaggggaggcgcgtgccatggatgaagagatcgtaagtgagaagcaggctgaagaatctcatcgccaagattccgctaaccttctgatattcattctgctgcttaccctgacaatcctgactatctggctgttcaagcaccgaagggcacgctttttgcatgaaacaggcctcgcaatgatctacggcctgctggtcggcctcgtcttgcgctatggaattcacgtgccatccgacgtaaacaatgtcaccctgtcatgcgaggtgcagtcgagccccaccacactgctagtgaatgtatccgggaaattttacgagtatatgctcaagggcgagatctcctcacacgaactaaataacgtgcaggataatgagatgttgaggaaagtgacattcgaccccgaagttttctttaacatcctgctgcctccaatcattttttatgcagggtactcactaaaacgcagacactttttcaggaatcttggcagcattttggcctatgccttccttggcactgccatttcttgcttcgtaatcggatctataatgtacggctgtgtgactctgatgaaagtgaccgggcaactagcaggggacttctatttcactgattgtctgctgtttggtgctatcgtctctgcaaccgacccagtgacggtactcgctatcttccacgaattgcaggttgacgtggagctgtatgccctccttttcggagagagcgtcctgaacgacgctgtggcaatcgtcctctcctctagtatcgtcgcttatcagccagctggtgataattctcacacctttgacgtgaccgctatgtttaagtcgatagggattttccttggaatcttttcaggctccttcgccatgggcgctgcaaccggggtggtcactgcacttgtgacaaaatttaccaagcttcgggaatttcaactcttagaaactggtctgttcttcctgatgtcttggagtacatttttactcgccgaagcatggggcttcactggcgtggttgccgtgctcttttgtggcataactcaggcccactacacctataataacttaagcaccgaatcccagcaccggacaaaacagctgtttgagttgctcaactttctcgctgaaaacttcattttctcgtatatggggttgactctctttacttttcaaaatcacgttttcaatccaacgtttgtggtgggggcattcgtggctatctttctcgggcgtgcagctaacatctatcccctgtctttgctgcttaacttgggaaggcggagcaaaattggcagcaactttcaacacatgatgatgttcgctggtctgaggggtgcgatggcattcgcactagcaatacgcgacactgccacatatgcccgtcaaatgatgttttccacaactctgttgatcgttttttttaccgtttgggtgtttgggggagggactactgcaatgttgagctgcctccacattcgggtgggggtagatagtgaccaagaacatctaggcgtacccgagaacgagcgcagaactaccaaggctgagagcgcctggctttttcgcatgtggtacaattttgaccacaactacttgaagcctctcttgacccattccgggccaccattaaccactacgctcccagcttgttgtgggccaatcgcgaggtgccttacgtcccctcaagcatacgaaaatcaggagcagttgaaggacgacgacagcgacctcattcttaatgacggcgatattagcctgacttacggcgatagtacggtcaatacagagcctgccacaagcagcgcacctagaaggttcatgggcaattctagcgaagatgcgttagaccgcgagctggcctttggagaccacgaactggtgattaggggcacgcgcctcgtgctccccatggacgattctgaacctcctctgaatctcctggataatactcggcatggcccagcctag

SEQ ID NO: 241867 - DNA, 2010 bp, synthetic construct
  misc_feature 1..2010: note = Description of Artificial Sequence: Synthetic coding sequence
  source 1..2010: mol_type = other DNA
atggcacggcgtggctggagacgggctcccttacgtcgcggagtagggtccagccccagagcgagacgattgatgcgcccactatggctcctgctggcagtgggcgttttcgactgggcaggtgctagtgacggcggtgggggagaggctagagctatggacgaagagattgtgtccgaaaagcaggccgaggaaagccatcgtcaggatagcgctaatctgctgattttcatactactcctcactctgacgattttgaccatctggctgtttaaacaccggcgtgcgaggttcttacacgagaccggacttgctatgatttatggcttgctggtggggctcgtgcttcgctacgggatccatgtgccaagcgacgttaataacgtaactctaagctgtgaggtacagagttcccccactacactgcttgtcacatttgacccggaggttttctttaatatccttctgcctccaattattttctatgccggttacagtttgaaacggagacacttcttcaggaatcttggatcaatactagcttatgcttttcttgggacagcaatcagttgttttgtcattggcagcatcatgtatgggtgtgtgactctaatgaaggtcactggacagttggctggggatttctacttcactgattgtttattatttggggctatagtcagtgctactgaccccgtgaccgtgttagccatctttcacgaattgcaagtggatgtggagctatatgcacttctttttggggagagcgttctcaacgatgcggttgcgattgtcctgagctccagtattgttgcttaccagccggctggcgacaactctcatacattcgacgtgacagccatgttcaagtcaatcggcatcttcctcggaatcttctccggatccttcgctatgggcgctgcaaccggcgtagtgactgcgctggtgactaaattcactaaactacgagaatttcagcttctggaaacgggtctcttttttttgatgagttggagtacatttttactcgctgaggcatgggggttcacgggcgtggtagccgtattattctgtgggataacccaggcccattacacttacaacaacctgtcaactgaatcacagcatagaacgaagcaattgtttgagctcctgaatttcctggctgaaaatttcattttctcttacatggggttaactctattcacttttcaaaatcacgttttcaatccaacctttgttgtgggagcttttgtagctatctttctcggcagggcggcaaacatctaccccctatctttgcttctgaacttgggccgtcgaagcaagataggctcaaacttccagcatatgatgatgtttgcaggccttcggggagccatggcgttcgctctggcaattagagataccgctacttatgctcggcagatgatgttcagcacaacactcctgattgtgttttttacagtatgggtgttcgggggagggactacagctatgttatcatgtcttcacattagagtcggcgtggatagcgaccaggaacatctgggagtgccggaaaatgagagaagaaccactaaagccgagagcgcatggctgtttcgcatgtggtacaattttgatcacaattacttaaagccactcctgacgcattccggccctccattgaccacaacactaccagcctgctgcgggcctattgcacggtgtctgacatcacctcaagcctacgaaaaccaggagcagctcaaagacgatgacagtgatctcattctcaatgacggagacatttcacttacttatggggattctactgtaaatactgagccagcaacttcatctgcaccgaggcgatttatgggcaactcttctgaggacgctctcgaccgagagctagctttcggagatcatgaactggtcatccgcggtacacgtctcgtgctgcctatggacgatagtgagcccccactcaatcttcttgacaacacacggcatgggccagcttag

SEQ ID NO: 241868 - DNA, 1950 bp, synthetic construct
  misc_feature 1..1950: note = Description of Artificial Sequence: Synthetic coding sequence
  source 1..1950: mol_type = other DNA
atggacgaggagatcgtcagtgagaaacaggcggaggaatctcatcggcaggactccgctaacctgctgatctttatcctcctactcacactcaccatcctaacaatctggctctttaagcatagaagggcccgtttcttacacgagaccggcctggcgatgatatacggcctgttggttgggctggtcctgcgttacggaatccacgtcccatccgatgtcaataatgttacactgagttgcgaggtgcagagttctccgaccacccttctcgtaaacgtcagcggtaagttttacgagtatatgctcaagggagaaatcagttcgcacgagctaaacaatgtacaagacaacgaaatgctcagaaaagtgacatttgatccggaggtcttttttaacattcttcttccacccatcatcttttacgccggttacagtctcaaaagacggcacttcttccggaatctcgggtccattcttgcgtacgcatttctgggtaccgcaatatcttgtttcgttataggctctatcatgtacggctgtgtgacgctgatgaaggtaacgggtcagttggcaggagatttttattttaccgactgcttgttgttcggggctatcgtgagtgcaacagacccagtgacagtcctagccatcttccatgagctgcaggtggacgtggagctttacgcgctcctgtttggagagtccgtgctaaacgacgcagtggccatcgtgctcagctcttcaatcgtggcttatcaacctgctggcgataattcccatactttcgatgttaccgccatgtttaagtctatcggcatcttcctaggcattttctctgggagctttgccatgggagcagctaccggggtggtgaccgccctcgtgaccaaattcactaaactgcgcgaatttcaactgctagagacaggcctgttcttcctgatgagctggtctacgtttctgttagccgaggcctggggtttcactggcgtggtggcagtgctgttctgcggcattacccaggcccactatacttataataacctgagcacagaaagtcagcaccgtacaaaacaacttttcgagctgctgaacttcttggcggagaactttatcttcagttacatggggctgaccctattcacttttcagaaccatgtttttaatcccacctttgtcgtgggcgctttcgtggccatcttcctggggagagcggcaaatatctatcctctgtctctcttgctgaatctcggcagacgcagtaaaattggctccaatttccaacatatgatgatgttcgccggattgcgcggagctatggcctttgctttggccatacgcgacacagcaacctatgccagacagatgatgttttccaccacactcctaatcgtgttctttactgtctgggtgtttggcggaggaactactgctatgctgtcttgcctccatattagagtgggggtggattccgatcaggaacatctgggagtgccagaaaatgagcgaagaactacgaaagccgagtctgcgtggctctttcgcatgtggtacaattttgatcacaactacctgaaacctctcttaacacactcaggtcctccgctaaccaccacacttcctgcctgttgcgggcctattgctcggtgtctgacttccccccaggcatacgaaaaccaggagcagctcaaggacgatgactccgatctgatcctgaatgatggggatattagcttaacttatggagattctacagtcaacactgagccagctacttcttcagcccctcgtagatttatgggcaattctagtgaagacgcgctggacagagagctggccttcggggaccacgagttggtcattcgcggaacaaggcttgtattacctatggatgattccgaaccccctcttaatctgttggataatacaagacacgggccagcctag

SEQ ID NO: 241869 - DNA, 2178 bp, synthetic construct
  misc_feature 1..2178: note = Description of Artificial Sequence: Synthetic coding sequence
  source 1..2178: mol_type = other DNA
atggaacccggagatgctgccagaccaggttctggcagagcaaccggcgctccaccgcctcggctgctcctcctgcccctgttgctcggctggggcctgagggttgcagcagcagcatctgcgtctagtagcggcgcagccgctgaggactcctctgccatggaggaattggctaccgaaaaagaggctgaggagtctcaccggcaggacagcgtgagtttactcacgtttatcctcctgctgaccctgacaatcctgactatctggttgtttaagcaccgcagagttaggtttctgcatgaaacagggttggcgatgatctatggcctgatcgtgggcgtcatccttcgatacggaactcccgcaacaagcgggcgagataagtccctttcttgtacccaggaggacagagcattttccaccttgctggtgaacgtgtctggcaagtttttcgagtacacgttgaagggagaaatttcacccggtaagattaacagtgttgaacaaaatgatatgcttagaaaggtcaccttcgaccccgaggtcttttttaacatcctattaccgcctatcattttccacgccggttactcactcaagaagcgacacttctttaggaatctgggatccattctggcctacgcgtttctgggtaccgcagtgtcttgttttattatcggaaacctcatgtacggagtggtgaaattgatgaagattatgggacagctttctgataaattctactacacagattgtctcttctttggggcaatcatctccgcgaccgatcctgtgaccgtgttagctatctttaatgaactccatgcagatgtggacctgtatgcccttctgtttggcgaaagcgtgctcaacgacgcagtcgcgattgtgcttagctctagtatcgtggcctaccagcctgccggactgaacactcacgcctttgacgctgcagccttctttaaatccgtgggcatatttctgggcattttctccggatcttttacaatgggcgctgtgactggcgtgaatgctaacgtgaccaagtttacaaagctccattgcttcccgctgttggagaccgccctgttctttcttatgtcatggagtactttcctcttggccgaggcttgtggattcacgggagttgtcgctgtcctgttttgtggaattacccaggctcattacacatacaataacctgtctgtggagtcccgcagtcggaccaaacagctgttcgaggtgctgcacttcctcgcagagaatttcatttttagctatatgggactggccctttttacatttcaaaagcacgtcttttccccaatcttcattattggcgcttttgtggccatatttctcggcagagctgcacacatctatccgttgagcttcttcttaaacctgggaagacgccacaagataggctggaattttcaacatatgatgatgtttagtgggcttcggggtgctatggcattcgctctcgccattcgcgatacagcctcatacgcaagacaaatgatgtttacaacaactctgctgattgtgtttttcactgtttggattatagggggagggacaactccaatgctgtcctggttgaatatacgggtcggggtagaagagccaagcgaggaggaccagaatgagcatcactggcaatattttcgcgttggcgtggaccctgaccaggacccacccccaaacaatgattcattccaggtgctccagggtgacgggcctgacagcgcccgaggcaataggaccaaacaagaaagtgcatggatttttcgcctgtggtatagcttcgaccataactatctgaagccaatcctgactcattccggaccgccactgacaactactctccctgcctggtgtggactgttagctagatgcctcacctcccctcaggtgtatgacaaccaggaacctttgcgggaagaggactcggatttcatcctgactgaaggagacttgaccctgacatacggcgacagcactgtgacagctaacgggtcaagctcctctcacactgcctccacttcactcgagggttctcgcagaaccaaaagctctagtgaagaggtgttggagcgcgacctaggaatgggcgatcagaaagtgtcttcacgcggaacacggctggtgttcccgctggaagacaatgcttag

SEQ ID NO: 241870 - DNA, 1746 bp, synthetic construct
  misc_feature 1..1746: note = Description of Artificial Sequence: Synthetic coding sequence
  source 1..1746: mol_type = other DNA
atgggggagaagatggccgaagaggagaggtttcccaatacaacacacgagggcttcaacgtgacactacacactacacttgttgttacaacaaagcttgtactgccaactccgggtaagcccatcctgcccgtgcagaccggggaacaggctcagcaggaagaacagtcaagcgggatgaccatctttttttcccttctggttctggcgatctgcattatcctggtgcacctgctaatcaggtatagactgcacttcctgcctgaatcggtcgccgtcgtcagtctgggaatcctgatgggcgctgttatcaaaataatcgaattcaagaaactggctaattggaaagaggaagagatgtttcggcctaacatgtttttcctcctattgctgccacccataatcttcgagagtgggtactctctgcacaagggtaacttcttccaaaacattggcagcatcacactgtttgccgtgttcggaaccgctatcagcgcattcgtagttggcggtggcatatacttcctgggacaggctgacgtcataagcaaactgaacatgactgacagctttgcattcggcagtctgatctctgcggtcgatcctgtggctactatagctatcttcaacgcgttacacgtcgaccccgtacttaacatgctggtctttggagaatctatactgaacgacgcagtgtccattgtgctgacaaataccgccgagggcctgactaggaagaacatgtctgatgtgtcaggatggcagacattcctgcaggcacttgattattttctgaaaatgttttttggctccgccgctctgggaactctgaccggactaatcagtgccctcgtgcttaaacatatcgacctgagaaagacaccctccctcgaatttggtatgatgattatttttgcatacctgccgtacggtctcgctgaaggcatctcactgtcaggaattatggccattcttttctcaggaattgtgatgtcacattacacgcaccacaatctcagtccagttacacagatcttaatgcagcagaccttgcgcacagtggcattcttgtgcgagacatgtgtgttcgctttcctcggcctgagcattttctcctttccccataagtttgaaatatcgttcgtgatctggtgcattgtactggtgttgtttggaagggccgtgaatatctttcccttgtcatatcttctcaatttctttcgggaccataagattacccctaaaatgatgttcattatgtggttcagcggcctacgtggagcaattccttatgccctcagccttcacctggatctggaacctatggagaagcgccaattgataggtaccactacaatcgttatcgtcctgtttacaattctgctgctggggggatctacgatgccacttattcgtctaatggacatcgaggatgcgaaagcacaccgaaggaacaagaaggacgtgaacctatcgaagacagaaaagatgggcaacacagtggagtctgagcacctctccgagctaacagaggaagagtatgaagctcactacatcaggcgtcaagacctgaaaggatttgtgtggctggatgcaaagtatctaaaccccttcttcactcgcagattgacccaggaagatctgcaccacgggagaatacagatgaaaaccctgacaaataagtggtacgaagaggttcggcagggcccaagtggatcagaagacgacgagcaggaactgctatag

SEQ ID NO: 241871 - DNA, 1794 bp, synthetic construct
  misc_feature 1..1794: note = Description of Artificial Sequence: Synthetic coding sequence
  source 1..1794: mol_type = other DNA
atgggagagaagatggcggaggaagagcggttccctaataccacgcatgaaggatttaatgtcacattacacaccacgctggtggtgacaactaagttggtgctgccaacacccggtaagcccattcttccagtgcagacgggagagcaggcccaacaagaagagcagagctctggtatgacaattttcttctcactgttagtgctcgctatttgcatcatactggtacacctgcttatccgttataggttacatttcctgccagaatcagtggctgtggtcagcctcggtattttgatgggtgcagtaatcaaaattatagaattcaagaaattggcaaactggaaggaagaagagatgtttagaccaaatatgttttttttactgctgcttccaccaattatcttcgaatctggctactctctacacaaaggtaacttttttcagaacattggcagcataactctgttcgcagtattcggaaccgccataagtgctttcgtcgttggagggggtatttatttcctcgggcagggcttcttcttcgtgtgtgtgtgtgtcttcgtatgtttcattcttcaggccgacgtaattagcaagctcaatatgaccgattcctttgccttcggtagtttgataagcgcggtggatcctgtcgccacaatcgccatattcaacgcacttcatgtggatcccgtgttaaacatgctggtctttggagagagcattctcaatgacgcagtatccatcgtgttgacaaatactgctgagggactcacccggaagaatatgagcgatgtgagtggatggcagaccttccttcaggcgctggattatttccttaaaatgttcttcggatcagctgctctcggcacactgactggcctaatctccgctctggtcctgaaacacattgacctccgtaaaacacccagcctagagtttgggatgatgatcatcttcgcttacctgccttacggcctagctgagggcatttcattgtccgggattatggcaattttgttctctggcatagtgatgagccactacactcaccataatcttagccccgttactcagatcttgatgcagcagacactgaggacagtggcattcctgtgtgagacatgcgtgtttgccttcctggggctatctatattctctttcccccataaatttgagatttcttttgtgatctggtgcatcgtcctggtactttttggccgtgctgtgaacatatttccattgtcctacctgctaaacttttttcgggatcacaaaatcacacccaagatgatgtttatcatgtggttctcaggcttgcgcggagctattccttacgccctaagtctgcatcttgacctagagcccatggaaaaaaggcagttaatcgggacaaccacaatagtgatcgtcctgttcacgatcctgctgcttggaggtagcactatgccactgatacgcctaatggatatagaggacgccaaagcgcataggcgtaacaaaaaagatgttaatttatctaaaaccgagaagatgggcaatacagtggagtcagagcacctctcagaattaaccgaagaagagtatgaagcccactatatccgacggcaggaccttaaggggtttgtgtggcttgatgccaaatatctgaaccccttcttcacccgcaggctgacccaggaagacctgcaccacggacggatccagatgaagacactcaccaataagtggtacgaagaagttagacaggggccatccgggtcagaagacgacgagcaggaattactgtag

SEQ ID NO: 241872 - DNA, 1089 bp, synthetic construct
  misc_feature 1..1089: note = Description of Artificial Sequence: Synthetic coding sequence
  source 1..1089: mol_type = other DNA
atgctggtgtttggtgaaagcatcctcaatgacgcagtttctatcgtcctgacaaacaccgccgaaggtctgacacgcaaaaatatgtcagacgttagcggctggcagacctttctgcaggccttagattacttccttaaaatgtttttcggcagcgctgctttggggacactgacgggtctgatttccgcgctggtccttaaacacatagatttgcggaagacgccgagcctggagtttggaatgatgatcatcttcgcctaccttccatacggactggctgaggggatttcactttctggtataatggctatcctgtttagcggcatcgtcatgtcccattacactcatcacaatctgagtcccgtcacccaaattcttatgcagcagacactgagaacagtggccttcctgtgtgaaacctgcgtctttgctttcctcggactcagcatcttttcgttcccccataaattcgaaatttctttcgtgatttggtgcattgtgttggtcctcttcggcagggccgttaatatcttccctctgagctatctgttgaacttcttcagggaccataagatcacccccaaaatgatgttcatcatgtggttttctggcttgagaggcgctataccgtatgccttatccctgcatctcgacctggagccaatggagaagagacagctcatcggaactaccactatcgttattgttctcttcaccatcctccttctgggaggatccaccatgccactgataagactgatggatatcgaggatgcaaaggctcaccggcgtaataaaaaagacgtgaacttatctaagacagaaaagatgggcaacacagtcgagagtgagcacctatctgaattgaccgaggaggaatatgaggcccactatattaggcggcaggaccttaagggattcgtctggctggatgctaaatacctgaatccctttttcacaagacggctgacccaggaggacctgcaccacggaaggatacagatgaaaaccctgactaacaaatggtacgaggaagtgcgacagggcccatccggatcagaggacgacgaacaggaactgttgtag

SEQ ID NO: 241873 - DNA, 846 bp, synthetic construct
  misc_feature 1..846: note = Description of Artificial Sequence: Synthetic coding sequence
  source 1..846: mol_type = other DNA
atgatgatcatattcgcttatctaccctacgggctcgctgaaggaatttctctgagcgggataatggccatcctgttctccggaatagtcatgagccactacacacatcataacctttctcctgtcacccagatccttatgcagcaaaccctaagaactgtggcatttttatgcgaaacctgcgttttcgcttttctggggctttcaatattttctttccctcacaaatttgaaatctcatttgtcatctggtgtatcgtcctggtactattcggacgagctgtaaacatttttccactgtcatacttactcaatttctttcgggaccataagattacaccaaaaatgatgttcatcatgtggtttagcgggctgcgcggagccattccgtatgcattatcactccatctggatctggagccaatggagaagcgacagctgattgggaccaccaccatcgtcatagtcctgtttacaatcctcctgctaggcggaagcaccatgccccttatccgactgatggatatagaagacgcgaaagctcacaggagaaataagaaagatgtaaatctgtccaagactgaaaaaatgggcaatactgtcgaaagtgaacacctaagcgagctgacggaagaggaatacgaggctcactacatcagaaggcaggatctgaagggatttgtatggctggacgcaaagtatctgaatcctttcttcacccggaggctcacccaggaggacctacaccatgggcgaattcagatgaagaccctcaccaataaatggtatgaagaggtgaggcagggcccaagtgggtccgaagacgatgagcaggaactcctgtag

SEQ ID NO: 241874 - DNA, 1938 bp, synthetic construct
  misc_feature 1..1938: note = Description of Artificial Sequence: Synthetic coding sequence
  source 1..1938: mol_type = other DNA
atggaaaggcaatctcgagtgatgagtgaaaaggatgagtaccagttccagcatcagggtgctgtcgaactgctggtctttaattttctgctcatccttacgatcctgactatttggctgttcaaaaaccaccggtttcgatttttgcacgagactggcggagccatggtgtacggcttgatcatgggtctcatcctacgatatgctacagcgcctactgacatcgagagcggcacggtctacgattgtgttaagctgaccttttcaccaagtacactgcttgttaacatcaccgaccaggtttatgagtacaaatataaaagggaaattagccagcacaacattaacccccaccagggtaatgctatcttagaaaagatgactttcgaccctgagattttctttaacgtattactgcctccgattatcttccacgcaggatatagcctaaagaagcgtcacttttttcagaatttggggtccatactaacctatgcctttctagggactgccatcagttgcatagtgatcggtctgatcatgtacgggttcgttaaggcaatgatccacgccggacagttgaaaaatggtgactttcattttaccgattgtctgtttttcggctccttaatgagcgccacagatcccgtaactgttctcgccatttttcatgagcttcacgtcgacccagacctctacacgctactgtttggagaaagtgtcttgaacgatgccgttgctattgtgctgacttactctattagcatttacagccctaaggaaaacccgaatgccttcgatgctgctgccttttttcagtcagtgggaaatttcctgggaatatttgctggatctttcgccatgggtagtgcctacgcgattatcacagccctgctgacgaaattcaccaaactctgcgagtttcctatgttagaaactggtttattctttctgctaagctggtcagcgttcctgtccgccgaggcagccggactgactggaattgttgccgtgctgttttgtggagtcactcaagcccattacacctacaacaacctctcttctgatagcaagattcggaccaaacagttgtttgaattcatgaattttctggccgaaaatgttattttttgctatatggggctcgccctgttcactttccaaaatcacatattcaacgccctgtttatccttggcgcattcctagccatcttcgtggcgcgtgcttgcaacatctacccgcttagctttttgttaaacctgggacgcaagcaaaaaatcccatggaactttcagcatatgatgatgttcagtggacttaggggggctatcgcgtttgcccttgctattagaaatactgagagtcagcccaagcagatgatgttcaccacgactttgctgctcgtgtttttcactgtttgggtctttggcggtgggacaactccaatgctgacttggctgcaaataagggttggagtggatcttgatgagaatctgaaggaggatcctagcagccagcaccaggaggcgaacaacctggacaagaatatgacgaaagctgagtctgccagactcttcaggatgtggtacagcttcgaccataagtacctgaaacccatcctcacccactccggccctcctcttactacaacattgccggaatggtgtggccctatatctagattactcacctctccccaggcctatggagagcagctcaaagaagatgacgtggaatgcatcgtgaaccaggacgagctggctatcaattaccaggagcaggccagcagcccatgttcacccccagcgaggttggggctggatcagaaggcctcgcctcagactccaggaaaggaaaatatctacgagggcgacttgggactgggcggatacgaactgaagctagagcagacccttggacagtctcagctaaactag

SEQ ID NO: 241875 - DNA, 978 bp, synthetic construct
  misc_feature 1..978: note = Description of Artificial Sequence: Synthetic coding sequence
  source 1..978: mol_type = other DNA
ctgcgcctgcagagttcctgggaacagatgacttttgacccagagattttttttaatgttttgctgcctcctataattttccatgccggttactccttaaagaaacgacacttctttcagaacctaggctccatccttacatacgcattcctggggaccgcaatttcgtgcatagtaatcggcctcatcatgtacgggtttgttaaggctatgatccatgcagggcagttgaagaatggggacttccatttcaccgattgccttttctttggttctctgatgtccgcgactgacccagtgacagtactggccatcttccacgaattacacgtcgacccagacctgtacactttgctgtttggcgagtccgttcttaatgacgctgttgctattgtactcacatatagtatttccatttattcacccaaggagaatcccaacgcctttgacgctgccgctttttttcagtcagtcgggaacttcctgggaatttttgcaggcagtttcgctatgggtagtgcctacgccatcattactgcattgttaaccaaattcacaaagctgtgcgagttccccatgctcgaaaccgggttattcttcctgctcagctggagtgctttcctgagtgcagaggccgcaggactgacaggcattgtggccgttctgttttgcggggttacccaggcccactatacctacaacaatctaagttccgacagcaaaatacggaccaagcaactcttcgaatttatgaattttctggccgagaatgttatcttttgctacatgggactggccctttttacgtttcagaatcacatattcaacgctctgttcatcctgggcgcattcgtttccatcttcttagcaagagcacatactgagctcaaaaaccttttattcttcttagcgtcattcctctgctactttagtcaccgctcaaaaggactcccaatggctggctgtgccctgccatag

SEQ ID NO: 241876 - DNA, 3534 bp, synthetic construct
  misc_feature 1..3534: note = Description of Artificial Sequence: Synthetic coding sequence
  source 1..3534: mol_type = other DNA
atggccggaatcttcaaggaattttttttctcgactgaagatctgccagaggtcatactgaccctgtctctgatatcatcgatcggtgccttcctgaatcggcacctggaagacttccctatacccgtgcccgtcattctcttcttgctgggctgctcctttgaagtcctcagctttactagtagtcaggtccagcgctatgctaacgccatccagtggatgagccccgatctgttttttcggattttcacacccgtagtcttcttcactaccgcgttcgacatggacacttacatgctgcagaaacttttctggcagatcctgctgattagtattcccggatttctagtaaactacattctcgtactgtggcacctcgcaagtgttaaccaattgcttttaaagcccacccagtggctgctcttcagcgccatcctagttagttccgatccaatgctaactgctgccgcaattcgggatttggggctgtcccggagtttgatttcgttaatcaatggggagagtctgatgacatctgttatttcgctcatcactttcacttccattatggactttgatcagcggttgcagtctaagcgtaatcacacactagccgaagagatagtcggcggtatatgttcctacatcatcgcctcattcctgtttgggatcctttcttctaagttaattcaattctggatgtccactgtgttcggcgacgacgtcaaccacattagtttaattttctccatcctgtacctgattttttacatatgcgagctagtaggtatgtcaggcatattcaccctcgcgatagtgggcctcttgcttaatagcacaagcttcaaggcggctatcgaagagacactgctcctggaattctggaccttcttgagccgcatcgcatttcttatggtgttcaccttcttcggtctgctgatcccggctcacacctacctgtacattgaatttgtcgatatatactattccctcaatatttacctgaccttgatcgtgctgagatttttaaccttgctgctaatctctccagttctgtctagggtaggacatgagttttcttggagatggatattcatcatggtgtgcagtgaaatgaaaggaatgccgaatatcaatatggccctactattagcctatagcgatttgtacttcggttcggacaaggagaaaagccaaattctcttccacggtgtgctcgtgtgtctgatcaccctagtggtgaaccggttcatacttcccgtggccgtgaccatcctggggctgagggatgccacctcaactaagtacaagagtgtgtgctgcacttttcaacacttccaggaattgacaaagtcagccgcttcagcccttaagtttgacaaggacttagctaacgccgactggaatatgatcgaaaaagctataacactggagaatccctacatgcttaacgaggaggaaactactgagcaccagaaggtgaagtgtccccactgcaacaaggaaatcgatgagattttcaacactgaggctatggaactcgctaataggcggctgctgagcgcacagattgcttcttaccaaaggcaataccgaaatgaaattctatctcagtccgcggtgcaggtcctggtgggagctgccgagtcttttggcgagaagaaggggaagtgtatgtcgctggatacgataaaaaactattcggaatctcagaaaaccgtgaccttcgccaggaaactgctcctcaattgggtgtataacactcgcaaagagaaggagggaccttctaagtacttctttttcagaatatgccacactatagtgtttactgaagagtttgagcatgtgggctacctggtgattctcatgaatatctttcctttcattatcagttggattagccagctcaatgtgatctaccactccgaacttaaacacactaactactgtttcctcactctgtacatcctcgaagctctcctgaaaattgcagcaatgcgcaaagactttttctcacatgcctggaacatctttgaactagctataaccctgattggcattctgcatgttatcctgattgaaattgacacgatcaagtacattttcaatgaaaccgaggtcatcgtcttcatcaaagtcgtgcagttctttaggatcctacgtatattcaagctgatcgccccaaaactgcttcagatcatcgacaaacggatgagtcaccagaagactttctggtacggcattttgaagggttacgtccagggcgaagcagacatcatgacgattattgaccagattacgtcaagtaagcagattaaacagatgctgctgaagcaagtgatcagaaatatggaacatgccattaaggagctgggttatctggagtatgatcaccccgagattgccgttactgtgaaaacgaaagaagagatcaatgtgatgctgaacatggcaaccgaaatcctgaaggcctttgggctgaagggcattatctccaaaaccgaaggcgctggaataaataagctaattatggctaagaaaaaggaagttcttgactcacagtcgattattagacccctcacggttgaagaggtcctgtaccacatcccttggttggacaaaaataaagactacattaacttcatacaagaaaaggctaaggttgttacctttgactgcggtaacgatatctttgaagagggtgatgagccaaagggaatctacatcatcatctcgggcatggtcaaattggagaagtccaagccaggtctcggaatcgatcagatggttgagagtaaagaaaaggattttcctattatcgacaccgattacatgctgtcgggcgaaatcatcggggagataaattgcctgaccaacgagcctatgaaatacagcgcaacttgcaaaaccgttgtggaaacatgttttatccctaaaacgcatttatatgacgcatttgagcagtgttcgccccttattaagcaaaagatgtggctaaaactggggttggctattacagccagaaagatccgtgaacacctgtcctatgaagactggaactacaatatgcaactcaagctgtcaaacatttacgtagtggatatcccgatgagcaccaagaccgacatatatgacgagaacctcatatatgtgatcctgatccacggcgctgttgaggactgcctcctgcgaaagacttaccgggcacctttcctcattccaattacatgccaccagatccagtccattgaagactttaccaaggtagtaataattcagactccaatcaatatgaagaccttccggagaaatattcggaagtttgtacccaagcataagagctatctgacgccaggattgatcggctctgtgggcacattagaagaagggatccaagaagagaggaacgtgaaagaggatggcgctcattctgctgcgacagctcggagcccccaaccttgttccttgttaggaacaaaatttaattgtaaagagtcaccaaggatcaacctgagaaaggtgcgaaaagagtag

SEQ ID NO: 241877 - DNA, 3390 bp, synthetic construct
  misc_feature 1..3390: note = Description of Artificial Sequence: Synthetic coding sequence
  source 1..3390: mol_type = other DNA
atggccggaatctttaaggagttcttcttttccaccgaagacctaccagaagtcatcctgacactttctctcatttccagcatcggtgccttccttaacaggcatcttgaagactttcccattccggtaccagtgattctttttctgcttgggtgcagttttgaggtgctttcattcactagttcacaggtacagcggtacgctaatgccatccaatggatgtccccagatctctttttccggatttttacccccgtggtattctttacaactgcattcgacatggatacatacatgcttcagaagctcttctggcagattctcctcattagcatacccggtttcctggtgaactacatccttgtactatggcaccttgcaagcgtcaatcagttgctgctgaaaccgacacagtggctgctgttttctgctattctcgtttcctcggatccgatgttaaccgccgcagcaattcgagatctggggctgagccggtcactgatctccctaatcaacggcgaatctttgatgacctccgttatttcactgatcacctttacgtctattatggatttcgatcagagactccaaagcaaaagaaatcacacccttgctgaggaaattgtagggggaatttgtagctacatcatcgccagctttctttttggaattttgtcctctaaactcatacaattttggatgagtacggtctttggagacgacgtgaaccatattagtctgatcttcagcattctgtatctgattttttacatctgtgagttggtgggaatgtcgggaatcttcaccctggcaattgttgggctgctcctaaacagcacatccttcaaggcagccatcgaagaaactctgttgctggagttcctcaccctgttgctgatttcacctgtgctctctcgcgtgggccatgagttctcctggcgatggatattcataatggtgtgctccgagatgaagggtatgccaaacatcaacatggccctcttgctggcgtacagtgatctttattttggatctgataaggagaagtcccagattttgtttcacggagtgctggtctgtctgatcaccttggtggtcaatcgatttattctgcccgtcgctgtcacgatcctggggctccgcgacgccacaagcacaaaatacaagagtgtgtgctgcaccttccagcattttcaggaactgacaaagagcgcggcaagcgcacttaaatttgacaaggatctggctaacgcggactggaatatgatcgaaaaagcaattaccctggagaatccatatatgctgaatgaagaagagacgaccgagcatcagaaagtgaaatgtccgcattgcaacaaagagatcgatgaaatctttaataccgaggccatggagctcgccaatagaagactcttatcggcacagatagcatcctatcaacgacagtatcggaacgagattttaagccagtctgcggtccaagtcctcgtcggggctgccgagagcttcggcgaaaagaagggtaaatgtatgtctctcgacacaataaagaactactccgaaagtcaaaaaacagtgaccttcgcacggaaactcctgctaaattgggtatacaacacgaggaaggagaaggagggcccttctaaatacttcttcttccgcatctgtcacacaatcgtgtttaccgaggaattcgaacatgttggatatctggtgattttgatgaatatctttccttttatcatctcttggattagccagttgaacgttatctaccatagcgagctgaaacataccaactattgctttctaacgctatatattttggaagccctcctaaaaattgctgctatgagaaaagatttcttcagccatgcttggaatatttttgaacttgccatcacactgatcggaatcttgcatgtaatcctgatcgagatagacaccatcaaatacatattcaacgagaccgaagttattgtttttatcaaagtggtccagttttttagaattcttaggatcttcaagttgatcgcaccaaaacttctccaaatcattgacaagcgtatgtcccaccaaaagacattttggtacggtatccttaaaggctatgttcaaggggaagccgatattatgactataatcgaccaaatcaccagcagcaagcagatcaagcagatgctcctgaaacaggtgattaggaatatggagcacgccataaaggaactcggctaccttgagtacgaccatcccgaaatcgctgtgactgtgaagactaaggaagagatcaacgttatgctcaacatggccaccgaaattttgaaggcattcggccttaagggtatcataagcaagaccgagggggcaggcataaataagcttatcatggcgaagaagaaggaggtattagattcacaaagcattatacgcccactcaccgtagaggaagtcctgtatcacatcccgtggctcgacaagaataaagattatatcaatttcatccaggaaaaggctaaagtagtgacctttgactgcggtaatgacatttttgaagagggagatgagcctaagggaatttacatcattatttcgggcatggtgaagctggagaagtctaaacctggcctcggcatagaccagatggtggaatctaaggaaaaggacttccccatcatagacacagactatatgctctccggagagattatcggggagatcaattgtctgaccaatgagcccatgaagtactcagcgacgtgtaagaccgtggtggaaacctgctttattcccaaaactcatctgtacgatgcgtttgaacagtgctctcctttaatcaagcagaagatgtggcttaaactgggattagctataactgccaggaagattcgagaacatctcagttacgaggactggaattataatatgcagctgaaactatccaacatctatgttgtagatatccccatgtccactaagaccgatatctacgacgaaaaccttatatatgtaatccttatccacggtgcagtagaggattgtttgcttcgcaagacatatcgagccccttttctgatccccatcacctgccatcagatccagtccatcgaggacttcaccaaggtagtgatcatccaaactccaatcaatatgaagacgttcagacggaacattcgcaaattcgttcccaagcacaagtcatacttgacccccggtctgataggctctgtcgggactctggaagaaggcattcaggaagaaaggaatgtaaaagaggacggagcacacagtgcggctactgctcggagcccccagccatgcagcctgttgggcacaaaatttaactgtaaagaatcaccacgaatcaatctgcgaaaggttcgcaaggagtag

SEQ ID NO: 241878 - DNA, 2079 bp, synthetic construct
  misc_feature 1..2079: note = Description of Artificial Sequence: Synthetic coding sequence
  source 1..2079: mol_type = other DNA
atgcaggggaagaaacctggtgggtcgtcagggggaggaagaagcggtgagctgcagggggacgaggcacagcggaataagaagaagaagaaaaaagtgagctgtttctccaatataaagatttttcttgtctcagagtgtgctcttatgctggcacaagggacagtgggagcatacttggtctcagtcttaacaaccctggagagacgatttaacttacagtcagccgacgttggagtgattgctagctcctttgagattggaaacctggcactcatcctgttcgtctcttattttggggctcggggacatcgacccaggctgattggttgtggaggcatcgtcatggccctgggtgctctcctgagtgctctgccagagttcctgactcaccagtataaatatgaggctggggagatccgatggggcgcagaaggcagggacgtgtgtgcagcgaacggcagcggaggggacgagggcccagaccccgacttgatctgcaggaatagaactgctacaaacatgatgtatctcctgcttataggtgctcaggtgctgttaggcataggtgcaaccccagtccagcctttaggtgtctcttatatcgacgatcacgtgcgcaggaaggacagcagcctctacatcggaatactctttacgatgctggtgttcggccctgcttgcggatttattctgggaagcttttgtacaaagatctatgtggatgctgtcttcattgatactagtaacctcgacatcacccccgacgaccccaggtggatcggtgcttggtggggagggttcctcctctgcggggctctgctgttcttttccagcctcctcatgttcggctttcctcagagcctccctcctcactccgagccggctatggaatcagaacaggccatgctttctgagcgcgagtacgaaagacccaagccaagtaacggggtccttaggcaccccttagagccagacagctccgctagttgtttccagcagctaagagtcatcccgaaggtaactaagcacttactttccaatccagtcttcacgtgtatcattctggccgcatgtatggagattgccgtggtcgctggattcgctgcatttctcggaaagtacctcgaacagcaattcaacctgactactagctctgctaatcagctgctcggtatgaccgccataccatgtgcatgcctcgggatttttctaggaggcctgctagtcaaaaagctgagcttgagtgctcttggcgcaatcagaatggctatgttagtcaacctggtctccaccgcatgttacgtgtcctttttgtttcttggctgtgacaccgggccagtcgccggagtgacggtgccatacggcaactcaaccgccccaggctccgcattagatccgtacagcccctgtaataataactgtgagtgtcagacagactcgtttacccctgtttgtggtgcagatggtattacctacctttctgcatgttttgccggttgtaactctacaaatcttaccggatgtgcatgcctgacaactgtccctgctgaaaacgctaccgtggtgccaggcaaatgcccttccccaggctgtcaggaagcctttttgacttttctctgcgtcatgtgtatatgttccctgatcggagcaatggcccagaccccatctgttatcatcctgatacgaaccgtctctccggagctgaaatcctacgccctcggtgtcctgtttttgctgctccgactcctgggattcatccctcccccactgatcttcggtgccggaatcgattcgacttgcctcttctggagcaccttctgcggtgaacaaggtgcctgtgtgttatacgataacgtcgtatatagatacttgtatgtcagtattgcaattgcactgaagtcctttgctttcatcctttacacaactacctggcagtgcttaagaaagaattataagcggtatattaagaaccacgagggaggactcagtacctctacagaataccaggatatcgagacagagaagacatgtcctgaatcccactcccccagcgaggactccttcgtgaggagttag

SEQ ID NO: 241879 - DNA, 2076 bp, synthetic construct
  misc_feature 1..2076: note = Description of Artificial Sequence: Synthetic coding sequence
  source 1..2076: mol_type = other DNA
atggaccaaaatcagcatttgaacaaaacagcggaggctcagcccagcgagaataaaaaaacgagatactgtaacggactcaaaatgtttctggctgcattatctcttagctttatcgcgaagaccttgggggcaatcattatgaaatcttccattattcacatagagcgcaggtttgagatcagctcatcccttgtgggattcatcgatgggagtttcgagattggaaatctgctagtgattgtgttcgtgagctattttggaagtaaattgcatcgccctaagttgatcgggattggttgtttcataatgggaatagggggagtcctgaccgccctcccacatttttttatgggatattaccggtactctaaggagaccaacatcaatagtagcgagaattctactagcaccctgagtacctgcctgattaaccagatcctgtccttgaaccgtgctagccccgagattgtcgggaagggatgcctgaaggagtctggtagctacatgtggatttacgtctttatggggaacatgttacgtgggataggggaaaccccgatcgtgcctctgggactaagctatatcgacgacttcgcgaaggaaggtcattcctctctctatctgggaattctcaatgctatcgccatgatcggcccaataattggattcacactgggatcactgttttccaaaatgtacgtagacatcgggtacgtggacctgtctactatccgtatcacccctaccgatagccggtgggtcggggcatggtggctgaacttcttagtctccgggctgttttcgattatttcatctattccctttttctttctccctcagacgcccaacaagccccagaaggagcgaaaggccagcttgagtctgcacgttttagagaccaatgatgagaaagatcagaccgctaatctgaccaaccagggcaaaaacattactaagaacgtgacaggctttttccagtcttttaaatctatcttaactaacccactgtacgtgatgtttgtgctgctgacactcctacaggtgtcatcttatatcggcgcttttacctatgtatttaaatacgtggagcagcaatacggtcagccaagttcaaaagcgaatatcctgctgggggtgattaccatccctatatttgcgtccgggatgtttctgggcggatacatcatcaagaaatttaagctgaacactgtcggtatcgccaagtttagctgcttcacagccgtgatgagcctttctttctacctcctgtactttttcatcttatgtgagaataaaagcgtggcaggcttaaccatgacctacgatggaaacaaccctgtgactagtcaccgcgatgtccctcttagttattgtaacagtgactgcaactgcgatgaaagtcagtgggagcctgtatgcggcaacaatggtatcacctatatcagtccttgtctcgctgggtgcaagagctccagtggcaataagaagcctatagttttttataattgctcctgtctcgaggtgaccggcctacagaatcgtaactattcagcacatctgggcgaatgccctagggatgatgcctgcactcggaaattctacttctttgtggccatacaggtcctcaacctgttttttagcgcattaggcggaacttcccacgttatgctgattgttaaaattgttcagcctgagttaaaatccctggccttagggtttcactccatggtaatcagagcactcggtggcatcctggctcccatctatttcggcgcacttattgacacaacttgcattaagtggtctaccaacaactgcggcacccgaggatcatgtcgaacttacaattccacttccttctcgcgcgtctacctgggtctctcatccatgctcagggtatcatctctggttctatatattatcctcatatatgccatgaagaagaaataccaagaaaaggacattaacgcctccgagaatggatcggtgatggatgaggcaaacttggagtccctgaataaaaacaaacattttgtcccatcagcgggagcggacagcgaaacacactgctag

SEQ ID NO: 241880 - DNA, 2109 bp, synthetic construct
  misc_feature 1..2109: note = Description of Artificial Sequence: Synthetic coding sequence
  source 1..2109: mol_type = other DNA
atggatcagcatcagcaccttaataaaaccgccgaatccgccagctctgaaaaaaaaaaaacacggagatgtaacgggttcaagatgttcctggccgcactgtcttttagttatattgctaaagcgctggggggaatcatcatgaagatcagcatcacacagattgagaggagattcgacatctcgtcaagcctggctggcttaattgatggctctttcgaaatcgggaatctgcttgtgatcgtgtttgtgagttattttggcagcaagctccatcgtcctaagctgataggaataggatgtctgctcatgggaacgggctccattttaacatcattgccccacttcttcatggggtattataggtactccaaggaaacccatattaacccttccgaaaattctacaagctctctaagcacttgccttatcaaccagacgctcagtttcaacgggacctccccagaaatcgtcgagaaagattgcgttaaggaatctggttctcatatgtggatctacgtgttcatgggaaacatgctgcgcggtatcggagaaacccctattgtacctttggggatatcttacattgacgactttgccaaggagggacatagttctctttacttgggatccctgaatgctattgggatgatcgggcctgttataggatttgcgctggggtcactattcgccaaaatgtacgtggatatcgggtatgtggacctgagcacgatcaggattacgcctaaagactctcgatgggtcggcgcttggtggctgggattcctggtatccggcctgttctcaataattagttctataccctttttctttctcccaaagaatcccaataaaccccagaaggaaagaaagatttccctgtctctgcatgtgctgaagacgaacgatgaccggaatcagacggctaatctaaccaatcaggggaagaacgtgactaagaatgtaactggatttttccagtccctgaagtccatcctaacaaatccactgtatgtcattttcctgctgctgactctgctgcaggtgagctcctttatcggttcctttacttacgtgtttaaatatatggagcagcagtatggccagtctgcgtcacatgctaacttcttgcttgggatcatcactattcctacagttgccaccggaatgttcctgggaggttttattattaagaagttcaagcttagccttgtcggaattgcaaagttctcatttctcacgtcgatgatttccttcctctttcagttgctatattttcccctcatctgcgagagcaagagcgtggcagggctcaccctgacttatgatggcaataattctgtggcgtcccatgtggacgtgccgctcagttattgtaattccgaatgcaattgtgacgagtcacagtgggagccggtctgtggaaataacgggatcacatatctgagtccttgcctggccggatgcaagagctcatctggaatcaagaaacatactgtcttttacaactgttcctgcgtggaggtaactggactgcagaaccgtaactattctgctcacctcggggaatgtccgagggacaatacctgtacacggaagttttttatttatgtcgcgattcaggtgatcaacagtctgttcagcgccaccgggggaactaccttcatcctgttgaccgtaaaaattgtgcaacctgaattaaaagctctggcgatggggttccagagcatggtgatacgcactctcggtggaatattggctcctatctacttcggggctctgatcgataagacctgcatgaaatggagcacaaactcatgtggcgctcagggcgcatgtcggatctataacagcgtgttctttgggagggtctatctcggcctgtccatcgcactcaggtttcccgctttagtactctatattgtttttatcttcgccatgaagaagaagttccaaggcaaggacaccaaggcatccgacaacgagagaaaggttatggatgaagcaaacttagagttcctcaataatggagagcattttgtaccaagcgccggaacagactcaaaaacatgcaatttggacatgcaagataacgctgccgctaactag

SEQ ID NO: 241881 - DNA, 2109 bp, synthetic construct
  misc_feature 1..2109: note = Description of Artificial Sequence: Synthetic coding sequence
  source 1..2109: mol_type = other DNA
atggaccagcaccagcacctgaataaaaccgcagaaagcgcctccagcgagaagaaaaaaacaagacgttgtaacggatttaagatgtttcttgccgctctgagcttctcctacattgcgaaggctctggggggaattattatgaaaatctctatcacccaaattgagagacggttcgacatttcgtccagcctggccggtctcatagatgggtcatttgagattggaaacctcttggtgatcgtattcgtgtcctatttcgggagtaagcttcaccgcccaaaactgattggcattggttgtctcctcatgggcactggcagcattcttacaagcctgccccacttttttatgggatactaccggtattcgaaagagacacatattaatccctcagagaattccacttctagcctttccacatgtctgattaatcagacactttctttcaacggcacctcacccgagatcgttgaaaaagactgtgtgaaggagagcgggtctcacatgtggatctatgtattcatgggaaacatgctccgaggtatcggcgagacacctatcgtgccactcggaattagttacatagacgacttcgcaaaggagggacattcaagtctttacctgggcagtcttaacgccattggcatgatcggacctgtcattggatttgccttgggcagtctgttcgcaaaaatgtacgtcgacatcgggtatgtcgatctaagcacgatccggatcacacccaaagattctaggtgggtgggggcatggtggctgggtttcctggtgagcggccttttctcaatcattagctcaatcccgttcttcttccttccaaagaacccaaacaaacctcagaaagagaggaagatctcgctgtctcttcatgtactgaagaccaatgatgatagaaaccagactgctaacttgaccaatcagggcaaaaacgtaactaaaaatgtgaccggcttttttcaaagcctcaaaagcattctgacaaatcctctgtatgtgatttttctccttctcacactgctgcaagtgtcctctttcatcggctcctttacctatgtgtttaagtacatggaacagcagtacggacagtccgcctctcatgctaacttcctgctcggcatcataaccatccctaccgtagctaccggcatgtttctgggaggattcataatcaaaaaatttaagttatccttggtgggtatcgctaaatttagcttccttacctccatgattagtttcctctttcagctcctctattttcccctgatttgtgaatcaaagtctgtcgctgggctgactttaacctatgacggcaacaacagtgttgctagtcacgttgacgtccctctgagctactgcaatagcgagtgtaactgcgatgagtcacagtgggaacctgtttgcggaaacaacggcatcacctacttgagcccctgtttagcagggtgcaaatccagctcagggattaagaagcatacagtattctacaactgttcttgtgtggaggttaccggcttacagaacagaaattatagcgcccacctaggagaatgtcccagagacaacacctgtacccggaaatttttcatctatgtagccatccaagtaattaactcgcttttttccgccacaggaggaactaccttcattctcctgacggttaagatagtacagccagagctgaaggcactcgcaatgggtttccaatcaatggtcataagaacactcgggggaatcttggcaccgatctactttggagctctcatagataaaacctgcatgaagtggagcacaaatagttgcggggctcagggagcttgccggatatacaatagcgtgtttttcggacgagtgtacctgggactgtcaattgccttgcgctttcctgccctcgtgttgtatattgtgtttatctttgctatgaagaaaaagtttcagggaaaggacaccaaggctagtgataatgagaggaaggtgatggacgaggcaaatctcgagttcttgaacaatggagaacacttcgtaccatctgctgggaccgactctaagacatgtaatctagatatgcaggataacgcagcagcaaactag

SEQ ID NO: 241882 - DNA, 2247 bp, synthetic construct
  misc_feature 1..2247: note = Description of Artificial Sequence: Synthetic coding sequence
  source 1..2247: mol_type = other DNA
atggaccagcaccaacacttgaacaagactgcagaatcagcaagtagtgaaaagaagaagacccggaggtgtaacgggtttaagatgttcttggcagccctgtctttttcatatattgcaaaggccttggggggaattattatgaagatatccattactcagattgagcggaggtttgacatctcctctagcttagcagggctgattgatggctccttcgagatcggtaatttgctggtgatagttttcgtgtcctactttggaagtaagcttcaccgccctaaactgatcggcatcgggtgccttctgatgggcaccggctcgatacttaccagtctgccacatttctttatgggatattatagatactcgaaggagacccacattaatcccagtgaaaactccactagtagcctcagcacctgcctgattaaccagacattgagtttcaatggcacaagtcctgagatcgttgagaaggactgtgtgaaagaaagtggcagtcacatgtggatctatgtgtttatgggcaatatgttgcggggtatcggagagactccaatcgtaccccttgggattagctatatcgatgattttgcaaaagagggccattcttcgctctacctcggctcactcaatgctatcggaatgatagggccagtgatcggcttcgcacttgggtctctgtttgccaaaatgtatgtcgatattggttacgttgacctgagtaccattaggattacacccaaagatagtcgctgggttggcgcttggtggcttggtttcttagtgtccgggcttttctctattatcagctcaatccccttcttctttctgcccaaaaatccaaacaagccacagaaggagcggaagatctcattatctctacacgttttgaagaccaacgatgatcgcaaccaaaccgccaatctgacaaatcaagggaagaatgttaccaaaaacgtaaccggcttctttcaaagcctgaagtccatcctgacaaatccactgtacgttatttttttactgcttacgctgctgcaggtatcaagcttcatcggttcttttacctatgtctttaagtacatggagcagcaatatggacagagtgccagtcatgcgaattttttactcggcatcatcacaattcccacggtggccaccggaatgttccttggcggattcattattaagaaattcaagctcagcctggtgggaatcgctaaattctccttcctgaccagcatgatatcattcctttttcagctcctgtattttcctctgatttgtgagtccaagtctgtcgccggactgaccctcacatacgacgggaataatagcgtcgcttcacacgtagatgttcccttatcatattgtaatagcgagtgcaactgcgacgagtctcaatgggagcctgtgtgcggaaataatgggataacatatttgagtccttgtctggctggctgtaaaagctcctcaggtattaaaaagcacacagtcttttataactgctcatgcgtggaagtcacaggattacagaatcgcaactactccgctcaccttggagaatgtcctcgggacaacacatgcacgcgcaaatttttcatttatgtcgccatccaggtgatcaactcactgttttccgcaaccggcggtacaacttttattctcttgactgtcaaaattgtccagccagagttgaaggccttggcaatggggtttcagagtatggtgattcggaccctgggtggaatcctggcccctatatatttcggcgctctgattgacaaaacctgcatgaagtggagcactaatagctgtggtgcacagggggcttgtagaatctacaatagcgtgttttttggaattgtgcagcctgagttaaaggccctggccatcggcttccacagcatgatcatgcgctcactgggtgggatccttgtcccgatctattttggtgccttgatcgatacaacatgcatgaagtggagcacaaacagttgtggcgcacgcggagcttgccggatatataatagtacctatctcggcagagccttttttggactgaaggtggctttaatttttccggttctggttctgcttactgtgtttattttcgtagttcggaagaagtctcacgggaaggacaccaaagttttggagaatgaaagacaggtgatggacgaggccaatctcgagttcctgaacgacagcgagcacttcgtgccctccgccgaggaacagtag

SEQ ID NO: 241883 - DNA, 2139 bp, synthetic construct
  misc_feature 1..2139: note = Description of Artificial Sequence: Synthetic coding sequence
  source 1..2139: mol_type = other DNA
atggacacaagcagcaaggagaacattcaattgttctgtaagacttctgtgcaacctgtgggccgtcccagctttaaaacggaataccccagcagtgaggaaaagcagccgtgctgtggcgagcttaaagtgttcctttgcgccctgtctttcgtgtactttgctaaggccctcgcagaggggtacctgaaatctacgatcacccagattgaacggaggttcgacatcccgtcttccttagtgggggtgattgacggctctttcgagatcggtaacctcttggtcataacattcgtttcttattttggagccaaactgcatcggccaaagatcataggcgcaggctgtgtcattatgggagtgggaaccctgttgatcgccatgccacagtttttcatggaacagtataagtatgaacgctactccccatcctcaaactctacgctgagcattagcccctgcttgcttgaatctagctcacaacttccagtatccgtgatggagaaatccaagtcaaaaatttctaatgagtgtgaggtcgacacatcatccagcatgtggatctacgttttcctcggaaatttactccggggtatcggcgagacccctatccagcccctcggaattgcttatctggacgattttgcgagtgaggataatgctgctttttatatcggatgtgtgcagactgtggctatcataggcccaatctttggcttcttgctaggctccctgtgtgccaagctctatgtggatatcggttttgtaaaccttgaccacattaccattacccccaaggacccgcaatgggtgggcgcatggtggcttggctacctcatcgctggtattattagcctcttagcagccgtccctttttggtacctccccaaatctctgccaagaagtcagtcaagggaagactcaaactcctcctctgaaaagtctaagttcattatagatgaccatactgattatcagacaccccaaggggagaacgccaaaataatggagatggctagggatttcctgcctagtttaaaaaacctgttcggtaacccagtgtatttcctctacctctgcacgagtacggttcagtttaacagcttgttcggaatggtaacctacaagcctaaatacatagagcagcagtatggccaatcatctagtcgggctaacttcgtgatcggtctgattaacatacccgctgtggctttaggcattttctctgggggtatcgttatgaagaaatttaggattagcgtgtgcggcgctgccaagctctacctcggttcctcggtgttcggttaccttttatttttaagtcttttcgccctgggttgtgaaaattccgacgtggccggactcactgtttcatatcaaggcaccaagccagtgtcctaccacgagcgagctctgttcagcgattgtaacagccgctgtaaatgctccgagaccaagtgggaaccaatgtgtggagaaaatggcatcacatacgtatctgcctgcctcgccggatgtcaaacttctaaccgctcagggaagaatattattttctataattgtacttgtgtgggcatcgcagcgtccaagtccgggaactcttctggaattgtgggccgttgccagaaggataacggctgcccacaaatgttcctgtacttcttagtgatcagtgtaattacatcttatacgctctcactcggaggtattcccggatacattttattactgaggtgtataaaaccgcagctgaagtcatttgctctcggaatctatactctcgcaattcgggtcctggccggaattccggctcccgtatacttcggagttttaatcgacacttcttgcctaaaatggggcttcaaaaggtgtggatcccggggttcatgcaggctttatgactccaacgtcttcagacacatttaccttggactgaccgttatccttgggactgtttccatcctgttgtctatagccgtgttgtttatccttaagaaaaactacgtctctaaacacagaagctttataactaaaagagagagaacaatggtgagcactcgattccaaaaagaaaattacaccacttccgaccatttgttgcagcctaactattggccaggcaaggagacccagctgtag

SEQ ID NO: 241884 - DNA, 2193 bp, synthetic construct
  misc_feature 1..2193: note = Description of Artificial Sequence: Synthetic coding sequence
  source 1..2193: mol_type = other DNA
atggacacttcatcaaaagaaaacattcagctgttttgtaagacctccgtccagcctgtgggacggcctagcttcaagaccgaatacccttcatctgaggagaaacagccttgctgtggggaattgaaggtgttcctgtgtgcactctcattcgtctacttcgccaaggccctggccgaggggtaccttaagagtaccataactcagatcgagagacgcttcgacattccgagttccttggtgggcgtcattgatggttcatttgagataggaaatctactagttattaccttcgtatcctacttcggagctaagctccacaggccgaaaatcattggagccggatgcgtgattatgggggtgggaacactgttgattgccatgccccagtttttcatggagcagtacaagtatgagcgatacagccctagtagcaactccaccctttcaatctcaccatgcctgctggagagttctagtcaactgccagtttctgtgatggaaaagtcgaagtccaagataagtaacgagtgcgaggttgacacttctagtagtatgtggatttatgtcttccttggaaatctcctccggggaataggggaaacccccattcaacccctagggatagcgtacctcgatgacttcgcatccgaggataacgccgcattctatatcggctgtgtgcagaccgtggccattattggcccaatattcggctttctgctaggctcactctgtgccaaactgtacgtcgatatcggctttgtcaaccttgaccacatcaccattacgccaaaagatccccaatgggtgggggcttggtggctaggttacctcattgctggcatcatctctctcttggccgcagtgcccttttggtacctacccaagtctctgcctcggtcccagtcccgggaggactcaaacagcagcagcgaaaaaagcaagtttataattgatgaccacactgattatcagactcctcagggagaaaacgcaaagatcatggaaatggcaagagacttcctgcctagtttaaagaaccttttcggaaatcctgtctactttctgtacctgtgtaccagcacagttcagttcaattccctcttcggcatggtgacttataagcccaaatacatcgaacagcaatacggacagtcctcttcacgggcaaactttgttatcggtttgataaacattcctgccgtggccttaggtatcttttccggcggaattgtcatgaaaaagtttagaatatccgtctgtggagctgctaagctctacttagggtctagcgttttcggctatttgttgttcctgagtttgttcgcgttagggtgcgagaacagcgacgtggcaggcctcactgtgtcctaccagggaactaaaccagtctcgtatcacgagagggccttatttagcgactgtaactctagatgtaaatgttccgagacaaaatgggagccaatgtgcggagagaacggtatcacctacgtatctgcttgtctggccggatgtcagacctccaacaggagtgggaaaaacataatcttctacaactgcacttgcgtaggaatcgccgcttcgaaatctgggaactcctcaggcatcgtcggccgttgccagaaagacaacgggtgcccgcagatgttcctgtactttctggtgattagcgtaattacatcatacacgctctctctaggagggatacccggatacatcctgttactgcgttgcattaagccccaattgaagtcattcgccctcggcatatacacactggctatccgcgttctggctggtatccctgcaccagtatattttggggtactgatcgatacctcctgtctgaaatgggggtttaagcgctgtggctctaggggctcttgccggctttatgattccaacgtttttaggtaccagattaagtctatccccgcttcccactgctattccatccctgatctgcataatgccaccgacacaaacaaatttagctgtcacttcaccgcctgcaagacctacatctctgggacgaattgtgacacagggcactcggtgaactcgcccaaacactgctcaacctttcacttcaaagagaaactgtgctttaagactcagaagttctacaaccaggaacgcaagaacaatggcgtctacaagattccgaaaggcaaattgcactataagtag

SEQ ID NO: 241885 - DNA, 1992 bp, synthetic construct
  misc_feature 1..1992: note = Description of Artificial Sequence: Synthetic coding sequence
  source 1..1992: mol_type = other DNA
atggacaccagtagcaaggaaaacattcagttgttctgcaagacatctgtccagccagtgggcagaccgtcttttaagacagagtaccctagttccgaagaaaagcagccatgctgtggcgagcttaaggtttttttatgtgcactctcatttgtctacttcgctaaggctctggccgagggatatttaaagagtaccatcactcaaattgagcgcagatttgatattcccagttcactcgtaggtgtcattgatggaagcttcgagatcgggaacctgttggtaattacgtttgtgagctactttggggcaaagctacacaggcccaaaatcattggggcaggctgtgttattatgggtgtcgggactttactgatagcaatgcctcagttctttatggaacagtataagtatgagagatactctcccagttccaacagcaccctttctatatcgccctgcctactggaatcatcctcacagctgcccgtcagcgtaatggaaaagtcgaaaagtaaaatcagcaatggctgtgtccagacggtggccatcatcggcccaatatttgggttcctgcttggatccctttgtgctaaactgtacgtggacattggtttcgtgaatctcgaccatataactatcacccctaaggacccacaatgggtaggcgcttggtggctgggatacctgatagccggaatcatcagtctcctagccgctgtgcctttttggtacttgccaaaaagcctgccacgatctcagtcacgcgaggacagcaatagttcaagcgaaaaatccaagtttatcatcgatgaccacacggactatcaaaccccacagggagagaatgctaagattatggaaatggcccgtgacttcctgccatcactcaagaatctgttcggaaatccagtctatttcctgtatttgtgtacttccaccgtgcaattcaactctctattcgggatggtcacctacaaacctaaatacattgagcagcagtacggtcagagttctagcagggcgaacttcgttatagggctcatcaacataccagccgtggctctagggatcttcagcggaggcatcgtgatgaagaagttcagaatatcagtatgcggcgctgctaaactatacctggggtcttcagtcttcggctacctgctgtttctgtccctctttgccttaggatgcgaaaattctgacgtggctggattgacagtctcctatcaggggactaaacctgtttcatatcacgagagggctctctttagcgactgcaacagcaggtgtaagtgctcagaaacaaagtgggagccaatgtgcggagagaacggaattacgtatgtgtctgcttgcctagcgggatgtcagacctcgaacaggtcaggtaagaacatcattttctacaactgtacatgcgtgggcattgcggcttcaaagagcggtaactctagtggtatcgtgggccgatgccagaaagacaatggatgtccccagatgttcctgtattttctggtcatatcggtaatcacctcctatacactgagcctgggcggaattcctggctacatcctcctgctgagatgcataaaaccccaattgaaaagcttcgctctgggcatttacaccctggcaattcgggtcctagcgggtattcctgccccagtctactttggggttcttattgatacctcttgtctgaagtggggattcaaacgatgcgggtctcgcggaagctgtcgactatatgacagcaacgtctttagacacatctacctggggctgacggtcatcctgggcacagtgagcatcctgctctccatcgccgtgctgtttattctcaaaaaaaattacgtgagcaaacaccggtccttcattaccaagagggagaggaccatggtgagtacacggttccagaaagaaaactacactacatccgaccacttgctgcagcccaattactggccaggaaaagagacacaactctag

SEQ ID NO: 241886 - DNA, 1839 bp, synthetic construct
  misc_feature 1..1839: note = Description of Artificial Sequence: Synthetic coding sequence
  source 1..1839: mol_type = other DNA
atgggggtgggcaccctgctgatcgctatgccgcagtttttcatggaacagtataaatacgagcgctactccccctcatccaattctactttaagcatcagcccctgtttgcttgaatcctcctctcaactgccagtatcagtcatggaaaagtctaaaagtaagatttcaaacgaatgtgaggtcgacacatcgtcttccatgtggatctatgttttcctcgggaacctcctaagaggcatcggggagacacccatccagcctctgggaatcgcgtatctcgatgatttcgcatctgaggataatgccgcattctatatcgggtgtgttcagacagttgcgatcattgggcctatcttcgggtttctgcttggttccctatgtgcaaagctgtatgtggacattgggtttgttaacctggatcacatcactataactcccaaggatccgcagtgggtgggggcatggtggttggggtatctcatcgcaggaatcatctccctccttgcagcggtcccgttttggtacctgcccaaatctctcccacggtctcagtccagggaggattcgaacagttccagtgagaagtctaagtttattattgacgaccacacagattaccagacccctcagggagagaacgccaaaatcatggagatggctcgggactttctgccctcgctgaagaacttgtttgggaatccggtgtatttcctctacctctgcacaagtactgtccagtttaattccctattcggtatggtcacgtataaaccaaaatacattgagcaacagtacggacagagctctagcagggccaacttcgtgatcggcctgatcaacatccctgccgttgccctcggtatattctctgggggaattgtgatgaagaagtttcgcatcagtgtctgcggcgcagctaaactgtatttgggctcctctgtcttcggatacttactcttccttagcctgttcgccttgggctgcgagaattctgatgttgcaggccttaccgtgtcttaccagggtaccaaacctgtgagctatcacgagcgagcactattctctgactgtaactctcggtgcaaatgcagcgagaccaagtgggagcctatgtgcggggagaatggcattacatacgtctctgcctgcctcgctggatgtcagacctcaaatcgcagcggaaaaaacatcatcttctacaattgtacatgtgtgggcatagcagcgagcaagtccggcaactctagcgggatcgtaggacgctgtcagaaagacaacggttgcccccagatgtttctgtacttcttggtgattagcgttattacgtcctatactctctctctgggcggtatcccagggtatatccttctcctgcgctgtataaagcctcaactgaagtcgtttgccctgggcatttacaccttagctatccgcgtgctggctggcatccctgccccagtttatttcggtgtacttatcgatacctcctgtttgaaatggggcttcaaacgttgcggatcgcgtgggagttgtcggttatacgatagtaatgtcttcagataccagatcaagtcaatcccagccagtcactgctacagcattcctgaccttcacaatgccactgatacaaataagttttcctgtcacttcactgcctgtaagacttacataagcggaacgaattgcgacaccgggcactcagtgaacagccccaaacattgcagcacgtttcattttaaggagaaactttgttttaagacacagaagttctataatcaggagcggaaaaataacggggtatacaagatcccgaagggcaagcttcactacaagtag

SEQ ID NO: 241887 - DNA, 2193 bp, synthetic construct
  misc_feature 1..2193: note = Description of Artificial Sequence: Synthetic coding sequence
  source 1..2193: mol_type = other DNA
atggacacgtccagtaaggagaatattcaattattttgcaagactagcgttcagccagtgggcaggccatcgtttaagactgaatacccctcgtctgaggagaagcagccctgctgtggggagctcaaagtattcctgtgcgctttgtccttcgtctattttgctaaagccctggctgagggctatctgaagtccaccattactcagattgagagaagatttgacattcctagttcactggttggagtaatcgacggtagctttgagatcggaaacctactggtgatcacatttgtcagctattttggagccaagctgcacaggcccaagataatcggtgccggatgtgtcattatgggcgtaggtactctgctgatcgccatgccccagtttttcatggagcagtataagtacgaacgttattcgccttcatctaattccactctgagcataagcccttgtcttcttgaatctagcagccagttgccagtaagcgttatggagaaaagcaagtccaaaatatctaatgagtgcgaagtggataccagtagtagtatgtggatctacgtgttcctcgggaacctcttgcgtggcatcggcgaaactcctatccagcctctcgggatcgcctacctggacgactttgccagtgaggacaatgccgctttttacatcggctgcgtccagaccgttgccataatcggtcccatctttggattcttactggggagcttgtgtgccaagttatacgtcgatattggattcgtgaacctcgaccatattaccattacgccaaaggacccccagtgggtcggggcatggtggctgggttatctgatcgccggaatcatctctctcctcgcggcagtgcccttctggtacctcccaaagtcattaccgagaagccagtcacgggaagattcgaattcttcgtctgaaaagagcaagttcatcatcgatgatcacaccgattatcagacccctcagggcgaaaatgccaagatcatggagatggcccgagacttccttccctcactgaaaaacctcttcggaaacccagtttatttcctgtatctttgcacttccactgtccaatttaatagtctgtttggaatggtgacttataaacctaaatacattgagcaacaatacggacagtcgagtagcagagcgaattttgtaatcggccttattaatatccctgctgtcgctctgggaatcttttcgggaggaattgtgatgaagaaattccgtatctctgtttgtggagccgctaagctttacttgggatcttcagtctttggatatctcctcttcctctctctcttcgctctggggtgtgagaacagcgacgttgcaggattaacagtctcctatcaaggaacgaaaccagtctcctatcacgagagagctctcttttctgattgcaactcaaggtgcaaatgttcagagacaaaatgggaacctatgtgtggtgaaaacggaattacatacgtgtccgcatgccttgcaggttgtcagactagcaacaggtccggcaaaaacattatcttctataattgcacatgcgtcggcattgctgcgtctaagagtggcaatagctccggcatcgtgggcaggtgccagaaggacaacggatgtcctcagatgtttctctacttcctcgtgatttctgtgattacttcatatacgctgagtttgggcggaattcccggatacatccttctattgagatgcatcaagccccaactgaaaagtttcgctctgggtatttacaccctggctattcgggttcttgccggaatacctgccccagtttatttcggcgttcttattgacacttcttgcctgaaatgggggtttaagcgatgtggaagccgcggtagctgccgtctgtatgacagtaatgtctttcggtaccagataaagtccattccagctagtcactgttacagcattccggatctgcacaacgcaaccgacacgaataaatttagctgtcatttcactgcctgcaagacatatatttctggcacaaattgcgacactggccactctgtgaattcaccaaagcactgctcaaccttccatttcaaggaaaaattatgttttaaaacacagaagttttacaaccaggaaagaaaaaataacggcgtttacaagattcctaaagggaaactgcattataaatag

SEQ ID NO: 241888 - DNA, 1932 bp, synthetic construct
  misc_feature 1..1932: note = Description of Artificial Sequence: Synthetic coding sequence
  source 1..1932: mol_type = other DNA
atgggtctcctgccaaagctgggcgctagccagggatctgacacatcaaccagcagggctggtagatgcgccagaagcgttttcggaaatataaaggtatttgtgttgtgccagggcttgctgcagctctgccagctgctgtatagtgcctacttcaaaagcagtctgacaaccattgagaagagattcggcctcagtagttcctccagcggcctgatatcctcgctgaatgagatttcaaacgccatcttgatcatctttgtctcctattttggatctcgagtacatcgaccacgcctaattggcatcggcggtctattcttggccgctggcgctttcatcctgacacttcctcattttctgtctgagccctatcagtacaccctcgcttccaccgggaataacagcagactgcaagccgagctatgccagaaacattggcaggatctgcctccaagcaagtgtcatagcacaacccagaatcctcaaaaggagacctcttcgatgtggggcttaatggtggtcgctcagctgttagcaggcattggcacagtaccgattcagccgttcggaatcagctacgtagatgatttttctgaaccatccaactctccgctgtacatctccattctttttgcgatatcagtattcggtcccgctttcggatacctgcttggctcagttatgcttcagatattcgtggattatggcagggtcaacactgccgctgtgaatctcgtgcctggagatccaaggtggattggcgcttggtggcttggcctgttgatctcaagcgctttactggtgttaacatccttccctttcttttttttcccaagggccatgccaatcggggcaaagcgtgcaccggcaacagcagatgaagctagaaaactggaagaggcgaagtctagaggttctctggtggattttatcaaacgattcccatgtatcttcttgagactgcttatgaactcgcttttcgtgcttgtcgtgctggcccagtgcaccttctcatctgtgattgcgggactctcaacatttctgaataaattcctagagaagcagtatgggacttcagcagcctacgcaaactttcttattggagccgtcaacctcccagcggctgcactgggtatgctttttggagggatcctcatgaagcgctttgtattcagcctacaggctatcccccgaatagcgactaccatcataactatctctatgatcctgtgcgtgcctttgttcttcatggggtgctccacacccacagttgcggaggtgtatcctccatctaccagctcatctattcacccgcagagtcctgcatgtaggcgtgactgcagttgtcccgatagcattttccaccccgtgtgtggagataacggcattgaatatctttctccctgccatgccggttgctctaacatcaatatgtcttctgctacctccaaacagcttatctatctcaattgttcctgcgtgacaggaggctcggccagcgctaagacaggttcctgccccgttccttgtgcgcactttttgctccccgctatcttcctgatctcattcgtgagtttaatagcttgcatcagccacaaccctctgtatatgatggtcttgcgggtggtaaaccaagaggaaaaatccttcgccatcggagtgcaatttctgctcatgcgccttctggcctggttgccctctcccgctctgtacggccttacaatcgaccattcttgtattaggtggaattctctgtgcttgggcagaagaggcgcatgcgcctattacgataacgatgccctcagagaccgctatctcggcctgcagatggggtataaagcattaggtatgcttctgctgtgttttatctcatggagagttaagaaaaacaaagagtataatgttcaaaaagcagcagggctgatctag

SEQ ID NO: 241889 - DNA, 1248 bp, synthetic construct
  misc_feature 1..1248: note = Description of Artificial Sequence: Synthetic coding sequence
  source 1..1248: mol_type = other DNA
atgggactgctgccgaagcttggcgcttcccaaggtagtgacacttcaaccagtcgcgcaggccgatgcgccagatccgtgtttggaaacattaaggtgttcgtgctttgtcagggcttgcttcagctttgccagcttctctatagcgcctattttaaatcatcacttactactattgaaaagaggttcggcctgagcagttctagcagcgggctgatcagcagcctgaacgagatcagcaacgcgatactgattatctttgtcagctacttcggcagccgggtccaccggccaaggctgatcggcatcggaggtctctttcttgctgccggagctttcattctcacacttccacattttctctccgagccgtatcagtatactctggcgtcaactggtaataatagccggctgcaagccgaactttgtcaaaagcactggcaggacctgcctccatcaaagtgccacagcactactcagaacccccaaaaagagacatcttccatgtggggtctgatggtggtggcccagctgctagccggtattggcacagttcccattcagccctttggcatatcttatgtggatgactttagcgagccgtccaatagtccgttatacataagcatattatttgctatctccgtgtttggccctgccttcggatacttattggggtctgtcatgctccagatctttgtggattatggaagagttaataccgctgcagtgaatctcgtgccgggagacccccgttggataggagcctggtggctgggtcttctcatatcgtccgctctgctggtgctcaccagcttccctttcttcttcttcccgagagcaatgcccatcggggcaaaaagggcaccggctaccgccgacgaagctaggaaactggaggaagctaagtcccgcggaagcctcgtggattttattaagagatttccctgcatatttctgcgactcctgatgaattcactcttcgtgttagtggttctggcacagtgtacattttcatctgtgatcgcagggctctccaccttcctgaacaagtttcttgaaaagcagtatgggacctctgccgcatacgccaattttttaatagcgcaccaggtgctgtacatacgctccctactaccagctgccggtacggctcgagcgcagatactttccagtacacgcagtgtggaaacaatggaaagtagcacctcgcctcttgcgatgcccgctgctgctacgtccacatag

SEQ ID NO: 241890 - DNA, 2133 bp, synthetic construct
  misc_feature 1..2133: note = Description of Artificial Sequence: Synthetic coding sequence
  source 1..2133: mol_type = other DNA
atgcaggggaagaagccgggaggaagcagcggtgggggacggagtggcgagctgcagggagatgaagcacaacggaacaaaaaaaagaagaaaaaggtgtcatgttttagtaatatcaaaatttttttggtgagcgagtgtgcgctcatgctggctcagggtacagtgggagcctatctagtgtctgtcctgacaacacttgagagacgcttcaatctccagagtgccgatgtgggggttatcgccagtagcttcgagattggaaatctcgctctgatcctgttcgtttcttacttcggagcccgaggccacagaccacgtctcattgggtgtggcggtatcgttatggcgctgggtgccttgctgagcgcactgccggagtttctgactcaccaatataagtatgaggctggggaaatcagatggggtgcagagggaagagacgtttgcgccgctaacggatccggtggggatgaggggcctgatcccgatctgatctgtagaaaccgtaccgccacaaatatgatgtatctgttgctcattggagcacaggtgctcctgggcatcggtgctactcccgtccagcctctaggtgtcagctacatcgatgatcacgtgaggaggaaggatagctctctctatatcggtattctgtttaccatgctggtgtttggtcccgcatgtgggtttatactggggtcattctgtaccaagatctacgtagacgctgtgttcatagacacctctaacttggacatcaccccagatgatcccaggtggattggcgcttggtggggaggattcttattgtgtggtgctctcctatttttcagttccttactgatgttcggattccctcaaagcctgcctccccattcagagcccgcaatggagtctgagcaggcgatgctatcagaaagagagtacgagcggcctaaaccctctaacggcgtgttgagacaccctctcgagcctgattctagcgcaagttgtttccagcaactccgcgtgatccctaaagtgactaaacatctgctctcaaatcccgttttcacatgtattatcctagctgcttgcatggagatcgcggtcgtggccggatttgcggcttttctgggcaaataccttgagcaacaattcaacctgacaacctcaagtgccaatcaattgctgggaatgacagccatcccctgcgcttgtttgggcattttcttgggtggtttgcttgtgaagaagctgtcactctctgccctgggcgctatcagaatggcaatgctggtgaatctcgttagcaccgcttgctacgttagttttctgtttctcgggtgcgataccgggcctgtcgcaggcgtcactgtcccatatgggaactctactgctccaggatccgcactggatccatattccccatgtaacaataactgcgagtgtcagaccgatagcttcacgccagtgtgcggggctgacggcataacatacttgtctgcttgttttgcaggttgtaacagcaccaacctcacggggtgtgcttgtctcaccaccgtccccgctgaaaacgcaactgtggtcccaggtaagtgcccgtctcccggttgccaggaggcttttctgacttttctttgtgtcatgtgcatctgctcgctcatcggtgcaatggctcagacaccatcagtaattatcctgattcggactgtgagtcctgagctgaaatcctatgctttgggggtgctgtttctgctcctacgactcttagggttcattcctccgccactgatttttggagctggcattgacagcacctgtctcttttggagcactttttgtggcgagcagggcgcttgcgtgctttatgacaacgtcgtctaccgatatctgtatgtgtctatcgctatcgccctgaagagctttgcattcatactttatacaactacctggcaatgtctcagaaagaattacaaacgctacataaagaatcacgaagggggtttgagcacatccgagttctttgcttcaacattaaccctagacaatcttgggagggacccagtccccgctaaccaaacccaccggacaaaattcatatataatctcgaggatcatgaatggtgtgagaacatggagagcgtactatag

SEQ ID NO: 241891 - DNA, 1356 bp, synthetic construct
  misc_feature 1..1356: note = Description of Artificial Sequence: Synthetic coding sequence
  source 1..1356: mol_type = other DNA
atgagggagatcgttcatatacagataggccagtgtggcaatcagatcggggctaaattttgggagatgattggagaagaacacggtatcgacctggccggaagcgacaggggagctagcgctctccaactggaacgtataagcgtgtactacaacgaagcgtacggacgtaagtatgtgccacgagctgttctcgtcgatcttgaacccggtaccatggatagtattcgctcgtccaagctgggcgcactgtttcaacctgactcctttgtgcacggaaattctggcgcaggaaataattgggcaaagggccattacactgagggagctgaactgatagagaatgttttggaagtcgtccgacacgaatctgaatcttgcgactgtctccaagggtttcagattgtacattctctgggcggaggaactggatccgggatgggtacactgctgatgaataagattagagaggagtaccccgaccggatcatgaacagttttagcgtcatgcctagccccaaagtttctgacaccgtggtcgaaccctataacgccgttctgagtatccaccaattgatcgaaaacgcggacgcctgcttctgcatcgataacgaggccctgtacgatatttgtttccgtactttgaagcttactacccctacgtatggggaccttaatcacctggtgtctttaactatgtccggcattacaacatctcttagattcccaggacagctgaatgccgaccttaggaaattggctgttaacatggtgcctttcccgagactgcactttttcatgcccggattcgcgccacttactgcacagggaagccagcagtacagggccttgtctgttgcggagctgactcagcagatgtttgatgcccgaaataccatggccgcttgcgacctccgtcggggaagatacctgactgtggcgtgcatcttccggggtaaaatgtccacaaaagaagtcgaccagcagctgctaagcgtacaaactagaaacagctcatgtttcgttgaatggattcctaacaacgtcaaggtagccgtctgcgatattcctccaaggggcttaagcatggctgcgacgttcatcggtaataacactgctatccaagagatattcaatcgcgtgagcgagcatttctcggcaatgtttaagaggaaggcatttgtccattggtacacgtccgagggtatggacattaatgagtttggcgaggctgaaaataacattcatgatttggtcagtgagtaccagcagttccaggatgcgaaggccgtgctggaggaggacgaggaagtaacagaggaggccgaaatggagcctgaggacaagggccactag

SEQ ID NO: 241892 - DNA, 1749 bp, synthetic construct
  misc_feature 1..1749: note = Description of Artificial Sequence: Synthetic coding sequence
  source 1..1749: mol_type = other DNA
atgcccctccaccagttgggcgataaaccgctcacatttccttccccaaacagcgcgatggagaacggtctagatcacaccccgccttctcggagggcctccccaggcacccccctttcgccaggtagcctccgcagcgccgctcattccccattggatacctccaagcaacctctttgccagttgtgggctgagaagcacggcgctcggggtacccacgaggttcgttatgtgtcggcgggtcaatctgtggcatgtggttggtgggctttcgccccaccttgcctccaagtactaaataccccaaaggggattctgttttttctgtgcgccgctgctttcttacagggaatgaccgtcaacgggttcataaacacggttattactagcctggagcggaggtacgacctgcattcctaccagtccggactgattgcaagcagttacgacatcgctgcctgcctctgtctgacatttgtcagctatttcggcggatccggtcataaacctcgctggttagggtggggcgtgctcctgatgggtactggtagtttggtgttcgctctgccacatttcacggcagggaggtacgaggtcgagctggatgcaggtgtgcgaacctgcccagcgaaccccggagctgtgtgtgccgacagcacatccggactgtctaggtatcagctggtttttatgctggggcagtttcttcatggcgtgggtgcaacccccctttacacccttggggtcacctatcttggaatgtctacgttctctccgaagttcctggagtcacagtttagcctgtcagcaagcgaagcggctacactattcggttatctagttgtgccagcaggcggtggaggcacgttcctcgggggtttttttgtgaataagctcaggctcagaggaagcgccgtgattaagttttgccttttctgcacagtcgtaagcctgctgggcatcttggtcttctctttgcactgccctagtgtgcctatggctggcgttacagccagttatggcggaagcctgctgcccgaggggcacctgaatctgacggctccttgtaatgctgcctgctcttgtcagccagagcactatagtcctgtatgcggcagtgacggactaatgtatttcagcctgtgccacgccggatgcccagctgccaccgagactaatgtcgacggccaaaaagtgtatagagactgtagctgcataccccagaacctcagttcaggttttgggcatgcgactgcaggaaaatgcacatctacatgccagaggaagcccctgcttctagtgtttatttttgtcgttatctttttcacattcttatcaagcatccctgcactcactgctacactgcgctgcgtgagggacccccagcggtcttttgcgctggggattcagtggatcgtggtgagaatattaggtggtatcccaggccctattgcgttcgggtgggttatcgataaggcatgtttattgtggcaggatcaatgcggccaacaaggaagttgcctggtttaccagaacagcgccatgtcacggtacatcctaatcatgggcctgctatacaaagttcttggagtcctgtttttcgctatcgccagctcccgggcagcctctgatcaccgcccacgacccccagggcatgggggacacagcgctttccccgacgaccgaacggtcccactgggggacgccatcactagggagctcctctttgatttgcagccatcaacctag

SEQ ID NO: 241893 - DNA, 2169 bp, synthetic construct
  misc_feature 1..2169: note = Description of Artificial Sequence: Synthetic coding sequence
  source 1..2169: mol_type = other DNA
atgccacttcaccagctgggagacaaacctttgacgttcccctcgcccaattcagccatggagaatggactggatcacacccctccaagcagacgcgctagccctggcacacctttgtcccccggaagtctgaggagcgccgcacattctccactggacacctcaaaacaacctttgtgccagctgtgggctgaaaagcacggagccagaggcacccatgaagtccgttatgtctcagctggacagtccgttgcctgtggctggtgggcattcgcccctccctgtctccaggtcctgaacactccgaaaggaattttattttttttgtgtgccgctgccttcctccagggtatgaccgtcaacggttttatcaacaccgtaataaccagtctggaaaggaggtacgacttacatagctaccaaagcgggctgattgcgagtagttatgatattgccgcatgcctgtgcctgacctttgtcagctacttcgggggatcaggacataagcccaggtggcttggctggggggtcctgctcatgggaacaggcagcctggtcttcgcactgccgcatttcacggctggtagatatgaggtagagctcgacgcaggggtaagaacatgccccgctaaccctggagccgtatgtgctgattcaacgagcggcctgtcgaggtaccagctcgtgttcatgttaggacagtttttacacggagttggggcaactcccctgtacaccctcggcgtgacatatcttgatgagaacgtcaagtctagttgttcccctgtgtatatcgccatcttctacacggccgcaattctgggcccagccgcaggatacttgataggtggtgctctgctgaacatatacaccgagatgggtcgacggactgaattaacgaccgagtcccccctttgggtaggggcatggtgggtcggctttcttggttcgggtgctgctgccttcttcacagccgttccgatcttgggatatccaagacaattacctggcagccagaggtacgccgttatgcgcgctgccgagatgcaccagctcaaagactcatccagaggtgaagcttccaaccccgatttcggaaaaacaattcgggatctgcccctgtctatctggttgctgctgaagaatccaacttttatcctgctgtgtctggccggtgccactgaagccaccctaatcactggaatgagcacattctcgcccaaattcctagaaagccagttctcattaagtgcgagcgaagccgcaacgctgttcgggtatttagtggttccggctggcggaggcggtaccttcttaggcggattttttgtgaataaattgcggttgcgcggttctgccgtgatcaaattttgtctattctgcaccgtggtgtccctgctcggcatcctagtgttttctctgcattgccccagcgtcccgatggctggcgtgaccgcaagttatgggggtagtctcctacctgaaggacacctcaatctcacagccccatgcaacgccgcttgttcttgccagcccgagcattactctcccgtgtgcggatccgatggccttatgtacttttcactgtgtcacgctggctgtcccgcagccacagagaccaacgtggatggacagaaggtctaccgtgattgcagctgtattcctcaaaacttatcctcgggctttgggcacgccactgcaggaaagtgcacctctacatgccagaggaagccgctgctgttggtgttcatcttcgttgtgattttctttacattcctgtccagcatccccgcacttaccgctacacttagatgcgtacgcgatccccaaaggtcctttgcactcggcattcaatggatagtggtccgcatccttgggggaattccaggacccattgcgtttggctgggtgatagataaggcatgtcttttatggcaggaccagtgcggtcaacaagggtcctgcttggtgtatcagaacagtgccatgagccggtacattcttatcatgggacttctgtacaaagttctgggggtgctgttctttgccatcgcatgtttcctttacaagcccctgagcgaaagctcagatgggctggagacttgtctgccatcccaaagtagcgcacctgactctgccactgactctcaacttcagagttccgtctag

SEQ ID NO: 241894 - DNA, 2169 bp, synthetic construct
  misc_feature 1..2169: note = Description of Artificial Sequence: Synthetic coding sequence
  source 1..2169: mol_type = other DNA
atgcctctccaccaactgggggataaaccactgaccttccccagtcctaacagcgccatggaaaatggcctggaccatacaccccctagcagaagggccagccccggtaccccactgtccccaggctctctacgaagcgctgcacactcccccctggacacttccaaacagcctctgtgccagttgtgggccgaaaagcacggggcacggggaacccacgaagtaagatatgtgtcagccggtcagagtgtcgcatgcggatggtgggcgtttgctccaccctgtctccaggtgctgaatacgccaaaaggaatcttgttttttctgtgcgcagcagcattcctgcaggggatgactgttaacggtttcatcaacacagttattacatccttggagcgtaggtacgacctgcattcctatcagtccggactgattgcatccagctacgacatcgccgcatgtctgtgcttgactttcgtgtcatatttcggaggtagtggtcataagccgaggtggttgggctggggtgttctccttatggggaccgggagcctggttttcgctctgcctcatttcacagcgggtcgctatgaagtggagttggatgccggtgtgcggacatgtccagccaacccgggagcggtatgtgccgattctacgagtggactgtcaagatatcaactggtgttcatgttgggccaattcttacacggggtgggcgcaacccccttgtataccctgggggttacatatttggacgagaacgtaaagtcaagttgctctccagtttacatcgcgatcttctatacagccgcaatcctcgggcctgccgctgggtacctcatcggtggtgcccttctgaatatttataccgagatgggcagaagaaccgagttgaccacagagtcacctctctgggtcggagcttggtgggtgggtttcctcgggagtggcgctgctgcatttttcactgccgtgccaattcttggatatccacgccagctgccaggcagccagagatatgctgttatgcgggctgctgaaatgcaccagctgaaggattcctccagaggggaagcatcaaatcccgatttcgggaagacaattagggacctccccctcagcatctggctattgctgaaaaacccaactttcattctgctttgtcttgccggagcgacggaagccacccttattaccggcatgtccaccttctcccctaagttcttggagagtcagttttctctgtcagcctccgaagccgctacactcttcgggtatctggtggtccccgctgggggtggagggactttcctaggaggtttcttcgtcaataagctgaggctccgaggaagtgcggttattaagttttgtctgttttgcaccgtggtctccttgcttgggatcctggtgttttcgctgcactgcccttcagtgcccatggccggagttaccgcatcctacgggggtagtctgttgccagagggccacctgaaccttaccgcaccttgcaatgccgcatgttcctgtcagcccgaacactacagccccgtgtgcggatcagacgggctcatgtatttctcgttgtgtcacgccggttgccccgctgccactgagaccaatgttgacggacaaaaagtctaccgagactgtagttgcattccacagaatctcagctcaggctttgggcacgccacggccggtaaatgtacatctacatttttatatatccctcagcaacactcctgtaccaatggaaacagtaccactggagccctacaagaaactccacggagcaaaagggcttgccggtgcgtccgcgatcctcagcggtcattcgctctgggcatccagtggatcgtagtgagaatccttggagggatcccaggccctattgcttttggctgggtgatcgacaaggcatgtctgctgtggcaggaccaatgtggtcagcagggctcctgcttggtctaccaaaactcggctatgtctaggtacattttgataatgggcctcctctacaaggtcttaggcgtgctgttcttcgcgatcgcatgcttcttgtataaaccactgtccgaaagcagcgacgggcttgagacttgccttccaagtcagagctcagcacccgattccgcgaccgacagccagcttcaaagctcagtgtag

SEQ ID NO: 241895 - DNA, 456 bp, synthetic construct
  misc_feature 1..456: note = Description of Artificial Sequence: Synthetic coding sequence
  source 1..456: mol_type = other DNA
actaccgccttatgcgccgctcggacagcgagctgcacgagccattgcgccacgcagggagccctccagcctaggcgaaggatgtggaccgccagacggtgtgtaagggacccccaaaggtcattcgctctggggattcagtggatagtggtgcgcattctgggaggcatccctggcccaattgcgttcggttgggtcattgacaaagcttgcttattgtggcaagatcagtgtgggcagcagggctcctgcttggtatatcagaactccgccatgtctaggtatattctgataatgggtctgctgtacaaggttctgggggtgttattttttgccatagcctgcttcctttataaaccactgtccgagtctagtgacggactggagacctgcctgccgtctcagagctctgcgccagattctgccacagactcccagcttcagtcttcggtctag

SEQ ID NO: 241896 - DNA, 1863 bp, synthetic construct
  misc_feature 1..1863: note = Description of Artificial Sequence: Synthetic coding sequence
  source 1..1863: mol_type = other DNA
atgccccttcaccaactgggggacaaacccctgaccttcccatcacctaactccgccatggagaacggtctcgatcacaccccaccctctcggcgagcttcacctggcactcccttgtcaccaggatccttaaggagtgcagcacacagtcccttggacaccagcaaacagcctttgtgccagctgtgggctgagaagcacggggctagaggtactcacgaagttcgctacgtgtcagcaggacagagtgtggcctgtggttggtgggcatttgcccctccatgtttgcaggtgctgaatacaccgaagggcatcctcttctttctgtgcgctgccgcattcctccaaggtatgacggtgaacggattcattaacaccgtcatcacctcgttggaacggaggtacgacctacactcatatcagagcggactgatcgcatcgtcatatgacattgcggcttgtctctgcctcaccttcgtctcttacttcgggggtagcgggcacaaacctaggtggctgggctggggcgtgcttctgatgggcacaggaagcctggtttttgcacttccacactttacagctggacgatatgaagtagaactcgacgccggagttcgaacttgcccagccaaccctggggctgtctgtgccgactccacgtccggcctatctcgatatcagttagtcttcatgctgggccagttcctgcacggcgtaggtgctactcctctgtacacacttggagtcacatacctggatgagaatgtcaaaagttcctgctcaccagtctacatcgcaattttctacactgcagcaatcttgggcccagccgcaggttacctgatcggcggagcactcctcaacatatacaccgagatgggcagaagaaccgagctcacgaccgaatcaccactttgggtgggcgcttggtgggtcggctttctcggatcaggggcagcagcctttttcacagctgtgcctattctggggtaccctagacagttgccaggaagccagagatatgccgtgatgagggcagcggaaatgcatcaactgaaggactcatcacggggtgaggccagcaacccagatttcgggaagactatcagggacctgcccctcagtatttggctgctcctgaaaaacccgaccttcatacttttatgcttggctggtgccactgaggctacacttatcacagggatgtccacattctccccgaaatttcttgaaagccagttctctttgagcgcatccgaagcagccacactgtttggctacctggtcgtgcccgcaggcggtggcggtactttcttaggcggtttttttgtgaacaaactccgactcaggggatcggccgttattaagttttgtctgttttgcacagttgtgtctcttctcgggatactggtcttctctctccactgcccaagcgtgccgatggcaggagtcaccgcctcctacggcggaagcttgttgccagagggtcacttgaacctgacggcaccttgcaatgcagcatgcagttgtcagcctgagcactactcaccagtatgcggcagcgatgggctgatgtatttctccctgtgccacgccggatgccccgctgccaccgagactaacgtggacgggcaaaaggtatccggggcagccgcttaccgtccttgtcctccgcttgaccctggtaaaggccctccatgcctgcctttggtgattggtgccattgtcgggctgcccaggtgcactgaaaccgtggccgtgtcattacgcatttttcccctcgttttggccatgcctttgcaggggaacgcactccagctcgtgagggaatctccaagcttctggttcagttactccttatag

SEQ ID NO: 241897 - DNA, 2160 bp, synthetic construct
  misc_feature 1..2160: note = Description of Artificial Sequence: Synthetic coding sequence
  source 1..2160: mol_type = other DNA
atgttcgtcggtgtggcccgacatagcgggagccaagacgaagtttcgcggggagttgagcctctcgaagctgctagagctcagcctgccaaggacagacgggcaaagggaacaccaaagtcatcaaagccgggaaagaagcaccgctacctgagactccttccagaggctctgatacgttttggtggatttaggaaacgaaaaaaggccaagagtagcgtgagtaaaaagcccggtgaggtcgacgactctctggagcagccttgcggtctgggttgcctagtatcaacctgctgcgaatgctgcaacaatattcggtgtttcatgatcttttattgtattttgttgatctgccaaggagtcgtgtttggcttgattgacgtctccattggagactttcaaaaggagtaccaactgaaaacgatcgaaaagctcgccctggaaaaatcatatgatatatctagcgggctggtggccatcttcatagccttctacggcgatcgcaagaaagtgatttggtttgtggctagttcattcctcatcggactgggttccctcttatgtgcattcccatccatcaacgaggagaataaacagtccaaggtgggcatagaagatatttgcgaagagataaaggtggtgagcgggtgtcagagtagcgggatttcattccagagcaaatacctttctttcttcattctgggtcagacagttcaaggtattgccggtatgcccctttatatccttggtattacttttattgatgaaaatgtggctacacacagtgcaggaatctacctggggatcgccgaatgtaccagcatgataggttatgccctcggatacgtcctaggcgcaccattggtaaaggtcccagagaatacgacgtcagcaactaacactacagtcaacaacgggagtcctgagtggctgtggacctggtggatcaatttcctgtttgccgcagtggtcgcctggtgcacgctgattcctttgagctgcttcccaaataatatgcctggatccacaagaataaaggcccgaaagcgtaagcagcttcatttcttcgactcacgtctaaaagacctcaaacttggcaccaacattaaggatctgtgtgccgctctgtggatactgatgaagaaccctgttcttatctgcttagccctgtcaaaggctactgaatatctcgtcatcattggagcatccgagttccttccaatatacttagagaatcaatttattctgacacccaccgtcgccacgacactggcaggtttggtgcttataccgggtggtgcgcttggccaattgttaggaggtgtcattgtgtctaccctggagatgagctgtaaggccctcatgaggtttattatggtgacatcagtcatcagccttatcttgctggtgtttatcatctttgtccgctgtaacccggtgcagtttgccggtatcaatgaagactacgacggcaccggcaagctcggcaaccttaccgcaccttgcaacgagaagtgccggtgtagcagcagtatctactcatctatttgtgggagggatgacattgagtattttagcccctgcttcgccggttgtacatactcaaaggcccagaatcaaaagaaaatgtactacaactgtagttgtattaaggaaggactgatcacagccgatgccgaaggtgactttatagatgccagaccgggaaaatgcgacgctaaatgctataagctacccctttttattgcatttattttctctacactgatcttttccggcttctcaggtgtcccaattgtcctggccatgacccgggtggtgccagacaagctgaggagcttagcgctgggggtgtcatacgttatcctgcggatcttcggaactatccctggaccctcaatcttcaagatgagcggcgaaacgagttgtatccttagggatgttaataagtgtggccatactggccgttgttggatctacaacaaaacaaaaatggcctttctgttggttggaatttgttttctctgcaaattgtgtacgatcatctttaccacgattgcattcttcatttataaacgtaggctcaacgaaaatacagattttcccgacgtaacagtgaagaaccccaaagtgaagaagaaggaagagaccgacctctag

SEQ ID NO: 241898 - DNA, 1401 bp, synthetic construct
  misc_feature 1..1401: note = Description of Artificial Sequence: Synthetic coding sequence
  source 1..1401: mol_type = other DNA
atgtttgtgggagtcgcaaggcactccggatctcaggacgaggtttctagaggagttgagccactggaggccgctcgcgcacagcccgcaaaggatcggagagcaaaaggaacgccaaaatccagcaaacctggaaagaaacaccgctatttaaggttattgcctgaagctttgataagatttggaggctttagaaaacgcaagaaggccaagagttcggtcagcaagaagccgggtgaggtggatgatagcttggagcagccatgcggactgggctgtctggtctctacatgctgcgagtgttgcaacaatattaggtgcttcatgattttctactgcatcctgcttatttgtcagggggtggtctttggactcattgatgtaagtatcggagacttccagaaggagtatcagctaaagacgatcgagaaactggctcttgaaaagtcttacgatatcagttctggcctggtggcgatttttattgctttctacggcgatagaaagaaagtgatttggtttgtggctagttctttcctcattggtctaggctctctgctgtgtgctttccctagtatcaatgaagaaaacaaacaaagtaaggtaggaattgagggcattgctgagtgcacgagcatgattggctatgccctcggctacgttctaggagctcccctggttaaggtgcccgagaataccacctctgcaaccaagaccggcaaactgggcaatctgaccgcgccatgtaatgaaaagtgccgttgttcctcctcaatttattctagcatctgcggccgagacgatattgagtacttctctccatgcttcgccggatgtacctattcaaaggcccagaatcagaagaagatgtactataattgcagctgtatcaaggaaggcctgatcaccgcggatgcagagggggacttcatcgacgctcgtcctggaaagtgtgacgcaaagtgctacaagctgccactctttatcgccttcatattctcaaccctaatcttctcagggttcagtggagtgcctattgtccttgccatgacacgagtggtgcccgacaaattgagatccctagcactgggcgtcagctacgtaatcctccggatattcggtaccatccccggacccagcatcttcaagatgagcggggaaaccagctgcatcctgcgtgatgtgaataaatgtgggcatactgggaggtgctggatctacaataagaccaaaatggcgttcttattagtgggcatttgctttttgtgcaaattgtgcactatcatcttcaccacgatcgcattctttatttacaagcggaggctgaacgagaacaccgatttccccgacgtcactgtcaagaatcctaaagttaagaaaaaagaggagacagacctgtag

SEQ ID NO: 241899 - DNA, 1974 bp, synthetic construct
  misc_feature 1..1974: note = Description of Artificial Sequence: Synthetic coding sequence
  source 1..1974: mol_type = other DNA
atgtttgtgggcgtcgccaggcactcgggatcacaggatgaggtttctaggggagtagaaccactggaggctgccagggcgcagccagctaaagatcgcagagccaagggcacacccaagtcaagtaaacccggaaagaaacatcgttatctgcggctgctccccgaagcactgattcgattcgggggatttcggaaacggaagaaggccaaaagctccgtctctaagaaacccggtgaggtcgatgattccttagaacagccctgtggcttaggatgcctagtttcgacatgctgcgagtgttgcaataatatccggtgctttatgattttttactgtatccttctgatttgccagggtgtggtctttggactgattgacgtgagcatcggggactttcagaaagagtaccaactgaagactattgagaagctggccctggagaaatcttatgacatctccagcggtctggtggccatcttcattgctttctacggcgacaggaagaaagttatttggttcgtggcctcctcatttttgatcggactgggatcacttctgtgtgcatttccaagcatcaatgaagaaaataaacagtcgaaagttggtattgaggggatcgccgagtgtacatcgatgattggctacgctctgggttatgtgctcggggcacccctggtcaaagttccagagaataccacaagcgcaaccaacaccacagtgaataatggaagtcctgagtggctttggacatggtggattaactttctgttcgctgctgtggtggcgtggtgtacactgattccgttgagttgttttcctaataatatgcctggtagtacccgcatcaaagctagaaagcgaaagcagctgcatttctttgattccagactgaaagatctaaagctggggacgaatattaaagatctttgcgctgccctgtggatcctgatgaaaaatcccgtactgatttgtctcgccctttcgaaagcaacggagtatctagtgattatcggagcttctgagttcttgcctatctacttagagaaccaatttatcctgacccctaccgtcgcgactacgttggctggcttggtgttgatccccggaggggctctcggtcagctgcttgggggagtaattgtgtcaacactggagatgagttgcaaggctctgatgaggttcatcatggtgactagcgttatctccctaatcctgctcgtgttcattatctttgttcgttgcaatccagttcagttcgctggaatcaacgaggactacgatgggacggggaagcttggaaatctgacggctccatgcaatgagaagtgccgttgctcctcgtctatatattcttccatctgcggcagggatgatattgagtattttagcccctgcttcgcgggttgcacctatagcaaggcacaaaaccagaaaaagatgtattataattgtagttgcataaaagaagggctgataacagccgacgctgagggggacttcatagatgcgaggcccggaaaatgcgatgctaagtgttacaaactgcccctgtttattgcctttatattcagtacgctgatcttctcgggcttttctggcgttcccatagttttagccatgacccgagtggtcccggataagctacgctctctggccctcggcgtcagttatgtcatcttgcggatcttcgggactataccaggcccttcaatcttcaaaatgtcgggagaaacctcctgcattttgcgggatgtaaataaatgtgggcatacaggcagatgctggatctataacaagaccaagatggctttcctactcgttgggatctgctttctttgcaaactatgcactattattttcactacgatagccttcttcatctacaagcgcaggctcaatgagaataccgattttccagatgtaacggtgaaaaaccccaaggtgaaaaagaaggaggagacagacctgtag

SEQ ID NO: 241900 - DNA, 2160 bp, synthetic construct
  misc_feature 1..2160: note = Description of Artificial Sequence: Synthetic coding sequence
  source 1..2160: mol_type = other DNA
atgttcgttggggtggctcggcacagcggtagccaggacgaggtttcaaggggggtcgagccgctggaggccgcacgcgcacagcccgcaaaagaccggcgagccaagggaacacccaaatcttctaagcccggaaaaaaacacaggtatctgagattgctgccggaagctctgattcgatttgggggatttagaaaaaggaaaaaggcgaaatcctctgtatcaaaaaagcctggagaagtagacgactcgctcgaacaaccttgcggactgggctgtctggtaagcacgtgctgtgaatgctgtaataacatccggtgttttatgattttctattgcatcttgttgatatgtcagggagtggtgttcggccttatagacgtctctattggggatttccagaaggagtatcagcttaaaactatcgaaaaactcgccctcgaaaagtcttacgatatctcctccggcttagtcgccatttttatagccttttacggcgataggaaaaaggtgatttggttcgttgcttctagcttcctaatcggactcggatcccttctctgtgcttttccatctataaatgaggagaacaaacagagtaaggtgggaattgaagacatatgtgaggagataaaagtggtttcaggctgccagtcctcaggcatcagtttccagtccaagtatctctcattctttatactgggtcagactgtccaaggcatcgctggtatgcctctctacattttaggcattacatttatcgacgagaacgttgccacacattcagcgggtatttacctagggatcgcagaatgtactagtatgatagggtatgcattggggtatgtgttgggtgctccattagttaaggtccccgagaataccaccagtgcgaccaatacgactgtaaataatggatctcccgaatggctttggacttggtggattaattttctgtttgcagccgtggtagcctggtgtactttaattcccttgtcttgcttcccgaataacatgccaggtagcacaaggattaaggcccgaaagcgcaagcagttacacttcttcgactcccggctgaaagatcttaagttgggaacaaacatcaaggacctgtgcgccgctctctggatcctcatgaagaatcccgtgctgatctgcctggccctgagcaaggccaccgagtatctggtgattatcggggcatctgagttcctcccaatttacctggagaaccagttcattttaactcctacggtcgcaactacactggcgggtttagtacttattcccggtggcgctctgggacagctcttgggaggagtgattgttagcaccctcgaaatgtcatgtaaagctctgatgcggttcatcatggtcacttctgtgatttcgctaattctcctcgtgttcattattttcgtgagatgcaaccctgtgcagttcgctgggataaacgaggactatgacggcaccggtaaactcggtaacctcacagcaccatgtaacgagaagtgcaggtgttcttcctcaatctatagctctatatgcggtagagacgacatcgaatacttcagtccttgtttcgctgggtgcacgtactctaaagcacagaatcagaagaagatgtattacaactgcagctgtatcaaagaaggcctaataacggctgatgcagagggtgattttatcgatgccaggccaggcaaatgtgacgcaaaatgctataaactgccgctattcatcgccttcatctttagcacattgatttttagcggctttagcggcgtacccatcgtgttagcaatgaccagggtcgtcccagacaagctcagatctttggctttgggagtctcttacgtcatcctcagaatttttggcaccattccaggcccatccatcttcaaaatgtctggagagacttcatgtattctgagagacgtgaataaatgcggtcacactgggaggtgctggatttacaacaagacgaagatggcctttctgctggtaggcatttgttttctctgtaagctgtgcacaattatcttcaccactatcgcttttttcatctacaagcgtagactgaacgagaataccgacttccctgacgtgaccgtgaaaaatccgaaggttaagaaaaaggaggaaaccgatctgtag

SEQ ID NO: 241901 - DNA, 78 bp, synthetic construct
  misc_feature 1..78: note = Description of Artificial Sequence: Synthetic coding sequence
  source 1..78: mol_type = other DNA
ctcaatgaaaataccgactttccagacgtaaccgtcaagaatcctaaagtcaagaaaaaggaagagacggatctatag

SEQ ID NO: 241902 - DNA, 1401 bp, synthetic construct
  misc_feature 1..1401: note = Description of Artificial Sequence: Synthetic coding sequence
  source 1..1401: mol_type = other DNA
atgtttgttggcgtcgcgaggcacagcggcagccaagatgaggtgtctcgcggagtggagcccctagaggcagcacgtgctcagccagccaaagataggagggccaaaggtacacctaaatcgtctaagccaggcaagaaacataggtacctgcgcttgcttcctgaggcactgatacgttttgggggttttcgcaagcgcaagaaagccaagtcatccgtttccaagaagccgggtgaggtggatgacagcctcgagcagccgtgtggattaggctgtctagtgagcacttgctgcgaatgctgcaataatatcagatgctttatgatcttctattgcatccttctgatttgtcagggagtggtcttcgggctgatagatgtgtcaataggggattttcagaaggaataccagttgaagacaatcgaaaagctcgcccttgagaagtcatatgatatctccagtgggcttgtagccatcttcattgccttctacggagacaggaagaaagttatctggttcgttgcctcctctttcctgatcggactcggatctctgctttgcgctttcccatctatcaatgaagaaaataaacagagtaaggtgggcatagagggaattgcggaatgcacatccatgatcggatatgcgctgggatacgttctcggggcaccattggtgaaagtacctgagaataccacttccgccacaaaaaccggaaaactgggcaacctgacagctccatgcaatgaaaagtgtcgatgctcttcttcaatctacagttccatttgcggcagggacgacatcgagtacttcagcccatgtttcgccggatgcacatattctaaggctcaaaaccagaaaaagatgtactataactgctcttgtattaaggagggcctaatcaccgctgatgcggagggggatttcatagacgcccgaccaggaaaatgcgatgccaaatgttacaaactgcctctttttatcgcctttatattcagcacactcattttttcgggtttttccggcgttcccatcgtcttagccatgacacgggtagtgccggacaagctcaggtcacttgccctcggagtatcctacgtcattttgcgcattttcggcacgatcccaggcccttctatcttcaagatgtccggcgagacctcctgcattctccgggacgtgaacaagtgtggccacaccggacgctgctggatttataataagacaaagatggccttcctgctagttggcatttgcttcttgtgcaaactgtgtacaatcatctttacgaccattgccttctttatatacaagaggcggctgaatgaaaacacggatttccctgacgtcacagtcaagaaccctaaagtcaagaagaaggaagaaactgatttgtag

SEQ ID NO: 241903 - DNA, 351 bp, synthetic construct
  misc_feature 1..351: note = Description of Artificial Sequence: Synthetic coding sequence
  source 1..351: mol_type = other DNA
atgctgagctgtcgcctgcagtgcgccctggcggctctgagtatcgtccttgctctcggctgcgtgacaggggcaccttccgacccacggctgcggcagtttctgcagaagtccctagcggcagctgctggtaagcaagaactggctaagtattttctcgcggaactgctgagtgagccaaaccagactgagaacgacgccctcgaaccagaagacctgtcacaggccgctgaacaggacgagatgagactcgaacttcaaagatcagccaattccaatcctgccatggccccacgcgagcgtaaggccggatgtaaaaactttttctggaaaacattcacctcatgctag

SEQ ID NO: 241904 - DNA, 1176 bp, synthetic construct
  misc_feature 1..1176: note = Description of Artificial Sequence: Synthetic coding sequence
  source 1..1176: mol_type = other DNA
atgtttccgaatgggaccgcgtcctctcccagctcgtctccctcaccctccccgggatcttgcggggaggggggtgggagccgtggaccaggggcaggcgctgctgacggaatggaagaacccggtcgcaatgcgagccagaacgggactttgtctgaaggccagggcagcgcgatcttaatctcctttatatactcagtggtttgtctggtgggattatgtggcaattcaatggttatttacgtcattctgcggtatgcaaaaatgaagaccgccaccaatatatatattctgaatttagcgattgcggacgaattactgatgctgtcggtacctttccttgtcacaagtactcttctgagacactggcccttcggtgccctgctgtgccggctggttttatcggtggatgctgtgaatatgttcactagcatttactgcctcacagtgctgagtgtcgaccgatatgtggccgtcgtccaccccatcaaggcagctcgatatagaagacccaccgtggccaaggtggtgaatctgggagtatgggtcctctcgttactggttatccttcccatcgttgtgttttctcggactgcagctaatagcgacggcacagtggcctgtaatatgttgatgcctgaacccgcacagcgttggctggtcggttttgtgctttacacattcctaatgggctttctgttacccgtcggggcaatctgcttgtgctacgtgttgataatcgcaaagatgcgcatggtcgccctgaaggccggatggcagcagagaaagcgtagcgagagaaagattactcttatggtgatgatggtggttatggtgttcgtgatttgctggatgccattttacgtggttcagttggtcaacgtttttgcagaacaagacgacgctacagtgtcacagctgtccgtgattttggggtacgctaacagctgtgccaaccccatactgtatggctttctgagcgataatttcaagcgaagcttccagcggattctgtgtctgagctggatggataatgccgctgaggagcccgtggactattacgcaactgcactcaaaagtcgggcatacagcgttgaagattttcagcccgagaatctggagtcgggaggtgtcttccgaaacggcacttgtacctcaagaattaccaccttgtag

SEQ ID NO: 241905 - DNA, 1257 bp, synthetic construct
  misc_feature 1..1257: note = Description of Artificial Sequence: Synthetic coding sequence
  source 1..1257: mol_type = other DNA
atggatatgctccaccccagcagcgtctcaacaacatccgagccagaaaatgcttcttctgcatggccaccagatgcgacgctcggaaacgtgtcggctggcccatctcctgcaggactggcggtgagcggagttctcattccactcgtctatctcgtggtgtgcgtcgtggggttgctggggaactcgttggtcatttacgtcgtgctgaggcacaccgcaagtccctctgttactaacgtttacattttaaacctggccctggccgatgaactattcatgctgggactgccctttctggccgctcagaacgctttgagttactggccatttggcagcttgatgtgtaggttggtgatggccgtggacggcatcaaccagttcacttccattttctgtttaactgtgatgtccgtggatcggtatttagccgtcgttcatccaactaggagcgcccgatggcgtacagctccggtcgcccgtacggtgtcagcagccgtgtgggtagcctcagcggttgtggtcctgcccgtggtcgttttttccggggtccccaggggtatgagcacgtgtcacatgcagtggccggagccggcagccgcttggcgtgcagggttcatcatctatactgccgctctgggtttttttgggcctttactggtcatttgcctgtgctacctgctgatcgtcgtcaaggtgcggagcgcaggacggcgagtctgggcacccagttgtcagcgcagaaggagatccgagcgcagagtgaccagaatggtcgtcgccgtggtagcgctgtttgtcctctgctggatgcctttctacgtcttaaacatcgtcaacgtggtctgtccactgccagaagagcccgcattcttcggtctctattttctggtggtagctctaccctacgcaaattcatgtgccaacccgattttatatggtttcctgagctatcgttttaagcagggctttaggagggtgctgttacgccctagcagacgcgtgcggtcccaagaaccaaccgtcggcccacctgagaagacggaggaagaagatgaggaggaggaggatggtgaggagtctcgcgaagggggtaaaggcaaggaaatgaacggacgtgtaagccaaattacacaacccggtacgtcaggtcaggagcgccctccctccagagtcgcctctaaggagcaacagctcctcccgcaggaggcctcaactggtgagaaatctagcacaatgaggatctcatacttgtag

SEQ ID NO: 241906 - DNA, 1257 bp, synthetic construct
  misc_feature 1..1257: note = Description of Artificial Sequence: Synthetic coding sequence
  source 1..1257: mol_type = other DNA
atggacatgctacatccatcctccgtatcgaccacctccgagcctgagaacgccagcagtgcctggccgccagacgcgacgttggggaacgtctcagctggaccttccccagccggtttggccgtaagcggagtgttgatccctctggtgtatctggttgtgtgcgttgtcggcttgctgggaaacagcctggtgatctatgtggtcttgaggcacactgctagcccgtccgttaccaacgtctacatccttaatttggcactcgctgacgaattgttcatgttgggccttcctttcctggccgcacagaatgcactttcatactggccatttgggtccctaatgtgtaggttggtgatggctgtagacggtatcaatcagttcactagtatattttgcttgaccgtaatgtcagtcgaccgctatcttgctgttgtccaccctacgcggtccgcaagatggcgcaccgcaccagtggctagaacggtatctgccgctgtgtgggtggcctccgccgttgtggtactccctgtcgtggtgttctctggggttccacgcggaatgtccacttgccatatgcaatggccagaacctgccgctgcatggcgggctggattcatcatatataccgccgctttggggttctttggtccccttcttgtcatttgcctgtgttacctgctcattgtggtaaaggtcaggtccgctggtcgcagagtctgggctccaagctgccagcggagacgccgttctgaacgcagagtaacccgaatggtggtggcggtcgtggccctattcgtcttgtgttggatgccattctatgtcctgaacatcgtgaatgttgtgtgcccgttgccagaagaaccagccttctttggactgtacttccttgtcgtggccctcccgtatgccaatagctgcgccaatcccattttgtacggattcctttcatacagatttaaacagggttttaggagagttttgctgaggccctccaggagggtccgcagtcaagaaccaacagtgggccctcccgagaaaactgaggaggaggacgaggaggaagaggacggggaggagagcagggaggggggaaagggaaaggagatgaacgggagagtctcacagatcactcagcctggcaccagcggacaagagaggcctccctccagagtggcttcaaaagaacaacaattgctgccacaggaggcatctaccggcgagaaatcaagcacaatgagaatttcctatctgtag

SEQ ID NO: 241907 - DNA, 1167 bp, synthetic construct
  misc_feature 1..1167: note = Description of Artificial Sequence: Synthetic coding sequence
  source 1..1167: mol_type = other DNA
atgagtgctccctccaccctccctcccggtggtgaggaagggctgggcaccgcctggccctctgccgcaaacgcgagctctgcacctgctgaggctgaggaagctgtggccggacctggggatgctagagccgcaggcatggtggctatccaatgtatatatgccctggtttgtttagtcggattggtgggcaacgctcttgtgattttcgtgattctccgttatgctaaaatgaaaacagctacaaatatatacctgcttaacctggctgtggcagacgagctttttatgctttcggttccatttgtcgcctcctcggccgcactccggcactggccattcggaagtgttctctgccgagcagtcttgagcgtggacgggctgaatatgtttaccagcgttttttgcctgactgtcctatctgtggatcgatacgtggccgtcgtgcacccccttcgcgctgcaacctatagaaggccaagcgttgccaagctgatcaatctgggcgtgtggctcgcctccctcttggtcactctcccaattgctatcttcgccgacaccaggcccgcaagaggagggcaagccgtggcctgcaatctgcaatggcctcaccctgcctggtctgccgtgtttgtcgtctatacattcctgctcggatttcttctcccagtgttagccattgggctttgctacctactgatcgttggcaagatgagggcagtggctttacgtgccggatggcaacagcgcagacgctccgagaagaagattacacgcctggtgctcatggttgttgtggtgtttgtgctttgctggatgcctttctacgtagttcagttgctcaaccttttcgtgactagcctcgatgctaccgtgaaccatgtgagtctgatattgtcttatgcaaactcatgtgctaatccaatcttgtatggattcttgtctgataatttccgacggtttttccaaagagtcctgtgcctacggtgctgcctgttagaaggagccggaggtgcagaggaagagccgcttgactattacgccacggcactgaaatcaaaaggtggcgctgggtgtatgtgccccccactgccatgtcagcaagaggctctccagcccgagcctggaaggaaaaggattccactgactcgcaccactacattttag

SEQ ID NO: 241908 - DNA, 1095 bp, synthetic construct
  misc_feature 1..1095: note = Description of Artificial Sequence: Synthetic coding sequence
  source 1..1095: mol_type = other DNA
atggagcctctgttcccagcgtctaccccctcttggaatgccagctcccccggtgccgcatctggcggaggtgataaccggacgctagtggggccagcaccttctgccggtgccagggccgttctggtcccagtgctgtacctgctggtgtgtgcagccggactcggcggaaataccttggtaatatatgtagtcctgaggttcgccaaaatgaaaactgttacgaacatctatatcctaaacctggctgtggccgatgtactgtacatgcttggacttccttttcttgctacccagaacgcagcgtctttctggccattcgggcctgtgctatgtagactcgtgatgacgcttgatggggtcaaccaatttaccagcgtgttctgcttgacagtgatgagtgtggacagatatcttgccgtggtgcatcctttatccagcgcgaggtggaggaggcctcgtgtggccaaattggcctctgctgctgcgtgggtattgtcactatgcatgagccttccactgctagttttcgctgacgtccaggagggcggaacctgtaatgcttcctggccagagcctgtagggctgtggggcgcagtcttcattatctatactgccgtcctggggttctttgcccctctgcttgtaatctgtctgtgttacctattaatcgtggtgaaagtgcgggcagccggagtgcgagtgggatgtgtgcgcagacgcagcgagaggaaggtgacccgcatggtgctggtcgtggtccttgtgtttgcgggttgttggcttccattcttcaccgttaatatcgtcaaccttgctgtcgctctgccccaggaacctgcctcagcaggtctgtattttttcgtcgttattctttcctatgccaatagttgtgcgaacccagttttgtatggatttttgagcgacaatttcaggcagtcgtttcaaaaggttttgtgtctcagaaaagggtcgggtgctaaagacgccgacgccaccgagccaagacccgaccggatcagacagcagcaggaagcaactcctccagctcatagggctgcggctaacggtctcatgcagacgtctaaactgtag

SEQ ID NO: 241909 - DNA, 1095 bp, synthetic construct
  misc_feature 1..1095: note = Description of Artificial Sequence: Synthetic coding sequence
  source 1..1095: mol_type = other DNA
atggagccattattccccgctagcacgccctcgtggaatgcaagctctcccggagctgcgtctggaggaggagacaatcggacgttggtgggtcctgcaccgtccgctggggcaagggctgtgctcgtgccggttctatacctcctggtgtgtgcagctggcttgggtggcaacactctcgtgatttacgtcgtgctccgatttgctaagatgaaaacggtgacgaatatctatatactgaatcttgccgtcgccgacgtcctgtacatgctggggttacctttcctggctacccaaaatgcggcatctttctggccttttggacccgtactgtgcaggctcgtgatgacactcgacggggtgaatcagtttacttcggtgttctgtctgaccgttatgtccgtagaccgttacttggcagtggttcacccactgagctcagctaggtggcggagaccgagggtggcaaagcttgcctctgcagcggcttgggtcctgtctctctgtatgtccttgccacttctggttttcgctgatgtgcaggaaggtggcacttgcaatgctagctggcccgaaccagtgggcctgtggggcgctgtgttcatcatttataccgccgttctgggcttcttcgcaccgctgttagtgatttgtctctgctacctattgatcgtggttaaagtgcgggctgcaggcgtccgcgtaggatgtgtgcggagaagaagtgagcgcaaggtcaccagaatggtgttagtggtcgtactggtgttcgctgggtgttggctgccattcttcaccgttaacatcgtaaatttggctgtggcattgccacaggaaccagcatcagctggcctttatttcttcgtggtgatactcagttatgccaacagctgtgctaatccagtcctatatggtttcctgagcgacaacttccggcagtcgttccaaaaggtcctctgtctcaggaagggatcgggtgccaaggacgccgacgcgaccgaaccgagacccgacagaatccgacagcaacaggaggcaacacccccagcacatagagctgccgcaaacggtctgatgcagacttccaaactatag

SEQ ID NO: 241910 - DNA, 822 bp, synthetic construct
  misc_feature 1..822: note = Description of Artificial Sequence: Synthetic coding sequence
  source 1..822: mol_type = other DNA
atggagccactgtttcctgcctcaacaccgtcgtggaacgcttcctcacccggtgcggcaagcggcggaggtgataacaggacactcgtaggaccagcgccttccgctggtgcaagagcggtgctggttccagtgctctacttacttgtatgtgccgctggactcggtggtaatacacttgtcatttacgtggtcctccgcttcgccaagatgaagaccgtgaccaacatctatatcctgaacctagccgtcgccgacgtgctgtacatgcttggacttcccttccttgcaacccaaaatgctgccagtttctggcctttcggtccagtgctctgcaggttggtaatgactcttgatggggtgaaccagttcaccagtgtgttttgcttaaccgtgatgtccgtggaccgatatctcgccgtcgttcatccgttaagctctgccagatggcgacgaccacgggtggccaaactggcctctgcagctgcgtgggtgctgagcctgtgtatgagtctccctctactggtctttgcagacgtgcaggaagggggtacgtgcaatgcttcctggccggagccagtagggctctggggcgcagtctttataatctacacagccgttctgggcttcttcgctccattacttaggggatctgggagggccggtgacgccaacggtaggccttgggaatcgcggagattaccgccacgaatcgtgctccctccccctcctcaaacccccgctttccccggagcgccaggaccagagagaggtccgagggagccatgttggggcctatggggcacgttggcactcctatag

SEQ ID NO: 241911 - DNA, 6978 bp, synthetic construct
  misc_feature 1..6978: note = Description of Artificial Sequence: Synthetic coding sequence
  source 1..6978: mol_type = other DNA
atggctacaaacatcgagcaaattttcagatccttcgttgtgtccaagttccgtgagatccagcaggagctttctagtgggaggaatgagggacaacttaatggcgagacaaacacacccattgagggaaaccaggctggcgatgctgcagcatcagctaggtccctgccaaatgaagaaatcgtgcagaagatagaagaagtgctgagcggcgttctggacactgagcttaggtacaagcccgacctcaaagagggcagcagaaagtcgagatgcgtctcggtgcagactgatcccaccgacgagatccccactaagaagagtaaaaagcacaagaagcacaaaaataagaagaagaagaagaaaaaggaaaaggaaaagaagtataagcgccaaccggaggaatctgagagcaagacaaagagccacgacgatgggaacatcgacctcgagtctgattcgttcctgaagtttgactcagaaccatctgctgtcgctctcgaacttccaacccgtgcgtttgggcctagcgaaactaacgagtcacctgctgtcgtgttggagcctcctgtagtttcaatggaagtgagcgaacctcatattctcgaaacattgaaacccgcaaccaaaacagccgaactgtccgtggtgagcacttcagtgataagtgaacaatcggagcaaagtgtggccgtcatgcctgagccctcaatgaccaaaatcctagacagttttgcggcagctcctgtgcctacaaccaccctcgtgctcaagtccagcgagccggttgtcaccatgagtgttgagtaccaaatgaagtcagtgctgaaatccgtggaatctacgagcccggagccctcaaagatcatgctggtggaaccgccagttgctaaagttctcgagccctctgagacactggttgtgtctagcgagaccccgacggaagtgtacccggagccatcgacttccactaccatggatttcccggagtccagcgctatcgaagcccttcgcctacctgagcagccagtggacgtgcctagcgagattgctgattcttcaatgacaagaccacaggagctgcccgaactgcctaaaaccacagcacttgagctgcaggaatcctccgttgcatctgctatggaacttccaggcccaccggctacatctatgcctgagctgcagggaccccctgtaacgccagttcttgagctccctggaccttctgccacaccggttcccgaactgccaggacccctcagcactccagtccccgaattgccaggccctcccgcaaccgccgtgcctgagttgcctggcccttcagtcaccccggtcccacagctgtcccaagaactccccggacttcctgctccttctatgggtttggagccccctcaggaggtccctgagcccccagtaatggcacaggagttaccaggactcccgctggtcacagccgctgtggagttacccgagcagcctgccgtgactgtagcaatggagctgaccgagcagcctgtgacaaccaccgaactggagcagcctgtaggaatgactaccgtggagcaccccggacacccggaggtgaccaccgcaacggggctgctgggacagcccgaggccaccatggtcctggagctgcccggtcagcctgtggcaacgactgccctggagctccctgggcagccctctgtaacaggcgtgcctgaattaccaggtctcccttcagcaacgagagcactggagctcagcgggcagccagtggcaactggggctctagaactccccggaccactgatggccgctggggctcttgaattcagcggtcagtcaggcgctgccggtgcacttgagctgctgggccagcccctggcgaccggcgtattggaattaccaggacagcctggagcccctgagttgccagggcagccggtagccaccgtggcactagagatttctgtccagtctgttgttactacgtccgaattatccaccatgacagtgagtcagtctttggaagtgccttcaacaactgccctggaatcttacaacaccgtggcacaggagttgccaactacactggttggagaaacgtccgtaactgttggggtcgaccctttgatggcaccagaaagccatatcctcgcttctaacaccatggagactcacattctggcttctaatactatggattcccagatgctggctagcaacacaatggatagccagatgctggcttctaatactatggacagtcagatgttggcatcttccacaatggatagtcagatgttggctacctcatcgatggacagtcagatgctggcaacaagctctatggattcccagatgctggccacctctacaatggattcgcagatgctggctacttcttcgatggattctcagatgttggctaccagctctatggatagtcagatgctagccacctcctctatggacagccagatgcttgccacatcgtccatggatagccaaatgcttgctacaagcacgatggactcacaaatgttggcgacctccaccatggactctcagatgctcgccacatctagcatggattctcaaatgctggccagtggcaccatggacagccagatgctggcctcagggactatggacgcgcagatgctggcatctggaactatggatgcccagatgctggcttcctccacccaggactcagccatgctgggctcaaagtcccctgacccctaccgcctagcccaggacccttacaggctggcgcaggatccatatcgtctgggccacgatccctatcggctgggtcatgatgcatatagactcggtcaagacccataccgactgggtcatgatccatacaggctgacacctgatccatacaggatgtcgcctaggccctatagaatcgcccctcgcagctacagaatcgcccctcgaccctatagactcgccccaagacctttaatgctggccagtcgacggtcaatgatgatgagttacgccgctgaacggtcaatgatgtcctcctacgaaaggtctatgatgagttacgaacgtagtatgatgtcccctatggctgaacgatcaatgatgtcggcttatgaacggagtatgatgtcagcatatgaacgatctatgatgtcacccatggccgagagatcaatgatgtccgcatacgaacgatccatgatgtctgcatatgagcggtcaatgatgtctcctatggcagataggtcgatgatgagcatgggtgcagacaggagcatgatgagttcctactcagccgcagatcgaagtatgatgtccagttattccgccgctgatcggtcgatgatgtcatcatatacagctgataggtctatgatgtctatggctgctgattcctacactgatagctataccgacacatatactgaggcatacatggtgcctcccctgcccccagaagagcctcctactatgcctccactgccccctgaagaacccccaatgacacctcctctgcctcccgaagagccacccgagggccctgcattgccgacagaacagagcgcactgactgcagagaacacctggccgacagaggtaccatctagtccttcagaagaatcggtcagtcagcctgagccccctgtaagtcagtctgaaatcagtgagccctccgcggtcccaaccgactactcggtttccgcgtcggacccctctgtcttggtgtcagaggcagccgtcaccgtccccgaaccgccaccggagccagaatcgtccatcacactcaccccagtggagtccgcggtcgtcgcggaggagcacgaagttgttcccgagaggcccgtgacctgcatggtgagcgagactcccgctatgtctgccgaacctaccgtgttggcaagcgagccccctgttatgagcgagaccgctgagaccttcgactctatgcgtgcttccggtcatgtggccagcgaggtatcaacatccctgctagttccagccgtaaccaccccagtgctggctgagtcaatcctggagccacccgctatggccgcacctgagtcaagtgccatggctgtcctggaatcttcagccgtgaccgttcttgagagttcaaccgtgacggttctggaaagctccacagtgacggtactagaaccttccgtggttacagtgcctgagccacctgtagtggccgagcccgactatgtaaccatccccgtgccggtggtttctgcactcgagccaagtgtgccggtcctggagccagctgtgtcagtcctgcaaccgtcaatgattgtatcagaaccctcggtgagcgtccaggaatctacagtgaccgtctccgaaccggctgtgaccgttagcgagcaaacacaagtcattccaaccgaagtagccattgaaagtacaccgatgattcttgaatccagtatcatgagttctcacgtaatgaagggaatcaaccttagcagtggggatcaaaacctggctcccgaaattggcatgcaggaaatcgcattgcattctggggaggagccccacgccgaagagcacctgaaaggtgacttctatgagagtgagcacggcatcaatattgaccttaatattaacaaccacctgatcgccaaagagatggagcacaacactgtgtgcgctgcagggactagcccagtcggggagataggagaggagaagatcctgccgactagcgaaaccaagcagagaaccgtcctggacacataccctggcgtgagcgaggccgatgctggggagaccctatcaagcaccggaccttttgcactggagccagatgccactggaacctcaaaggggatagagtttacaacagcttcaacgttatcccttgtgaacaagtatgacgtcgatttatcactaacaacccaggataccgagcatgacatggtcatatcaacaagtccctccggtggttccgaggcagatattgaaggtccgctccctgctaaggacatccacttggatctgccctccaacaataatctagtgtcgaaggacaccgaagaaccgttgcccgtgaaggaatcagaccaaaccttggctgctcttctcagccccaaagaaagcagtggtggggagaaagaggtccccccaccacctaaggagacactgccagattcaggattctctgccaacatagaggacatcaacgaggccgatctggtgagacccctgctgcctaaagatatggagcggctgacatcattaagggccggaatagaaggtccactcctggcatccgatgtgggtagggacagaagtgcggcatcccccgtcgtgtcctctatgcctgaacgcgcttcagaaagcagcagcgaggagaaggacgattatgagatctttgtgaaagtcaaggacacacacgagaaatcaaagaaaaataagaatcgcgacaaaggagagaaggaaaagaagagggacagctctctgaggagccgctccaagcggtctaaaagcagtgaacacaaatcaaggaagaggacgtcagaatctcgctcgcgcgctcgcaaaaggagtagtaagtctaagagtcataggagccagacccgcagccgatcaaggtctcggcgacgccgtcgtagctctagaagcaggtctaagtcaagggggaggaggagcgtgtctaaagaaaaacgtaagagatcacccaagcaccgatcgaagtcccgagagcggaagcgtaaacggtcctcatcaagagacaatcgcaagacggtgagggcgagatcacggacaccgagcagacggtcccgaagccataccccatctagacgccgtaggagcagaagcgtcggtagaagaagatctttctctatcagcccctcaagacgaagcagaaccccttctagaagaagccgtaccccatctcgccgttcacgtacaccatcgaggcggtcccgtactccgtccagacgttcccgcaccccttcaagacgttcccgcaccccatcaaggaggcggcgttcgagatcagtggtgaggcggagatcattcagcatatcaccggtccggctgcggagatcccggacgccattacgaagaagattctcacgctcaccaattcggaggaagcgatcccgaagcagcgagcggggacgcagtcccaagcgcctcaccgatcttgataaggctcagctacttgagatagccaaggcgaacgccgcagctatgtgtgccaaggcaggcgtgcccctccccccaaacctgaagccagcaccgccacccacaatcgaggagaaggtggccaagaagtctggcggagccacaatcgaagagctcactgagaagtgcaagcagatcgcacagtctaaagaggacgacgacgtcatcgtcaataagccccatgttagcgacgaggaggaggaggaacctcctttctaccaccatccttttaagctttccgaacccaaacccatctttttcaacctcaacatcgccgcagctaaacccactcctccaaagtcgcaggtcactttgactaaagaattccctgtttcctccgggtcccaacacagaaaaaaggaagccgacagcgtttacggcgaatgggtaccagtcgaaaagaacggggaggaaaacaaagacgatgacaatgtctttagctctaatttgccctccgagcctgttgatatttctaccgccatgagcgaacgcgcacttgcgcaaaagcggctgtctgaaaatgccttcgacctcgaagccatgtcaatgctgaacagagctcaggagcggatagatgcatgggcccagctcaactcgatccctgggcaattcactggtagtactggcgttcaggtcctgacacaggagcagctggctaatacgggtgcccaggcctggataaagaagggtcagatcctggtggcggtgtttttgcctcggagcgtccccgctgtactgtttacgaccctccttctccctaggccccgaatatccagttac

SEQ ID NO: 241912 - DNA, 6911 bp, synthetic construct
  misc_feature 1..6911: note = Description of Artificial Sequence: Synthetic coding sequence
  source 1..6911: mol_type = other DNA
atggctactaacatcgagcagatatttaggtctttcgtagtgtccaaatttcgggagattcaacaggagctgtcgagcggtagaaatgagggccagctgaacggagagaccaacacgcctatcgaggggaaccaggccggagatgcagccgcatccgctagatcactcccaaatgaagaaatagtgcagaagattgaggaggtcctctcaggcgtgctggacacagaacttcggtataaaccagatttgaaggagggtagccggaagtcccggtgtgtctcagtgcagactgacccaactgacgagatccccactaaaaagtccaaaaagcataaaaagcacaaaaacaagaaaaagaagaagaaaaaggaaaaagaaaagaagtacaagagacagcccgaggagtccgaatccaaaaccaaatcccacgatgacggaaacattgatctggaaagtgattcgttcctgaagtttgatagcgaaccttcggcggtcgccctcgagttaccgacaagagcctttggtccatccgaaaccaacgagagtcccgcagtggttctggaaccccctgttgtatctatggaggttagtgagcctcatattctagagacattgaaaccagctacaaagacagcagagctgtccgtagtgtcgactagtgtgatcagcgagcaaagcgagcagtccgttgccgtgatgccggaaccttctatgacaaaaattctggatagcttcgcagcggcacctgtgccgaccaccacgctcgtcttaaaatcttctgaacccgtcgttaccatgtcagtcgaataccagatgaagtctgtgctgaaaagtgtggaatcgacatccccagagccatcaaaaatcatgctcgtagaaccccctgtggccaaggtgctggagccgagcgaaactcttgtggtctccagtgagacccctacagaagtttatccagagcccagcacctctaccaccatggacttccctgagtcctctgcgattgaagctcttcgactgcctgaacagcctgttgacgttcccagtgagatagctgattcatcgatgactcgaccccaagaacttcctgagctgcctaagacgactgcactggaacttcaggagtcatctgtggcctcagccatggaactgccagggcctcccgctacttcgatgcccgaattgcaagggcctcccgttacccccgtgttggaacttcctggcccttctgccaccccggtaccggagttgcctggtccactgagcacgcctgttcctgaattacctggacccccagccacagcagtgccggagcttcctggcccttctgtgactcccgtccctcaactctctcaggagctccccggacttcccgctcccagcatgggtctagagcctcctcaggaggtacccgaaccgccagtgatggcacaggagcttcccggactgcccttggtaaccgcggctgtagaactgcccgaacagcccgcagtgaccgtggccatggagctgacggagcagccagtgaccactaccgaactggagcagccggtcggtatgactacagtagagcacccagggcacccggaggtgaccacagctacaggactgctgggacagcctgaagcaaccatggtcttggagcttccagggcagcccgtagctaccacagcattggaattaccagggcagccttccgtgacgggagttcccgaactgcccggactgccgtctgccactagggcattggagctgtctggacaaccggtcgcgactggggctctcgagctaccgggtcccctgatggccgcaggagccctggagttttccggccagagcggcgctgccggtgcattggagctgctaggacaacccctcgccactggcgtcctggagcttccaggccagccaggcgctcctgagctgcctggccaacccgttgcaaccgtagctctggaaatctcagttcagagtgtggtcaccacctccgaattgtctactatgaccgttagtcagagcttggaggtccccagcacgaccgctttggagtcatataacaccgtcgcacaagaactgcccacaacgctcgtgggggagactagcgtgacagtgggggtcgatcctctgatggcccctgagagccatatcctcgcttcaaataccatggagactcatatccttgcttctaatactatggattctcagatgttggcttcaaacacaatggacagtcaaatgctcgcaagcaacacaatggacagccagatgctggctagctctaccatggactcccaaatgctggccacatcatccatggactcacagatgttagccacgtccagcatggactcccagatgctggctacgagcactatggactctcaaatgttagcaacctcctctatggatagtcagatgctggctacatctagcatggacagtcaaatgctggctacatccagcatggattctcagatgctggccaccagcagtatggactcacagatgctcgcaacctctacaatggatagccagatgttggcaacgtccactatggacagtcagatgcttgcgacaagtagcatggacagtcagatgttggcgagcggaacaatggatagccaaatgcttgcctccggcaccatggacgcccagatgttggcctcaggcacaatggatgcccagatgctggcttcatcaacccaggatagtgccatgcttggaagcaagtcgcccgacccctaccgcctggctcaagacccatacaggcttgcccaggacccatatcggctcggtcatgacccctatagactgggacacgacgcctacaggctaggccaggacccgtaccggttgggacatgacccttacaggctcacccctgatccctataggatgagcccacgcccataccggatcgctcccagaagctatagaatcgctccgagaccttacagattggctccacgcccactcatgctcgcatccagacggtccatgatgatgtcttacgccgcagagcggagcatgatgagctcatatgagcgcagcatgatgagctacgaaagaagcatgatgagccccatggccgagagatcgatgatgagcgcctatgagcgctcaatgatgtctgcgtacgagagatctatgatgtccccaatggctgagcgatctatgatgagcgcttatgagcgttctatgatgagtgcttatgagaggagcatgatgagccccatggccgacagaagtatgatgtctatgggggctgacaggtccatgatgtccagctactctgcagccgatcggagcatgatgagctcttactcagctgcagaccggagcatgatgtcgtcctacacagctgaccggagcatgatgagcatggctgccgatagttacaccgacagttataccgatacctatacagaagcctacatggtgcctccactgcccccagaagaaccgcctacaatgccgccactgcccccagaagagcctcccatgactcctccacttccccctgaggagccacctgaggggcctgcactgcctacagagcagtccgcattaactgccgaaaacacctggccaacggaagtgccatcatcgccctccgaagaatctgtctcacaacccgaaccacccgtttcacagtctgagatcagtgaaccatctgctgtgcccaccgactactccgtctcagcttccgacccctccgttcttgtgagcgaggccgctgtgactgttcctgagccaccacccgaacccgagagtagcatcactctcactcccgtcgaaagtgccgtagtggccgaggagcatgaggtcgtgcccgaaaggcccgtcacctgtatggtctctgaaacacctgcgatgtccgctgagccaaccgtgctggcttccgagcccccagtcatgtcagagaccgccgaaacctttgactcaatgcgagcctccggccatgtggcttccgaggtcagcacatctttactagtacccgcagtaacgaccccagttctagcggaaagcatacttgaaccgcctgccatggctgcacctgaatcatccgcgatggccgtgctcgagtcctctgcagtcactgtgctggaatctagtacagttacagtgctggaatcaagcacggtgacagttcttgaaccctcagtagtaactgtgccggagccaccagtggtggcggagcccgactacgtgacaattcccgttcccgtggtgagtgcccttgagccaagcgtccctgtactggagcccgcagtgtcagtcctccagccctccatgattgtgtcagaaccatccgtgtccgtgcaggagtctacagtcactgtgtccgaacccgcagtgacagtgtctgagcagacccaggtaatacccaccgaggtggcaattgaatccacacccatgattctggaaagcagcatcatgtcttctcacgtcatgaaagggattaacctttccagtggcgaccagaatctggccccagagatcggaatgcaggagattgccctgcacagcggcgaggaaccacacgcggaggagcacctcaagggggatttctacgaaagtgagcacggaataaacatagacctcaacatcaacaaccatttgatcgccaaggaaatggaacacaataccgtgtgtgccgctggtacatcaccagtaggggagattggcgaagagaagattctgccaaccagtgagacgaagcagaggacagtgttggatacatatcccggagtgtctgaggcagatgcaggtgagacactttcgtcaactggaccctttgccctggagcctgatgccaccgggacttcaaaaggcattgaatttaccaccgctagcacccttagtctggtaaataagtacgacgtcgatctgtctctcaccactcaagataccgagcacgatatggttattagcaccagtcctagcggtggaagtgaagcagacattgaaggccctttacccgctaaggacatccatttggacttgccatccaacaacaacctggtcagcaaggacacagaggaaccacttcccgtgaaagaatcagaccaaactctggctgcgctgctcagccctaaagagtcttccggtggggaaaaggaagttcccccacccccaaaggagacactccccgactcggggttctccgcaaacattgaagacattaacgaagctgatcttgtacgacctctgctccccaaggacatggagcgcctgaccagcttaagggctggaattgaggggcctctgctcgcatctgacgtaggccgagataggtccgcagcgtcccccgtcgtgagttctatgcccgaacgcgcaagtgagtccagctctgaggagaaggatgactatgaaatcttcgtgaaagttaaggatacacatgagaagtccaaaaagaacaaaaatagagacaagggggaaaaagaaaagaagcgggacagcagcttacggagccgcagcaagcggtccaaatctagcgagcataagtcacggaaacggacttcagaatctcgcagtagagcacgcaaaagaagctcaaaaagcaaatcccaccgctcacaaaccaggagcagatcccgaagcagaagaaggcgccgttccagtaggagtaggagcaagagccgtggtcgcaggtctgtgtccaaggaaaagaggaaacggtcaccaaagcatagaagcaaatcacgggagaggaaaaggaaacgctccagctctagggataatagaaagacagtgcgggctcgctcacgcacgccgtcaagaagaagtcgatcccacacaccgtcacgtaggcgccgttccagatctgtaggacgccgaagatccttcagcattagtcccagtcgaagatctaggaccccctctcggcgttcaagaactccaagccgccgaagccgcacaccctcacgcagatctagaactccttcccgtcggagcaggactccgagcaggaggtcgaggacgccaagtcgcaggcgacgcagtcgcagcgtggtcagacgaaggtcattcagcatcagtcccgtcaggcttaggagaagcaggacacctctccgaaggaggtttagcaggagccccattagaagaaaaagatcccggagtagcgagagagggagatctcctaagcggttgacagacctggataaggcacaattgctggaaatagccaaggctaatgcagccgctatgtgcgccaaggctggggtgcctttaccccctaatctaaaacccgctcctcccccaacaattgaagagaaagtagcgaaaaagagtggaggcgcaaccattgaagaattgacagagaaatgtaagcagattgcacagtcaaaggaagatgacgacgtaatcgtcaacaagcctcatgtgtctgacgaagaagaggaagaaccccctttttatcatcatccttttaagctgtctgagcccaagccaatctttttcaatttgaacatcgcagccgctaaaccgacacccccaaagtctcaggtgacgctcaccaaagagttccccgttagctccgggagccagcatcggaagaaggaggccgacagtgtgtacggagaatgggtgccggtggagaagaacggtgaagaaaataaagatgacgacaacgtttttagttctaacctaccaagcgaagggagagtgaaacgccaggggcgtgtgcggaggcagatgaagcagccagctgcctcccatttaactgtgacgcgctgtaattctctgtgtgggactaagcctcagagcgaaaagcaccggattgctgagaactccgtgatcacaagcttgcccaatatcggacccagtctgcacttatgggaagggtcaccaagatacaattaccttgcatctaggtttgcctcccgactgtattccagcagattctggtggta

SEQ ID NO: 241913 - DNA, 7280 bp, synthetic construct
  misc_feature 1..7280: note = Description of Artificial Sequence: Synthetic coding sequence
  source 1..7280: mol_type = other DNA
atggcaacaaacattgagcagatttttcgttctttcgttgtgtccaagttccgggagatccagcaggaactgagcagcggacgaaatgaagggcagctgaatggggagacaaacacacccatcgagggaaaccaggcaggcgatgccgcagcatctgcacggtccttgcccaatgaagagatcgtgcaaaaaatcgaggaagtgctcagtggcgtcttggatacagaactcaggtacaagcccgacctgaaggaggggtccaggaagtcacgctgtgtatcggtacagaccgaccccaccgacgaaataccaaccaagaagagtaaaaagcataaaaaacacaaaaacaaaaaaaagaagaaaaaaaaggagaaggagaagaaatacaagcgacagcctgaggagagcgaaagcaaaaccaagagtcacgacgatggaaacattgatctcgagtccgactcattcctgaagtttgacagcgagccatccgccgtggccttggagctcccgacaagggcctttggaccatcggaaactaatgaatcccccgctgtagttctcgaaccgccagtggtctcaatggaggtgtcagagccccacattctggaaaccctgaagcccgcaaccaagacagccgagctgtccgttgtgtcgaccagtgtaatctccgaacaatcagagcagtccgtggcagttatgccggaacccagtatgacgaaaatcctggatagtttcgccgctgctccggtcccaaccaccactctagtattgaagtctagtgaacctgtggtcacaatgtcagtcgagtatcagatgaaatccgtcctgaaatccgtggaatcgacctctcccgagccctccaagatcatgctcgtcgagccccctgtggcaaaagtgctagagccttctgagacccttgtggtgagttccgagacccctactgaggtttatccagaacccagcacgtctacaaccatggattttcccgaatccagcgcaatcgaagcattaaggctccccgagcagcccgtagacgtaccaagcgagattgcagattctagtatgactagacctcaggaactgccagaactgcccaaaaccacagctctggagctccaagaaagttccgttgcgagcgccatggaattgccaggaccaccagcaacctccatgccagaactgcagggacctccagttactcccgtgctcgaactgcccggtccatccgctacccctgtgccagagttacccggaccgctgtctacccccgtccctgagctgcctggcccaccagctactgccgtcccagaactgcccggtcccagtgtcactcctgtcccgcagctgagccaggaattaccgggactcccagctccttccatgggacttgagccaccacaagaggtacccgaaccgcctgtgatggcccaggagctaccgggactcccgttggtcacagctgccgtagaattgcctgaacagccagctgtgacagtggccatggagttgacggagcagcccgtgacaacaacagaactggagcagcctgtagggatgaccacagtggaacatcctggacaccctgaggtgaccaccgcaaccggcctgctcggtcaaccagaggctaccatggtcctagaactccccggacaacccgttgcgactaccgccctcgaacttcctggccaaccctccgtcaccggcgtgccagagctacctggtctgcctagcgctacacgtgcgctcgagcttagtggccaaccagtcgcgaccggggctctagaactgccgggtcccctgatggctgcaggcgcactcgagttttctggccaaagtggggctgccggtgccttggaactgctgggtcagccattggccacgggtgtgctggagctaccgggacaaccaggcgctcctgagctgccaggccagccagtagcaaccgtggctctggaaattagcgtacaaagcgtggtgactactagcgagctaagcactatgacagtatcccagtctctggaagtgccgtcgaccactgccctggagtcctacaacacagtcgctcaggaactgcccaccaccctggttggagagacctccgtcacagtgggagtggaccccttaatggcacccgaatcccatatcctggcctccaacacaatggagactcatattctagcttcgaacacaatggattcacagatgctagcctcaaatactatggacagtcagatgctggcgagcaacactatggactcgcagatgctggctagctcgacgatggactcccagatgctcgcgacatcgagcatggatagtcaaatgttggcgacgagtagcatggacagccagatgcttgccacctctaccatggactcccagatgctggccaccagttccatggactctcagatgctggcaacttctagtatggactcccaaatgcttgccacctcttccatggattctcaaatgctggccacctcaagcatggatagtcagatgttagccaccagtacaatggattcccaaatgctcgctacttccacaatggactcccagatgttggctactagctccatggatagccaaatgctagcttccgggacaatggactctcaaatgttggcctcgggaacgatggacgctcagatgctggcgtctggaaccatggatgctcaaatgctggcaagctcaacacaagatagcgctatgctggggagcaaatcacctgatccttatagactcgcacaagatccttatcgtcttgctcaggacccgtaccgcctggggcacgacccttatcgcctggggcacgacgcgtatagactaggacaggacccttatagattaggtcacgatccctacagactgactcctgatccatatagaatgtcaccaaggccctaccgaattgcccctcgatcctaccgcattgccccaaggccctacagactcgcgccacgacctctgatgcttgcctcgagacgcagtatgatgatgtcctatgccgcagaacgcagtatgatgtcatcgtacgagcgatctatgatgtcatatgagcggagtatgatgagtcctatggcagagcggtccatgatgagcgcctatgagcgttctatgatgagcgcctacgagaggtcaatgatgtcaccaatggcagaacgaagcatgatgagcgcatatgagagatcgatgatgtctgcgtatgagagatcaatgatgagtccgatggcagaccgctccatgatgagcatgggcgctgaccgctctatgatgtcttcatacagcgctgcggatcgatccatgatgtcctcctattcagccgcagacagatccatgatgtcaagttatactgccgatcggtctatgatgagcatggccgcagattcgtatacagattcctatactgatacctatactgaggcctacatggtccctccactgcctcccgaagaaccccctaccatgcccccattgccccctgaagaacctcctatgaccccacccctccctcctgaggagccacctgagggaccagctctgcccacggagcagtctgcactcaccgctgagaacacctggcccactgaagttcccagctctcccagcgaggagtccgtttcacaaccagagcctccagtctcccagtcagaaatcagtgagccatcagctgtacccacagactacagcgtgtccgcgagcgatccaagtgtgctggtgagcgaggcggcagtgacagtgccagaacccccaccagagcctgagagctcaatcactctgacccctgtcgagtctgctgtggtggccgaggagcacgaggtggttcccgagcgaccagtaacctgtatggtcagcgagacacctgctatgtccgctgagcccactgtactggccagtgagcctcctgtcatgagtgaaacagccgagacattcgactcaatgcgggcatcggggcacgtcgcttccgaggtgagcacctctttgttggtgccagccgtcacaacaccagtgcttgcagagagtatccttgagccccctgcaatggccgctccagaatcgtccgcgatggcagtgctggaaagctccgcagtaactgttctggagtcttcgacggtgactgtgctcgaatcctcaacagtaactgtgctggaaccgtccgtggtgaccgtgcctgaacccccagtggtagctgaacccgattatgtgacaatcccagtgccagtcgtgtccgcgctggaaccctccgttcctgtgctcgaacccgctgtgagcgttctccaaccttctatgattgtgtccgagccaagcgttagtgtgcaggaatcaacggtcacggtcagcgagcctgcggtaactgtaagcgaacaaacccaggttattcctactgaagtcgcaatagagagcacacctatgatacttgagtcttctatcatgtcctcccacgttatgaaggggatcaatttgtcaagcggggaccagaatctggcaccagagattgggatgcaggagattgcactccactcaggcgaagaaccccacgcagaggagcacttgaagggcgacttctacgagagcgaacatggcataaatatcgatttgaatattaacaatcacttgatagccaaagaaatggaacacaacactgtgtgtgctgccggaacctctcccgtgggcgagatcggggaggagaagatcctgcctacctctgaaactaagcaacgcaccgtgctggacacttaccccggagtcagtgaggcggacgctggtgaaacactctcttccaccggtccgtttgcgctggaaccggatgcaactggtaccagtaaggggatagagttcacaaccgcaagcacactttctctggtgaacaaatatgacgtcgaccttagcttaacgacacaggacactgaacacgatatggttatatccacttcacccagcgggggatctgaggccgacattgagggacccctgcctgccaaggacatccacttagacttgccatctaataataacttagtaagtaaagacactgaggagcctctccccgtaaaagagtcagaccagacactggctgccctgctttcccccaaggagtccagtggtggtgagaaagaggtgcctccaccaccaaaggaaactttaccggactctggattcagtgccaacatcgaggatatcaatgaggcagacctggttcggcctctgctccccaaggatatggaacgactgacttcattgcgtgccggaatcgaaggacccctcttggcgtcggacgtgggtcgggatcgcagcgctgcgtcacccgtggtatcgtccatgcccgagagagcttcagagagctcttctgaagagaaggacgactacgagatattcgtaaaagtgaaggatactcacgagaagtccaagaaaaacaagaacagggacaaaggtgaaaaggagaaaaaaagggattcatctcttcggagccgaagtaagcgttccaagagctctgaacacaaatcccgtaagagaacctccgaatccagaagccgggctcggaagcgcagttctaaatcgaaatctcaccgatcccagacgaggtcaagaagccggagtagacgcagacgacggtcatctagatcacgcagcaagagccggggtcggcgttctgtctctaaagaaaagcgcaagcggtccccaaaacaccgcagcaaatcgagagagaggaagagaaagcgttcatccagcagagacaaccggaagacggtcagggccagatctaggaccccaagtaggcggagcagatcccacaccccttctcggagacggagatccagaagtgtgggacggaggcgatcattttctataagccccagcaggcggtctagaaccccctcgcggagatcacgaacgccatcaagaagaagccgcacccccagccggcgttccagaactccctccagaagatcccgcacgccctctcggagatcccgcaccccttccagacggaggcgatcgagaagcgtggtgaggcggaggtctttcagcatttcccccgtgagacttcgtcggagtagaacaccgttgagacgcagattcagccgttcccccattcgcagaaagagatcacgtagcagcgagcgcggacgcagccctaagaggctgactgacctagacaaagcccagcttctcgaaatcgcaaaggcaaatgccgctgctatgtgcgcgaaggcaggggtcccactgcctccaaacttgaaacccgcacctccgccaactatcgaggagaaggtcgctaaaaaatccgggggtgccaccattgaagaactcacagagaagtgcaagcagattgcacaatctaaggaagacgacgacgtcattgtgaacaagccccatgtctctgatgaggaagaggaggaaccacccttttaccaccacccgttcaaactgtctgaacctaaacctatcttcttcaacctcaatatcgccgctgccaagccaacccctcctaagtcacaggtcacactgactaaagagtttccagtgtcatctgggagtcagcaccgaaagaaggaggcagatagtgtgtacggcgagtgggtcccagtggagaaaaacggcgaggaaaataaagacgacgacaacgtgttctccagcaatcttccgtccgagcccgtagacatcagcacggcaatgtctgagcgagctctggcccagaaacggctatctgaaaatgctttcgatttagaagctatgagtatgctcaaccgcgctcaagaaaggattgacgcctgggcccagctgaattccataccaggccagtttactggatccaccggggtgcaggtcctgacccaagaacagctcgcaaatacaggagcacaggcttggatcaaaaaggatcagtttctgagagcggctcccgtgactggaggaatgggagccgtgctgatgcgcaagatgggctggcgagagggggagggccttggcaagaataaggaagggaataaagagcccatacttgtcgacttcaagactgatcgtaaaggcttagtcgctgtgggtgaaagggctcagaaacgcagcggtaacttcagcgctgcaatgaaagatctctcaggaaaacaccctgtaagcgccctcatggaaatttgcaataaaaggaggtggcaacccccagagtttcttcttgtgcacgacagcggcccagaccatcgcaagcatttcctgtttcgcgtccttaggaacggtgccctaacaaggcccaattgcatgttttttttgaaccgctacta

SEQ ID NO: 241914 - DNA, 1584 bp, synthetic construct
  misc_feature 1..1584: note = Description of Artificial Sequence: Synthetic coding sequence
  source 1..1584: mol_type = other DNA
atggcgccagagcggttgcgtagtcgcgcactgagtgcgttcaagctccgcggtctgctcttaaggggagaagcgatcaagtatttgacagaggccctgcagagcatcagtgaactggagctggaagacaagctggaaaagattatcaacgccgtagagaagcagccgctctcttccaacatgatagaacgaagcgtcgtcgaagctgcagtgcaggagtgttctcaatccgtagacgaaacaatcgaacacgtctttaacatcataggcgcttttgatatccccagattcgtgtataactccgaacggaagaagttccttccactgctgatgaccaatcacccggcaccgaatctgttcggaacaccgagggacaaggccgagatgtttcgtgaacggtacacaatcctccatcagaggactcaccggcacgaactcttcactccaccggtaatcggctctcacccagatgagagcggcagcaagtttcaactaaagacaatcgagactctcctgggttccacaactaaaatcggcgatgcaatcgtactgggcatgatcacccagcttaaagaaggaaaattcttcctcgaggatcccacaggcacggtgcagctcgacctcagcaaggcacagtttcactcgggtctctacacggaggcatgctttgtgctcgccgaaggctggtttgaggatcaagtgttccacgtaaatgctttcggctttccccctactgaaccatctagtacaacgagagcgtattacggtaatattaattttttcggcggtccctctaatacgagcgtgaaaactagtgccaagctgaagcagctggaggaggaaaacaaggacgctatgttcgtgttcctgagcgatgtctggttggaccaggtcgaagtgctcgagaaattacggattatgtttgcaggctattctccagctccccctacttgctttattctgtgcggcaactttagcagcgcaccctacggcaaaaatcaggtgcaagccctgaaggatagcctaaagacactggccgatattatctgtgagtaccctgacattcatcagtcctctagattcgtgtttgtccccggtcccgaagaccctggtttcggaagtatcctcccccgacccccactagctgaatccatcactaacgagtttcggcagcgcgtgccattttcagtatttacaacaaatccatgtcggattcagtattgcacacaggagataactgtgttccgggaagatctcgtaaacaagatgtgcagaaattgcgttcgctttcctagctcaaatcttgcgatcccgaaccattttgtgaaaacaatccttagccagggacatctgacacccttaccgttgtatgtatgtcctgtgtattgggcctatgattatgctctgcgcgtgtatcctgttcctgatctcctggtgatcgctgacaagtacgatcccttcactaccaccaataccgagtgcctttgcattaatcctggctcatttccacggagcgggttttccttcaaggttttctatccttcaaataaaaccgtggaggattctaagttacaaggtttctag

SEQ ID NO: 241915 - DNA, 3900 bp, synthetic construct
  misc_feature 1..3900: note = Description of Artificial Sequence: Synthetic coding sequence
  source 1..3900: mol_type = other DNA
atgcagcaggcccctcagccttatgagttctttagcgaagaaaactccccaaagtggcgcggactgcttgtcagcgcactgcgcaaagtgcaagagcaagtacaccctacactgagcgctaacgaggaaagcctttactatatcgaagaactgatctttcagctgttgaacaaattatgcatggcccagccacggactgttcaggacgtggaagaaagagttcaaaagacattcccacacccaatagataagtgggccatcgccgatgcccaaagtgctattgaaaaacgcaagcgaaggaaccccttgctcctgcccgtggataaaattcatccatccctaaaggaagtgttgggatataaagtggattatcacgtgtcgttatacattgtggcagtcctagagtatatctcagcagacatcctaaagttggctgggaattacgtgttcaacatacggcactacgagatcagccagcaagacatcaaagtttcaatgtgtgccgacaaagttctaatggacatgttcgatcaggacgacatcggtctggtgagcctgtgcgaagacgagccttcgagcagtggggagctcaactactacgatctggtgcggacagaaattgccgaggagagacagtaccttagagagctaaacatgatcatcaaagtattcagggaagcattcctgtcagaccgtaagctctttaaaccatccgacattgagaagatcttctctaacataagtgacattcatgaactgacagtgaaattgctggggcttatcgaagacaccgttgagatgaccgatgaaagctctccacacccactagcgggatcctgtttcgaggatcttgccgaggaacaggcgtttgacccatacgagactttatcgcaagatattttaagtcctgagtttcatgaacacttcaacaagttgatggcgaggccagccgtggcactccactttcagcaattgaaagcttgtagcgaagagcaggaagatcgcgagtgcctcaaccaggcaattactgctttgatgaatctgcagggatctatggatcggatttataagcagtactcccctcgaaggcggccaggagatcccgtgtgcccgttctactcccatcagctcagaagcaagcatttggccatcaagaaaatgaatgagattcagaaaaatattgacggttgggaaggcaaggacattggccaatgctgcaacgagttcattatggagggaccattaacacggattggggcaaagcacgaacgccacatcttcctcttcgatggtctgatgatttcctgcaagcccaaccatggccagaccaggctccctggatattcatccgcagagtacaggctgaaggaaaagttcgtcatgaggaaaattcaaatctgcgataaagaggacacttgcgaacataaacacgcattcgagctagtgagtaaagacgagaatagcattattttcgccgcaaagtcagccgaagagaagaataattggatggcggcactgatttccctgcactaccggagtacattggatcgaatgctggacagtgttcttctcaaggaggagaacgaacagcccctgaggttgccgagcccggaagtgtaccggtttgtggtaaaggactccgaggagaatatcgtattcgaagacaatcttcaatcaaggagcggcatccctattatcaaaggcggaactgtcgtgaagttgattgaacgtctgacctatcacatgtacgctgatcctaattttgttaggaccttcctgactacttatagatctttctgtaagcctcaggagctattatcccttctgatcgaaaggtttgagatacctgagcctgagcccactgatgcagacaagctggctattgagaaaggggaacagccgatctccgcggacctgaaacgctttagaaaggagtatgtgcagccagtacagctgcggattctgaacgtgtttagacattgggtggaacatcacttctacgacttcgagcgggacctggaacttttggaaagactggaaagcttcatttcctccgtgcggggaaaggctatgaagaaatgggtagagagtatagctaaaatcatcaggaggaaaaaacaggcgcaggcgaatggggtctctcacaacattaccttcgagtctcctccccctcccatcgagtggcatatatccaagcctgggcagtttgagacattcgatttaatgaccctccatccaatcgaaatcgcgcgacagctcacactgctggagtcagacttatacaggaaggtgcagccatcggaactcgttgggtctgtgtggaccaaggaagataaagagattaacagccctaatttactcaaaatgattcggcacactacaaatcttaccctctggtttgagaagtgcatagtggaagctgagaactttgaggagagggtggcagtactgagccgcatcattgaaattctgcaggtgtttcaggatctgaataactttaacggggtgttggagattgttagtgctgtgaattccgtgtccgtgtatagactggaccatactttcgaagcacttcaggagagaaagcggaaaatcctggacgaagcggtcgaactgtcacaagaccatttcaagaagtacctggtgaagctgaaatctatcaacccaccttgtgtgcccttcttcggtatttacctaacaaatattctgaagacagaggaaggaaataacgattttttgaaaaagaaaggcaaggacttgatcaatttcagtaaacggagaaaagtggcggaaatcactggagagattcagcagtatcagaatcagccctactgtctgcgcatcgagcccgatatgcggcgttttttcgagaatctgaaccctatgggctctgcctctgagaaagagtttaccgactatctgtttaacaagtctctagagattgagcctagaaactgtaagcagccacccagattccccagaaagtctacatttagcctcaaaagcccaggaataagacccaataccggcagacacggctctacgagcggcaccctgcggggacacccaactcccctggagcgagagccatgtaagatctcatttagtcgaatagcagaaacggaacttgaatccacagtgtctgctcctacttcaccaaacacacctagtacacctcctgtctcggccagctctgaccttagcgtcttcttagacgttgatttgaacagctcgtgtggatctaattcaatatttgcccctgtgctgctgccacattctaaatctttttttagttcgtgtggctccctacacaagttatccgaagaacccctcattccccctccacttcctccaaggaaaaaattcgaccacgacgccagcaattctaaagggaatatgaaaagcgatgatgatccgccagctattcccccacgtcagccgccaccacccaaagttaaaccgagggtaccggttcctactggagctttcgatggcccactgcattctcctccccctccaccccctcgggatccgctgccagatacgccccctcctgtgccactgagaccacccgagcatttcatcaactgccctttcaatctccaacctcctcccctagggcatctccatagagactcagattggcttcgggacattagtacatgtccaaattccccgagtacgccaccctctaccccctcccccagagtgccaaggcggtgctatgtgctttctagttcccagaacaatctggcacaccctcctgcaccgccagttcctcccaggcagaactccagccctcacctgcctaaattaccccctaagacttacaaaagagaactctcgcacccaccattgtataggctgccactgctcgaaaatgccgaaacaccgcagtag

SEQ ID NO: 241916 - DNA, 1389 bp, synthetic construct
  misc_feature 1..1389: note = Description of Artificial Sequence: Synthetic coding sequence
  source 1..1389: mol_type = other DNA
atgctacttctggccagatgtctcctcctggtgttagtgtcgtcgctgttggtatgctccggcctggcctgcggccctggcagggggttcggtaaaagaagacatcccaagaaactcactcctctggcatacaagcagtttattccaaatgtcgctgagaaaaccttgggagcttccggcagatacgaaggcaagatctcaagaaattctgagcggttcaaggagctgacacctaactacaaccctgatataatcttcaaagatgaggagaatacaggcgctgacagattgatgacacagcggtgtaaagacaaacttaatgcgttggcaataagtgtgatgaaccagtggcctggagtaaaattgagggtaaccgaggggtgggatgaagatggtcatcacagcgaggagtcacttcactacgaaggacgcgcagtggatatcacaactagcgaccgagatcgaagtaagtacggcatgctggcgaggcttgccgtcgaggccggtttcgactgggtctattatgaatcaaaagcccatattcactgcagcgttaaggcagagaacagcgtagcagcaaagagtgggggttgctttcctggttccgctacagtgcatctcgaacaggggggtactaaactggttaaagatctaagccccggagatagggtattggcagcagatgaccagggacgacttctttattctgacttcctcacattcctcgacagagatgatggggctaaaaaagtgttctatgtgattgagacccgagagccacgtgaacggcttctactgacggcggctcatcttcttttcgtagcccctcataatgatagcgccacaggcgaaccagaggccagctccgggagcggccctcctagtggcggagccctgggtcccagggcactcttcgcatctcgcgtgaggcctggccagcgggtatatgtcgtggccgaaagggacggggataggcgcctgctgcctgcggctgttcactcggttactctgtccgaggaggcagcaggggcatatgctcctttgaccgcacaaggtactatcctcattaacagagttctcgcgagttgctacgctgtgatcgaagagcatagttgggctcaccgtgccttcgccccattcaggctggcccatgcactccttgccgctctcgcccctgctcgaaccgaccgcggaggggacagcggaggcggagacagaggcggagggggaggtcgcgtcgcactgaccgctccaggcgctgccgatgcacccggtgcgggagcaactgctggtattcattggtactcccagctcctctaccaaatcggcacgtggctgctggatagcgaagcactgcaccccttaggcatggcagtcaagtcgtcttag

SEQ ID NO: 241917 - DNA, 3456 bp, synthetic construct
  misc_feature 1..3456: note = Description of Artificial Sequence: Synthetic coding sequence
  source 1..3456: mol_type = other DNA
atgagctctgagtgtgacggtgggtctaaggccgtgatgaacggtctggctccaggctctaacgggcaagacaaggctaccgctgacccacttagagcgagatccattagcgctgtgaaaatcatcccagttaagacggttaagaacgcatccgggttagtgctgcccaccgacatggatctgacaaaaatctgcaccggcaagggcgcagtaaccttgagagcctctagcagctatcgggaaaccccctcctctagtcctgcaagccctcaggagacaagacagcacgaatcgaaacccggattagagccagagccctcaagtgccgatgagtggagactctcaagttctgcggatgccaatggaaatgcccagcccagctctctggccgctaaagggtatcgctctgtgcaccctaatctgccgtctgacaagtctcaggacgctaccagctcttccgcggctcaaccagaagtgattgtggtgcccctgtacctagtcaatacggaccggggtcaggaaggcacagccaggccgccaactccactgggccctcttgggtgcgtgcccacgattccggcaaccgcatctgctgccagtccgctgacgttccctactctggatgacttcatccctccccacttgcaaagatggccacatcattctcagcccgcacgtgcctcagggagcttcgctcccatcagccagacaccccctagtttttccccccctcctcccctcgtccctcctgcacccgaagacctgaggcgggtctccgaacccgacttgaccggcgcagtgtcctccactgatagctctcccctactaaacgaggtctcatcctccctgatcggtaccgatagtcaggcctttccctcagttagtaagccatcctccgcttacccatctactacaattgtcaaccccactatcgtgctgctgcagcataacagagaacagcagaagagactgagcagtctgagtgacccagtctcagaaagacgggtgggtgagcaggactccgcacccacacaagagaaaccgactagccccggaaaggccattgaaaaaagagcaaaggacgactcccgaagggttgtgaaatcaactcaagacctttccgatgtgtccatggatgaagtgggcattcctttgcgcaacaccgagaggtctaaggactggtacaagaccatgtttaaacagatccataaactcaacagagatacgccagaagagaacccctactttcctacttataagttccctgagcttccggagatccagcagacaagtgaagagacaaaatcctgcagcgttatgtccccccgactggagtgctcaggtacagtcattgcccattgcagcctaaaactgctggactcctccaacccacccacgtctgcatcacaggtcgctggcactgccgacgacgactctgacctgtattccccaagatacagttttagcgaagataccaagtcccctctgtcagtgcccaggtcaaagtccgagatgtcctacatcgatggtgagaaggtcgttaagcgctcagcgaccttgccgctacccgctaggagttctagtctgaaatcctcaagcgaacggaacgactgggagccacccgacaagaaagtggatacgagaaagtacagggcagagcccaaatctatttacgaatatcaaccaggcaaatcatccgtgctgacaaacgagaagatgagccgcgatatctcccccgaagagattgacctgaagaatgagccttggtataaattctttagcgagctggagtttggcaagcccccaccaaaaaagatctgggactacacacccggagactgtagcatcctgccgagagaggataggaagaccaacctagataaggatctgagtctttgtcagaccgaactcgaagccgacctggaaaagatggagaccctcaacaaggccccaagcgccaatgtgccacagtctagcgctatctcccctactcctgaaatctcgagtgagacccctgggtacatctacagctctaacttccacgcagtgaaacgagagtcggacggcgctccaggtgatctgacatcactcgaaaacgagaggcagatttataagagcgtcctcgaggggggtgatattcccctgcagggtttgtccggcctgaagcggccttcaagctctgcctccactaaagattccgaatccccccgacattttatacctgccgattacctggaaagtactgaagaatttatcagacgtcgacacgatgataaggagaagcttctggctgatcagcgacgcctcaaacgcgagcaggaagaggccgacatcgccgcaaggcgtcataccggcgtgattcccacacatcaccagttcattaccaacgaacggttcggagatctactgaacatcgatgatactgcgaaacggaagagtggttccgaaatgaggcctgctcgcgctaagtttgattttaaggcccagaccctgaaggaactccctctacagaagggggacattgtgtacatatataagcaaattgaccagaattggtatgaaggtgagcatcatggacgggtcgggatcttccccaggacctatattgaactgttgccccctgccgagaaggcccagcccaagaaactgaccccagtgcaagtccttgaatacggagaggcgatagctaaattcaactttaatggggacacccaggtagaaatgtcatttcgaaagggagagagaattactctgcttaggcaggttgacgagaattggtatgagggcaggatccctggaacgagtcgacaggggatcttccctattacctatgtggatgttatcaagcgccctttagtgaaaaatcctgtggactatatggatctccctttttcatcgtcaccctctagatctgcgacagcttccccacaaccctggcgcgaagagtcagggcaatatgagcggaaagcggagagaggagcaggtgaaaggggtcctggtggaccaaaaatctccaagaagtcttgccttaaacctagcgacgtcgttagatgcttatccaccgagcagagactgtcagatctcaatacaccggaagagtctaggcccggtaagcccttaggaagcgctttccctggcagcgaagccgagcagactgagcgccaccgtgggggagagcaggcaggccgaaaggccgctcggagaggtgggtcccagcaaccgcaggcccaacagagacgtgtaaccccggataggagccagacgagccaggacttgttctcatatcaggctttgtattcatacatcccacagaatgatgacgagttggagctgcgggacggtgatatcgtcgatgtgatggaaaagtgtgacgacggctggtttgtgggcacctcaagacggaccaagcagtttgggaccttccccggtaattacgttaagcctctgtacttgtag

SEQ ID NO: 241918 - DNA, 2346 bp, synthetic construct
  misc_feature 1..2346: note = Description of Artificial Sequence: Synthetic coding sequence
  source 1..2346: mol_type = other DNA
atgtctagtgaatgtgacggcggtagcaaggcggtgatgaacggcctggcaccagggtctaacgggcaggacaaagccaccgcagacccgctgcgcgctaggagtatcagtgccgtgaaaatcatacctgttaagacagtgaagaatgccagcgggctggtgctgccaactgacatggacttgaccaagatttgcactggcaagggcgcagtgactctcagggcgtcttcttcctaccgggagactccaagctcctctccagcatcaccccaggagactagacaacacgaaagtaaaccaggcctcgagcccgaaccctctagcgctgatgagtggagattatcaagttctgctgacgcgaacggtaacgctcagccatcctccttggcagcgaagggataccgctcagtccaccccaatcttcccagcgacaagagccaggatagcagccccctcctcaatgaagtgagcagctctctgataggcacggatagccaggccttcccgtctgtgagcaagccttcaagtgcttaccccagcacgacaatagtgaaccccacaattgtgctcctccagcacaatcgcgaacaacaaaagagactgagtagcctatcagatcccgtctctgagaggagggttggcgagcaagacagcgccccaactcaagagaaacccaccagtcctggaaaggccatagagaagcgcgcaaaggacgacagtagaagggtcgtcaaatcgacacaggatctctccgatgtgagcatggatgaggttgggatccctctgcgaaacaccgaacgcagcaaagactggtacaaaaccatgttcaaacaaatccacaagcttaaccgtgacgacgattctgatctctacagccctagatatagcttctcggaggatacaaagagtcccttgtcagtgccacgctctaagtctgaaatgtcttatattgatggcgagaaggtagtcaaaaggtcagcaaccctgccccttcctgcccgaagcagcagtctgaagagttccagtgagcgcaacgattgggagccccctgacaaaaaagttgacactcgaaagtaccgggctgagcccaaaagcatctacgagtaccagcccggtaaatcgagcgtgctgaccaacgaaaagatgtcttcggctataagtcctactcccgagatcagcagcgagactcctgggtatatctattctagcaacttccacgcggtcaagcgcgagagtgatggagccccaggagatttgactagcctcgagaacgaacggcaaatatataagtcggtgctggagggaggagacatacccctgcagggtctatccggtctgaagaggccatccagtagcgcctcaaccaaggacagcgaatctcccaggcacttcatccccgctgattatctcgagagtacggaggagttcattcgcaggagacacgacgataaggagaaactcctggctgaccagagaagactcaagagggaacaagaagaggccgacattgcagctagacggcatacgggggtgattccaacacatcatcagtttatcaccaacgagcggtttggcgacctccttaatatagacgatactgccaagcgcaagtccgggtcagaaatgaggccggcaagggcaaaattcgatttcaaggcccagactctaaaggaactgcccttacagaaaggggatattgtatacatttacaaacagatagaccaaaattggtatgagggggaacaccacgggcgagtgggaatcttcccaaggacatacatcgaattgttgccccctgccgaaaaggcccagccgaaaaaactgacccctgtccaggttctcgagtacggggaggcaatagctaagttcaatttcaacggggacacccaagtcgaaatgtcatttcggaagggggaaaggatcacccttttaagacaggtagacgagaattggtacgagggtcgcataccaggcacgagcaggcaagggattttccctatcacgtatgtagatgtgattaaacgccctcttgtgaagaaccctgttgactacatggatttgccttttagctcatctccctcccgaagtgccacagccagtccccagcagccgcaggcccaacaaaggcgcgtgactcctgaccggtctcagacatcacaggatctgttcagctaccaagccctctactcgtacataccgcagaacgatgacgagcttgagctgcgcgatggcgacattgtagatgtcatggaaaagtgtgatgacgggtggttcgtcggaacatccaggagaaccaaacagttcggcacattccccggaaactacgtcaagccactgtatttgtag

SEQ ID NO: 241919 - DNA, 2541 bp, synthetic construct
  misc_feature 1..2541: note = Description of Artificial Sequence: Synthetic coding sequence
  source 1..2541: mol_type = other DNA
atgtcaagcgaatgcgatgggggaagtaaagccgttatgaacgggctggcgccaggtagtaacggtcaggacaaagccacagcagacccacttagagcccgtagcatatcagctgtgaaaatcattcctgtcaaaaccgtgaaaaacgcaagcggtttggttctgcctacagatatggatctcacgaagatctgcaccggcaaaggcgcagtgaccttgcgggctagctctagctatagggaaacacccagctctagtccagcctccccccaggagaccaggcagcacgagagcaagcctgatgaatggaggcttagttccagcgctgacgctaacggcaacgcccagccttcatcacttgctgcaaaaggctacaggtccgtccacccgaacctcccgtcagacaaatcccaggatagctcaccactgctcaatgaggtcagctcaagcttgatcgggaccgactcccaggcgtttccgagtgtatccaagccttcgagcgcctatccgtctacaaccatagtgaaccccaccatcgtgctgctgcaacataatagggagcaacagaaacggctcagttcactcagcgatccagtgagtgaacgacgggtgggggagcaggattctgccccaacccaagagaaacctacttctccaggcaaggcaattgaaaagagggccaaggatgacagccgaagggtggttaagtccacacaggatctgtcggacgtctccatggacgaagttggtatccctctgcgcaataccgaacggagcaaagattggtataagacaatgtttaagcagatccacaaactgaatcgggacactccagaggagaatccatactttccaacatataagttcccagagctcccggagatccagcagacttccgaggaagacaatccttatactcccacctaccagtttccagcatccaccccgtcccctaagtcagaggacgacgattcggatctgtacagccccagatacagtttcagcgaggacaccaagagtcctttgagtgtgcccagatcaaagtctgagatgagctacatcgacggagagaaggtcgttaagcgtagcgcaacactcccccttccagctcggtcttccagtctgaagtctagttccgaacggaacgactgggagccccctgacaagaaggtagataccaggaaatacagagccgagcccaaatccatttatgagtaccagcctggcaagtcgtcggttttaacaaatgaaaaaatgtcgagggacattagccccgaggagatcgacttgaaaaatgagccatggtacaaattcttcagcgagttggaatttggcaagcctagcagtgccatcagccccactcctgagatctcaagcgagacaccaggctatatttatagttctaacttccatgccgtcaaacgggaaagcgacggcgcacctggggatctgacctccttggagaacgaacggcagatctataagtccgtcctggagggcggagacatccccctccagggtttgtctgggcttaagcgaccgtcatcctcagctagcacaaaagatagcgaatcccctagacactttataccagccgattatttagaatccacagaggaatttatccgtcgacggcatgacgacaaagaaaaactcctggccgaccagcgtcgactgaagcgagaacaggaggaagccgacatcgctgccaggagacatactggcgtcatccctacccatcatcagttcatcaccaatgagaggttcggggacctgctgaatatcgacgatacagccaaacggaagtcaggatcagagatgcgcccagcacgcgcaaaatttgacttcaaggcccaaacgctcaaggagcttcccttacaaaaaggggatatagtctacatttacaagcagatcgaccagaactggtatgaaggggaacatcacggtagggtgggcatcttcccaaggacctatattgaattgttgcctccagcggagaaggcccagcccaaaaagttgacccccgtgcaggtactcgagtacggcgaagccatcgccaagttcaattttaatggcgacacccaggttgagatgtccttccggaagggcgagcgaatcaccctgctgagacaggtggatgagaattggtacgaggggcgtattcctgggacaagccgacagggtatttttcccatcacttacgtagacgttatcaagaggccactcgtaaaaaatccagtagattatatggacctgccattctctagttccccctccaggtccgctacagccagccctcagcagccccaggcccagcagcgacgcgtgacacctgatagatcacagaccagccaggacctctttagctatcaagcgctatatagctacattccacagaacgatgacgaattggaactccgcgatggagatatagtggacgttatggaaaagtgcgacgatggatggttcgtgggtacttcgagacgcaccaaacagttcggaacttttcccggaaactacgtgaaacctctctacctgtag

SEQ ID NO: 241920 - DNA, 2718 bp, synthetic construct
  misc_feature 1..2718: note = Description of Artificial Sequence: Synthetic coding sequence
  source 1..2718: mol_type = other DNA
atgagctccgagtgcgacggaggctccaaggccgttatgaatggactggcaccgggatctaatggccaggacaaggcaaccgccgatccgctgagggccagatcaatcagcgccgtgaaaatcataccggtcaagaccgtgaagaatgcctctgggttggtgctccctaccgatatggatttgactaaaatctgcactgggaaaggcgcagtgaccctcagggcatcttccagttaccgggaaaccccctctagtagccccgctagtccccaggagacccgtcagcacgagagcaaacctggcctagaacccgaaccctctagtgctgacgaatggagactgtcctcctctgccgatgccaacggaaatgcgcagccttcatcattagcagccaagggatacaggtcggtacatcccaatctcccaagcgataagtcccaacgatggcctcaccacagtcagcctgcgagggcctctgggtctttcgcgcctatctcccagactcccccttctttcagcccaccgcctccactggtgccccctgcacctgaggacctcagacgcgtatccgagcccgatctgaccggagcagtgtcatccactgattcctctcccctattgaacgaagtgtctagctccctcattggaacagactcccaggcttttccaagcgtaagtaagccatcgtcggcttaccccagcactacaatcgtaaacccaactatagtgctgctgcaacataatagggagcaacagaaacgtctgagctccctgtcagaccccgtgagtgaacgacgtgtcggcgagcaggacagtgccccaacccaggaaaaaccgacgtcaccaggtaaggccatcgaaaagagagcaaaggacgactctcgaagagttgtgaagagcacccaagaccttagcgacgtgagtatggacgaagttggcataccgctgcgtaataccgagaggtccaaagattggtacaaaacaatgtttaagcaaatccacaaattgaatcgcgatgatgattcggacctctacagtcccagatacagctttagcgaagatactaagtccccactctccgttcctcggtccaaatctgaaatgtcttatattgatggcgagaaagttgtcaaaaggtcagcaaccctgccccttcccgcaagaagttcctccttgaaaagctcctctgagcggaatgactgggagcctcctgacaaaaaggtcgatacccgcaagtatcgggctgagccaaaatcgatctacgagtatcagcctggcaaaagcagcgtgctgacgaatgaaaagatgagtcgtgacatctcacctgaagaaatcgacttgaagaatgaaccatggtacaagtttttttccgaactcgagttcggcaaaccaccgccaaagaaaatttgggactacacgccaggcgactgttctatactgccgagggaggatcgtaaaagctcggcgatctcgcctacaccggaaatctctagtgaaacccccggatatatctacagctcaaatttccatgccgtcaaacgcgaaagtgatggcgcacccggtgaccttacatcattagaaaacgagagacagatttataagtctgtgctggagggtggcgacattccactgcaaggcctatcaggactgaagcgcccttctagcagcgcatcaacaaaggattctgaaagtccacgtcatttcattcccgcagactaccttgagagtaccgaagaattcattaggcggaggcacgacgataaggagaagctgctggccgatcagcgcaggctgaaaagagagcaggaggaggccgatatagccgctaggaggcacaccggcgtcatacccacacatcatcagtttataacgaatgaaaggttcggcgatctgctcaacattgacgacacggccaaacgcaagtccggatcggaaatgcgtccagcaagggcgaagttcgacttcaaagcgcagactctcaaagaacttcccctccagaaaggggatatagtttacatctacaagcaaattgatcagaattggtacgagggcgagcatcatggcagagtcggcatctttcctcgcacttatattgagctcttacctcctgcagagaaagctcaacccaaaaagctaaccccagtgcaagtattggagtatggggaggccatcgccaagttcaattttaacggcgacacccaggttgagatgtccttccgcaagggggagaggattacactgttacggcaggtggatgagaactggtatgaaggcagaatcccaggaacttctaggcagggcattttcccaataacatacgtcgatgtgatcaagagacccttggtaaaaaaccctgtcgattacatggacctgcctttttccagcagcccctctcgatcggcaacagccagtccccagctgagccaccacagcctccgcgctggaccggacctgacggagtcagagaaatcctacgttcaaccccaggctcagcaacggagagtgacccctgaccgtagtcagaccagtcaggatctattctcataccaggcgctgtacagctatatcccacagaatgacgatgaacttgagttacgggatggcgatattgtggacgtcatggaaaaatgtgacgacggttggtttgtggggacgagtagaaggacaaagcaatttggaacattccctgggaattatgtcaaacctctctacctgtag

SEQ ID NO: 241921 - DNA, 3015 bp, synthetic construct
  misc_feature 1..3015: note = Description of Artificial Sequence: Synthetic coding sequence
  source 1..3015: mol_type = other DNA
atgagctcggagtgcgacggcggaagcaaggcggttatgaacggtctggcccctggcagcaatggtcaggacaaagcaacagccgatcccctccgtgcccgtagcatcagtgctgttaaaataataccagtcaaaaccgttaagaatgccagcggtctggtgttaccgaccgacatggacctcactaagatctgtacaggaaagggagccgtcacactgcgcgcttctagttcttaccgagagaccccctcctcaagccccgcttcccctcaggagacacggcaacacgaatccaaacctgacgaatggcggctgagctccagcgccgatgcaaatggaaacgcacagcccagttctctggccgctaaggggtacaggtctgtgcaccccaacctgccaagcgacaaatctcaagacgccactagctctagcgccgcacagccagaagttattgtggttcctctctatttagttaacactgatcggggtcaagagggtacagcacgtcctccaaccccacttggccctcttggttgcgtccctactatccctgctacggctagtgcagctagtcccctcacttttcccactcttgacgatttcatccctccacatttacagaggtggccccaccactctcagccagcaagggcgtcaggatcctttgcccctatttctcagacccctccttccttttcaccaccccctcctctcgtccccccagcccctgaagatctgagacgcgtctctgaacccgatcttaccggagccgtctccagtacagactcgtcccctttacttaatgaggtgtctagtagcctgattggtactgattcccaggccttcccctcggtgtctaaaccttcttctgcatatccatctacaacaatcgtcaatcccaccattgtactactgcagcacaatcgagagcaacagaaaaggctgagcagcctctcggacccagtgagtgaacgcagggtcggcgagcaggacagcgccccaacacaggaaaaacctaccagcccaggtaaagcaatagaaaaacgcgctaaggacgactcccgcagagtggttaaatccacccaagatctcagcgacgtgtctatggatgaggtggggattccgctgcgcaatacagaacgttcgaaggactggtacaaaacaatgttcaagcagatacacaagttgaatcgggataccccagaggagaatccttacttcccaacttataagtttcccgagctgcccgagatccagcagacctccgaggatgatgatagcgacttgtattcacctaggtatagcttttccgaagacacaaagagccctctatctgtgcccagatctaagtctgagatgtcttacattgacggcgagaaagtcgtcaaaaggagcgccacattacccctccccgctcggtctagctcactcaaatcaagctccgagcggaacgactgggagcccccagacaagaaggttgatacccggaagtaccgggctgaacccaaatcaatctacgagtaccagcccggtaaatcaagcgtcctgaccaatgagaagatgtcacgagacatctctcccgaagagattgatctcaaaaatgaaccatggtacaagtttttcagcgagctggagtttggcaagccccctcccaagaaaatatgggattacaccccaggggattgctcaattcttcctagggaggaccggaaaaccaatctggataaggaccttagcctctgccagactgagctggaagccgacttggaaaagatggagaccttgaataaagccccaagtgccaacgttccgcagagcagcgccataagccctacacccgagattagttcagaaactcctggatatatctacagtagcaactttcacgccgtcaaaagggagtccgatggggcacccggagacctaacatccctggaaaatgagcggcagatatacaagtctgtcctggaggggggagatatcccattgcagggacttagcggactgaaaaggccatcctcttcagccagtacaaaagactctgaatcacctcgacactttatccctgcagattatttggaatctacagaagagttcattcggagaaggcacgatgacaaggaaaagcttttggcggaccaaaggcgtctgaaacgcgagcaggaagaagcggacatcgccgctcggaggcataccggagtgatacccactcaccatcagtttatcacaaatgagcgctttggggatctgttgaacatcgacgatactgccaaaaggaagtccggcagcgaaatgaggcccgctagagccaagtttgacttcaaagcacagacccttaaggagctgccccttcagaaaggcgacatagtgtacatttataagcagattgatcaaaattggtacgaaggcgagcaccacggtagggtaggtatcttccccaggacctacatcgagctcctgccacctgctgaaaaggctcagcccaagaaattgacccccgtgcaggtactggagtacggcgaggccatagccaagtttaacttcaacggggatacacaggtagaaatgagctttagaaagggtgaaaggatcactctcttgagacaagtggacgaaaactggtacgagggaaggatacccggaacttctcggcagggtatttttcctatcacctacgtggacgtaataaagagaccgcttgtgaagaaccccgtggattacatggacctgccttttagcagttccccgagtagaagtgctaccgcgagtccacaacagccccaggcccagcaacggagggttacacccgatcgcagccagacttcccaagatttgttctcctatcaggctctatactcctacatcccacagaatgatgatgagctggaactccgtgacggcgatatcgtggacgtcatggagaaatgcgatgacggatggttcgtcgggacgagtcgccgaaccaaacaattcggaactttcccaggcaactatgtgaaacccctgtacctgtag

SEQ ID NO: 241922 - DNA, 3879 bp, synthetic construct
  misc_feature 1..3879: note = Description of Artificial Sequence: Synthetic coding sequence
  source 1..3879: mol_type = other DNA
atgtcctccgagtgcgacgggggatcaaaggccgttatgaatggcctggccccaggttcaaatgggcaggataaggccactgccgaccccctgagggccagatcgataagtgctgtgaaaattattcccgtgaagacggttaaaaacgcgtcaggtcttgtactccctacagatatggatcttacaaagatctgtacggggaaaggggctgtgacactgcgtgcatccagcagttatagggagaccccatcttcctcccctgctagtccacaggagacgcggcagcatgagagcaagcccggtttagaaccagaaccctcctcagctgatgagtggcggctgagcagctcagcagatgcgaatggtaacgcccagccctctagcttagctgcgaagggatatcgatccgttcatccaaaccttcctagtgacaaatcacaggacgccactagttccagcgctgcacagcctgaggtgattgtggtgcccctctacttggtgaatacagataggggacaggaaggcactgccagaccacctacgccacttggacctctgggatgtgtgccaaccatccccgctacagcttctgcagcctcccctctgaccttccctaccctggatgactttatccctccacacctacagcgatggccacatcactctcagcctgctcgcgcaagcgggagcttcgcccctataagccagacccccccatctttctcccccccaccgcctctcgtccctccagctcctgaggatttgaggcgcgtgtctgaacccgacctcactggggcagttagttccacagactcatctcctcttctcaatgaagtgtcgtccagcctgatcggcacagatagccaggccttcccatcagtaagcaagccttcttctgcctatcctagtactaccatagttaaccctacaatcgtattgctgcaacataatagggagcagcagaaaaggctgtcctctctgtccgaccccgtctccgaaagaagagttggagaacaggactccgcaccaacccaagaaaaaccaacttcaccaggcaaggctatcgaaaagagagctaaagatgatagtcgtagagtcgtgaagtccactcaggacctttcagacgtgagcatggatgaggtggggattcccctacgaaacaccgagcggtcaaaggattggtataaaactatgttcaagcagatccataaactgaatagggacactcccgaggaaaacccctacttccccacttacaagtttcctgaattgccggaaattcagcagacatctgaagaagataacccatacacaccgacatatcagttccctgcctccaccccctcccccaagtctgaggacgatgattcggatttgtattcgcctcgatactctttctcggaagatacaaagtcacccctttccgtgccacgcagtaagagcgagatgtcttacatcgatggagaaaaagttgtgaagagaagcgccaccctacctctgccagcgagatcctcttctctgaagtcaagttctgagcgcaatgattgggaacctccagacaagaaggtggacactcggaaataccgcgctgaacccaagtccatttatgagtatcaaccgggtaagtcatctgtgttgaccaatgagaagatgagtcgcgatatttctcctgaagagatcgacctgaagaatgaaccttggtacaagtttttcagcgaactcgagttcgggaaaccgccacctaagaaaatatgggattatacccctggagattgctccatcctgccacgcgaggatcggaagactaaccttgataaagacctttccctgtgccagactgagctggaagccgacctggagaaaatggagacactcaataaggcaccaagtgctaacgttcctcagtcctccgctatctcacccacccctgagatttcgtccgagacgcctggctacatctactcaagcaacttccatgccgtgaagcgagagtcagacggcgctcctggcgatctcacctcccttgaaaatgaacgacagatttacaagtcagtgttagaaggaggagacatccctcttcagggactgtccgggctcaagcgcccatccagctcagccagcacaaaggactccgaatcaccacggcatttcatcccagcggactacctggagtctaccgaagagtttatccggcgacgacacgacgataaggaaaaactgctcgctgaccaaaggcggctgaagcgagagcaagaagaggctgatatcgccgcacggagacacacaggcgtgattccaacacaccaccagttcattacaaatgaaagatttggcgatctgctgaacattgatgataccgccaagaggaagtctgggagcgaaatgaggccggctcgcgctaagttcgactttaaagcccagacgttgaaggagctgcctctacaaaagggggacatcgtgtacatctataagcagattgaccaaaactggtacgagggggaacaccacggcagggtgggaatttttccgcgtacctatatcgaacttcttccccctgcagagaaagcacaaccaaagaaactaaccccagttcaggtgttggaatacggggaagcaattgccaagtttaatttcaatggagatacacaagtagaaatgagtttcaggaaaggggagagaatcaccctgcttcgccaagtcgacgaaaattggtacgaaggtcgtatcccagggacttccaggcaaggtatctttcccatcacatacgtggacgttatcaagcggcctttggttaagaacccagtggactacatggatttgccattttcatcgtctccgagcagatccgctactgcttctccacagttttcaagccacagcaaattaatcacccccgctccgtctagcctgcctcacagccgcagagctcttagccctgagatgcacgctgtaacatccgagtggatcagcctcaccgtgggcgtccctgggcgtcgatccctagccctaacccccccactccccccactgcctgaggcctctatttataacaccgatcacttagcgcttagtccacgagcatcccccagcctgagcttgtccctgcctcacctgagctggtcggaccgaccaacgcccagaagcgtcgcctctcccctggcacttccttctccacacaagacatatagcctggctccgacctcacaggcctctttacacatgaacggagatggaggggtccacacaccttcctctggtatccaccaggatagcttcctgcagttgcctctcggctctagcgattctgtgattagccagttgtccgacgcctttagttctcagtccaagcgtcagccatggcgcgaagaatccggccagtacgagcgaaaggccgaacgcggtgctggcgagagaggacccggtggcccaaaaataagcaagaagtcttgtctgaagcctagcgatgtggtaaggtgtctgtccactgagcagaggctcagcgatctgaacactccagaggagagccggccaggaaagcccctgggttctgccttccctggttcagaagccgaacagactgagaggcatagggggggtgagcaggcaggccgaaaagcagcccgacgagggggttctcagcagccccaggcccagcagcgcagggtcacccctgatcgatcccagacttcacaagatctattttcctatcaggctctgtacagctacataccccaaaacgacgatgaactcgagttacgcgatggagacattgtcgacgtcatggagaagtgtgacgatggctggttcgttggaacctctcgaaggacaaagcaatttggcacatttccaggaaactatgtgaagcccctttatctttag

SEQ ID NO: 241923 - DNA, 3801 bp, synthetic construct
  misc_feature 1..3801: note = Description of Artificial Sequence: Synthetic coding sequence
  source 1..3801: mol_type = other DNA
atgtcatccgagtgcgatggaggatccaaggctgtgatgaacgggctggctcccggtagcaatgggcaggataaagctaccgcagatcccttgagggccaggagcatttccgccgtgaaaatcataccagtgaagaccgtgaaaaacgcgtcaggcctggttctgcccaccgacatggatcttactaaaatctgcactggcaagggagcagttacccttcgggcttcgagcagctaccgtgaaaccccaagcagcagtcctgcctcccctcaggaaacgagacagcacgagtccaagcctggtctggagcctgaaccaagttcggctgacgagtggcgcttatccagctctgccgatgctaacgggaacgcacagccatccagcctggcagcaaagggctacagatcggtccatcctaacctgccctccgataaatctcaggacgctacctcttcgtccgccgcacagccagaggtgatcgtggtgcccctctatcttgtgaacaccgatcggggtcaggaggggacggccagaccacctacacccttaggccctttaggctgtgtgcccaccatcccagcaactgcttccgcagcctcaccattgacttttcccacgttagacgacttcataccccctcacttgcagaggtggccacaccactcccaacctgcccgagcatccggtagttttgcaccgatatctcagacgccgccaagcttcagccctcctcctccactagtcccaccagctcctgaggatttgcgaagagtgtcagagccggacttaacaggggctgtaagctctacagactcttccccactgctgaatgaagtgtccagttcactcatcggaacagactctcaggccttccctagcgtatctaaaccctcgtctgcctacccttccaccactatcgtcaaccctaccatcgttctcctgcagcacaatcgtgagcagcagaaaaggctgagtagtctttcagatccagtgagcgagaggcgggttggtgaacaggatagcgcacccacgcaggaaaaacccacctcgccagggaaagcaatcgaaaaacgcgctaaagatgacagcagaagagtggttaagtctacacaggacctgagcgacgtctctatggatgaagtgggcatccctcttaggaacacagagagaagcaaggactggtataagacaatgttcaaacaaattcataagctgaatagggatgacgactctgatctctactctccaaggtattctttcagtgaggacactaaatctccgctttcagttcctcgttctaaaagcgagatgtcctacattgacggcgagaaggtggtgaaacgatccgctactctgccattgcctgcgaggtcgtcttctctgaaatcaagctctgagagaaacgactgggagccccctgacaagaaagtggacacccggaaataccgggctgaacccaagagtatatatgagtaccagccaggaaagagttctgtactcactaacgaaaaaatgagccgcgacatcagccccgaagaaattgacctaaagaacgagccttggtacaagttcttttcagagctggagtttgggaaacccccacccaaaaagatttgggattacaccccaggagactgttcgattctgccgagggaagaccgcaagaccaacctggacaaagacctcagcctttgccaaacagagctggaagcggatctggagaagatggagactttgaataaagctccctctgccaacgtgccacagagcagcgcaataagcccgactccggagatcagctctgaaacacctgggtatatttactcctctaattttcatgccgtcaagcgggagtccgatggtgccccaggtgatctcacgtctctggagaatgagcgccagatctacaaatcggtacttgaagggggtgatatccccctacaaggattgagcggcctgaaacggccttccagttcagccagcacaaaggacagcgagtctccacgacacttcatcccagcagattacctcgagtctaccgaggagttcattaggcggagacacgatgataaagaaaaattgctcgccgaccaaagaaggctgaagagggagcaggaggaggctgacatcgctgccagaagacacactggggtgattcctactcaccaccagttcatcacaaacgaacgcttcggagatttgctgaacatcgacgataccgccaaacggaagtcaggatctgaaatgagacccgcacgcgctaagttcgacttcaaagcccagaccctgaaggagttgcctctgcagaagggggacatagtctacatctataaacagatcgaccagaattggtacgagggggaacaccatgggagggtcgggatcttcccgaggacctacattgagctgctgcccccagcagaaaaagcccagcccaaaaaactgacgcccgttcaggtcttagagtacggagaggccatagccaaatttaatttcaacggcgatacgcaagtagaaatgtcttttcgcaaaggggaacggatcacccttctcagacaggtagacgaaaattggtacgaggggaggatcccaggaacttcccgccaagggatctttccaatcacttatgtggacgtcataaaacgccctctcgtgaagaatcctgtggactatatggatttacccttttcatcctccccctcccgctccgccactgctagcccccaatttagtagtcatagtaaactaatcacaccggctcctagctcacttccccatagccgcagggctctctcccccgaaatgcacgccgtgacttctgaatggatttccctgacagtaggcgtacccggtcggcgaagtctggcacttacgccaccattgccaccactacctgaggcgagcatttacaacaccgaccacctcgcattgtcgccgagagcttccccctctctgagcctgagcttgccccacctgagctggtccgatcgccctactccaaggtctgttgcaagcccgttagcgcttccctcccctcataagacgtacagcctggctcctacatcacaggcaagtcttcacatgaacggtgatggtggcgttcacactccctcaagcggaatacatcaagacagttttctgcagttacccctagggagcagcgatagcgtcataagccagctgagtgacgcgtttagctctcagtcaaagcggcagccttggcgggaggagagtggccagtacgaaagaaaggccgaaaggggcgcaggcgagcggggtccaggagggccaaaaattagtaagaaaagctgcctcaaacccagtgatgttgtacgctgtctgtctactgagcagcgcctgtctgacctgaatactccagaggaatcacgacccggaaaacctcttggaagcgctttccccggatctgaagcagagcaaactgaacggcatcgaggcggagaacaggccggacgcaaggctgctaggcgagggggaagccagttgtcccaccactcactgcgagctggaccagacttgacagaaagcgagaaatcttatgtgcagccacaagcacagcaaaggcgtgtgactcctgaccggagccagaccagccaggaccttttctcctatcaggctctctacagctacattcctcagaacgatgatgaattggagctgcgagacggggacatcgtcgatgtgatggagaagtgcgatgacggctggttcgtcggaaccagccgacggactaagcagtttggcaccttcccgggaaactatgttaaaccactctatctctag

SEQ ID NO: 241924 - DNA, 2436 bp, synthetic construct
  misc_feature 1..2436: note = Description of Artificial Sequence: Synthetic coding sequence
  source 1..2436: mol_type = other DNA
atgtcttctgaatgcgatgggggaagcaaagcagtgatgaatgggctggcacccggatcaaatggccaggataaggatatggatctgactaagatttgcaccggtaagggagcagtaaccctgagggcttcaagtagctatcgagaaaccccttcctcgtcgcctgcaagtccgcaagaaaccaggcagcacgagtcaaagcccggacttgagcccgagcctagttccgcagatgaatggcgcctcagctccagtgcagacgcaaatgggaatgcccagcctagttcattggctgctaaaggataccgcagtgtgcacccaaatctcccttcagataagagccaggattcatcccccctccttaacgaggtgagctcgtcccttatcggaaccgattcgcaggcgttcccaagcgtgtctaagccctccagtgcgtatccatccactacaattgtaaatcccactatagtgcttctgcaacataatcgcgagcagcagaaacgccttagctccctctccgacccagtgtcagagcgaagggtgggagagcaagactctgcgcctacccaggaaaagccaactagcccagggaaggccattgagaagagggccaaggatgactcccgcagggttgttaagagcacgcaggatttatcagacgtgtcaatggacgaggtggggatccccctccggaatacggagagatctaaagactggtataaaacaatgttcaaacaaatacacaaactcaatcgcgatgatgactccgatctttacagcccgcgttattccttcagtgaagacactaaatcacctttgtccgtgcctcggagcaaatctgaaatgtcatatattgatggagagaaggttgtaaaacggtccgccaccctgcccctcccagccaggtcgtcatctcttaaatcgtcctcggaacgcaacgactgggagccacccgacaagaaggtggacacacgcaaatatcgcgcagaaccaaagagcatatacgaatatcagcctgggaagagtagcgttctgaccaacgaaaaaatgagccgagacattagcccagaagaaatcgacctcaagaatgaaccttggtacaaattcttttccgaactagaattcggaaagccaacaaatttggacaaggacttgtctctgtgtcagacggaactggaggcagacttggaaaaaatggagacccttaataaagcccctagtgccaatgtgcctcagtcaagcgccattagtccaacacctgagatctcttctgagaccccgggttatatctactcaagcaactttcatgctgtcaaaagggagtcagacggcgctcctggcgacctgacatccctggagaatgaacgccagatctacaaaagcgtcctcgaggggggtgacatcccacttcagggcctgagcggccttaagagaccatcttcatcggccagtaccaaagattccgaatcgcctcgccactttattcctgcagattacctggaatcaacagaggagttcatcagacgaaggcatgatgacaaggaaaagcttttggctgatcaacgccgactgaagcgcgagcaggaagaggccgatatagccgctaggagacatactggagtgattccgacccaccatcaattcatcaccaacgagcggtttggagacttgttgaacatcgacgatactgctaaaaggaaaagcggaagcgagatgcggcctgcgcgagccaagtttgactttaaggctcagacgctgaaagagctacccctgcagaagggcgatatcgtgtacatctataagcagattgatcagaattggtacgagggcgaacatcatgggagggtggggatctttccgaggacgtacattgagctcctcccgcctgcagagaaagctcaacccaagaagttaacaccggtgcaggtgttggaatacggagaggccatcgccaaattcaactttaacggagacacgcaggtggagatgtcttttcgaaagggcgagcggatcacactgttaaggcaggtcgacgagaattggtacgaaggtcggattcccggaacatctagacaggggattttccccatcacctacgtcgatgttatcaagagaccgctcgtgaagaaccctgtagattacatggatcttcccttctccagtagcccctctcgctcagccaccgctagtccccagcaacctcaagctcagcagcgccgagtaactccggatcgtagtcaaaccagccaagacctgttcagctaccaggcactatattcttacatccctcagaatgatgacgaactggaacttcgcgatggcgacatagtagacgtgatggagaagtgcgatgatgggtggttcgtggggacgagtcggaggacgaaacagtttggcacatttcctggcaattatgtgaaacccctctacctgtag

SEQ ID NO: 241925 - DNA, 2055 bp, synthetic construct
  misc_feature 1..2055: note = Description of Artificial Sequence: Synthetic coding sequence
  source 1..2055: mol_type = other DNA
atgagttccgaatgtgacggtgggtcaaaggcagtgatgaatggcctggccccaggctctaacggccaagataaagacatggacctgactaaaatctgcacaggcaaaggggctgtgactctaagagcatcttccagttatcgagagaccccgtcatctagtcccgcttctcctcaggagacgaggcagcatgaatccaagcccgacgaatggcggctgagcagctccgctgatgctaacggaaacgcccagccatccagcctggctgccaagggctataggagcgtacatcctaacctaccctctgacaaatcacaggactcctcaccactcctgaatgaagtgtcttcaagtctgatagggaccgactctcaggcgttcccaagtgtctctaagcccagtagtgcatatcccagcaccactatcgtgaaccccaccatagtgttgctgcagcataacagggagcaacagaaaaggttgtcaagcctaagcgatccagtaagcgagaggcgggtgggagagcaggattctgctcccacacaggaaaaacccacaagccctggaaaggccatagagaagagggctaaggatgacagcaggcgagtggtcaagagcacccaggatttgtcagatgtttcaatggacgaagtgggaatacctctgagaaatacagagcgctcaaaggactggtataagacaatgtttaagcaaattcacaagcttaacagagacgacgactctgacctatacagtccgagatactccttttccgaagacaccaaaagccctctctccgttccaaggagcaaaagcgagatgtcctacatcgacggggagaaggttgtaaagagatctgccactctgccattgcctgctagatctagctccttaaagtcttccagtgaaaggaacgactgggaaccacccgacaaaaaagtggacacacgcaaataccgggctgagcccaaatctatctacgagtatcaaccagggaagagttcagtgttgacgaatgagaaaatgtcctccgctatcagccctacccctgaaatttccagcgagactccagggtacatttactcgtccaatttccatgccgtcaaaagggaatcagacggggcaccaggagacctgacgtcactagaaaatgagcgtcagatttataagtcagtgttggaggggggagacattccattgcagggactgagcggtcttaaacggccaagctctagcgcctcaacaaaagatagcgagtctccaagacacttcattcctgccgattatctggagtcaaccgaagaattcattaggcgcagacacgacgacaaggagatgaggccggctagggcaaagtttgattttaaagctcaaaccttaaaagagctaccattacagaaaggggacattgtatacatctacaagcagattgatcagaactggtacgagggggagcaccacggcagggtgggcatttttcctagaacctatattgaattgctccctcccgcagagaaagcccagcctaaaaaactgacaccagtgcaagttctggagtacggtgaggctattgctaagttcaacttcaacggagatacacaggtagaaatgtcattccgaaaaggcgagcgaatcactttgttgcgtcaagtggacgagaactggtacgaggggagaatcccaggtacaagccggcagggaattttccccattacctacgtggatgtgataaagagacctttggttaagaacccagtggactacatggacctgcctttctcctcctcccccagcaggtctgcgacagccagtccccagcaacctcaggcgcagcagagacgggtgactcccgaccggtcccaaacgagtcaagacttgttctcatatcaggctctatacagttacattccccagaatgacgacgaactggagttaagggatggcgacattgtggatgttatggaaaaatgtgacgacggttggttcgtaggaacaagcaggagaaccaaacagtttgggacttttcccggtaactacgtgaagcctctgtatctgtag

SEQ ID NO: 241926 - DNA, 2718 bp, synthetic construct
  misc_feature 1..2718: note = Description of Artificial Sequence: Synthetic coding sequence
  source 1..2718: mol_type = other DNA
atgagttccgagtgcgacgggggaagcaaagccgtgatgaatggcttggcacctgggtcgaacgggcaagacaaagctacagcagatcctctcagagccagatctatttcagccgttaagattatccctgttaaaaccgttaaaaacgcctcgggccttgtcctccctactgatatggatctcactaaaatctgtacggggaaaggtgcggtgacactccgggcatcctcttcctaccgcgagacacctagctccagcccagcttccccccaggaaaccaggcagcacgaatcgaaaccgggtttggaacccgagccaagctcagccgatgaatggaggctgtcttctagcgccgacgctaacgggaacgcacagccctctagcctggccgctaagggctacagatcagtgcaccccaacctgcccagcgacaagtcccagcgatggccccaccactctcagccagccagggcctctgggagctttgctcccattagtcagacacccccaagtttttctccaccccctcccctggtgcctcccgcacctgaggatctgaggcgcgtgagtgaaccggatctcacgggggctgtgtcctctactgatagcagcccgctactgaatgaggtctccagctccttgatcggtaccgactcccaggctttcccctccgtatcgaagccatcctctgcttacccctctacaacaattgtcaaccccactatcgtgctgctccaacataatcgggagcaacagaaacgcctctcatccttgagtgaccccgtttctgaacgaagagttggcgaacaagactcagcccctactcaggagaaacctacctcaccaggcaaggctatcgaaaaacgtgccaaagacgactccaggagagtggttaagagcacacaggatctgtccgatgtctctatggacgaggtggggattcctctgcggaacactgaacgttctaaggattggtataagacaatgtttaagcagatccacaagctgaaccgtgacgatgattccgatctatactccccacggtactccttttcagaagacacaaagtcccctttatctgtacccaggagcaaatctgagatgtcctacatcgatggagaaaaggtagtcaagcgttctgcaaccttgccgttgcctgccagatcctccagcttgaagtcaagttccgagagaaacgactgggagccacctgataagaaggttgataccagaaagtacagggccgaacccaaaagcatctacgagtaccagcctggcaaaagctccgtcctcaccaatgaaaaaatgtccagagatatttcaccagaggagatcgacctgaaaaacgaaccttggtacaagttcttcagtgaactggagtttggcaaacccccacctaagaaaatctgggactatacacccggagactgctctatacttcctcgggaagaccgcaagtcaagcgccatatcaccgactcctgagatatcctctgagacccctggctacatatactcttccaatttccatgcggtcaagcgcgaatcagacggcgctccaggtgacctaactagcttagagaatgaacgacagatatacaagtcagtactggagggaggcgatatacctctccagggcctgtccggacttaagcggccttcaagtagtgcctctacaaaggattcagagagccctcgacactttattccggctgactatttggagtcgaccgaagaattcattagaagacgccatgatgacaaggaaaagttgctggctgatcagcgcagacttaagcgcgagcaggaagaggcagatattgctgctaggcggcataccggcgtaatacctactcaccatcaatttattacaaacgagaggttcggcgacctgctgaacatcgacgacacagcaaagagaaaaagcggaagcgaaatgaggccagccagagccaagtttgatttcaaagcccaaaccctgaaagaactacctctccaaaaaggcgatatcgtgtacatatacaaacagatcgatcagaattggtacgagggtgagcatcatggcagggtgggcatctttcctcggacctatatcgagctgctgcctcccgctgaaaaagctcagcctaaaaagcttacacccgtacaggtgctcgagtacggagaagcgattgcgaagtttaattttaatggggacacccaagtggaaatgtccttcagaaagggagagagaatcacattgctgaggcaggttgacgaaaactggtatgaggggaggattcccggaacttcaaggcaaggcattttccctatcacgtacgtggatgttattaagcggcctctcgtcaagaacccggtggactatatggatctgccttttagctcatcaccctcccgaagcgccacagccagcccacagctttctcatcacagcttaagggccggaccagatctgaccgagtctgagaaatcctacgtccagccccaggctcagcagcggcgagtcacccctgaccgctcccagacgagccaagacttattcagctaccaggcattatatagttatatcccacagaatgatgatgagcttgagctacgtgatggcgatattgtggatgtgatggagaaatgcgatgacgggtggttcgtgggaacttcgcggagaaccaaacaattcggtaccttcccaggcaactatgtgaaacccctgtatctgtag

SEQ ID NO: 241927 - DNA, 3456 bp, synthetic construct
  misc_feature 1..3456: note = Description of Artificial Sequence: Synthetic coding sequence
  source 1..3456: mol_type = other DNA
atgtcatctgagtgtgacggcggaagcaaagccgtgatgaatggcctggcgcctggctctaacggacaagacaaagctacagcagaccccctgcgggcaaggtcaatctctgccgtgaaaatcattcccgtgaagaccgtaaaaaacgcctcaggccttgtcctgcccacagatatggacttgactaagatctgcacgggaaagggcgctgttactctccgggcttcttcgtcctatcgggagaccccaagtagctctcctgcctcaccccaggagactcggcagcatgagtccaagcccggattggaacctgagccctcctccgcagatgaatggagactgagcagttccgcagatgcgaatgggaatgcacagccctcttctcttgccgctaaaggctacagatctgtgcatccaaacctgccctcagacaaatctcaggatgcaacaagctcttctgccgcacaaccggaggtaatagtggtaccattgtacctggtcaacacagatcggggacaagagggaaccgccagacctccaactccactgggcccactaggttgcgttcccacaattcccgctactgccagtgcggcttcccctctgacgtttcctacactcgatgattttattcccccacacctgcagcgctggccccaccatagtcagcccgctcgggcttccgggtcctttgcgccaatttcgcaaactcctccttctttttccccaccaccaccacttgtgcctcctgccccagaggacctgagaagagtatctgaaccggacctgaccggagccgtcagcagcacagactcctcacccctgttaaacgaggtgtcatctagcctaatcggcacagattcacaggccttcccctctgtgagcaagccatccagtgcatatccatccacaacgatcgtgaatcctaccatcgtgctcttgcaacacaatagggaacagcagaaaagattaagcagtctgtctgaccccgtgagtgagcggagagtgggagaacaggattctgcaccaacacaggaaaaacccacctcacctggaaaagccattgaaaaacgagcaaaagacgattcacggagagtggtgaagtccacccaggacctgtcagacgtgtcaatggacgaagttggaattccgctgcgcaacacggaacggtccaaggactggtataaaacaatgttcaagcagattcacaaactgaaccgtgatactccagaggaaaatccttattttcccacctataagtttcccgaattgcccgagattcagcaaactagcgaggagacaaagtcatgctcggtgatgagtcccagactcgagtgctccgggactgtgatcgcacattgttcacttaagctgctggactctagcaatcctcctacatctgcgtctcaggtggctggtaccgcagacgacgacagcgacttatactccccaaggtactctttcagcgaagacacaaaaagccctctatccgtcccacgctctaagtccgagatgtcctacatcgatggtgaaaaggtggtgaagagatctgccaccttgcctctacctgccaggtcttcgtcgcttaaatcaagttcggaaaggaatgactgggagcctcccgacaaaaaagtggatacacgaaaataccgggcagaacctaagtcaatctacgagtatcagccaggaaaaagcagcgtgctgacaaacgaaaagatgtctagggatatcagccccgaggaaatagaccttaaaaacgaaccttggtacaaattcttcagcgagctggagttcggtaagccacctccgaaaaagatatgggattatacacctggcgactgcagtatactgccacgcgaggatcgtaagacgaaccttgacaaagatctgagcttgtgtcaaactgaactggaagcagatctggagaaaatggagaccctcaataaggcaccaagcgcaaatgttccccagtcgagtgctatctcccctacaccggagatttctagcgaaactccaggttatatctattcttcaaacttccacgccgtgaagcgagagtctgacggggctcctggcgacctaacttccctcgagaacgagcggcagatctacaaaagcgtcctagaaggcggagatatcccactgcagggcttgagtggtttaaagaggcccagcagcagtgcctctaccaaggatagcgagtctcccaggcattttattcctgcggactatctggagagcacagaggagtttattagacggaggcacgacgataaggaaaagttgctggctgatcagcgcaggctcaagcgcgagcaggaagaggctgacatcgccgctaggcgacacactggcgttattcccacacaccatcagttcatcacgaatgagcgcttcggcgaccttttaaatattgacgacaccgcaaaacgcaagagcgggtcagaaatgaggcctgctcgtgcaaagttcgacttcaaagcccagacactgaaagagctgcccttgcagaagggtgacatcgtgtacatttataaacagattgaccaaaactggtacgagggagaacaccatggtcgcgttggaatctttcctcgcacatatatagaactactgcccccagcagaaaaagcacagcctaagaaactaacacctgtccaggttctcgagtacggtgaagcaatcgcgaagttcaatttcaacggggacactcaggttgagatgagtttcaggaagggagaaaggatcacactgcttaggcaagtggatgagaattggtacgaggggagaatcccaggaacttctcggcagggaatcttccccataacttacgtggatgtgataaaaaggccactcgtgaagaatcctgtcgattacatggatctcccgttctcatcctcccccagtcggtccgcgaccgcatcaccccagccctggagggaagaatctgggcaatacgagcggaaggccgaaaggggcgctggcgagaggggacctgggggtccaaaaatctctaagaagtcttgtctgaaaccatcagacgtcgtgagatgtctgagcaccgagcagaggctgtcagacttgaatactcctgaggagtctcggcctggtaagcccctcggctctgcattccccggttcagaggctgaacagacagagcgccaccgcggtggagagcaagccggaaggaaggcagctcgcaggggtggaagccagcagccacaggcccaacagagaagagtgaccccagaccggagccagacatcccaagatttattctcttatcaagctctgtatagctacattccacagaacgatgatgagctggagctccgggacggggatattgtggacgttatggagaaatgcgatgacggctggtttgtaggaacctcccgaaggactaaacaattcggcacctttccaggaaactacgtcaaaccactctatctgtag

SEQ ID NO: 241928 - DNA, 3879 bp, synthetic construct
  misc_feature 1..3879: note = Description of Artificial Sequence: Synthetic coding sequence
  source 1..3879: mol_type = other DNA
atgtccagtgagtgcgatggcggatctaaggctgtgatgaacggtttggctcccggatcgaatggccaggataaagctaccgccgaccccctcagggctcgctctatctctgccgtaaagatcattcctgttaaaaccgtgaaaaacgcctccggactggtccttccaaccgacatggatctaacgaaaatttgcaccgggaaaggcgctgtgacactcagagccagctcctcctatcgggagactcctagtagctctcctgcctctcctcaggagacacgccagcatgagtccaagccaggactcgagcctgagccttcttccgcggatgagtggcggctttcttccagtgctgatgccaatggtaacgcccagccttcttcactagcagccaaaggttatcgatcggtgcacccaaacctgcctagcgacaagagccaagacgcgacatcaagttcggctgcacagccagaggtgatcgttgtacccctgtatctggtgaacaccgatagagggcaagagggcaccgcgaggccccctacccctctgggccctttgggatgtgttcccacaatccctgctacggcttcagctgcatcacccctgacattccctacgctggatgacttcattccccctcacctgcagcgctggccccaccactcacagcccgctcgcgcaagcgggtcattcgccccaatatctcaaacacccccttcattcagccccccacccccattagtgccaccagcccctgaggatctgcgcagagtgtccgaacctgacctgaccggcgctgtgagctccacagattcatccccactcctgaacgaagtctcgtctagtttgatcggcaccgatagtcaggcctttccttctgtatccaaacctagtagtgcctacccctccacaacgattgtgaacccaactatagttttactgcagcataatcgagagcagcagaagcgactctcatctctgtccgatcctgtcagtgagagacgggtgggagagcaggattcagctcccactcaggagaagcctacaagtcctggcaaggccattgagaagcgggcaaaagatgactcgcgtagggttgttaagagcacacaggacttgagcgatgtgagcatggatgaggtaggaattccactgcgaaacactgaacgctctaaggattggtacaagacgatgtttaaacagatccacaagttaaaccgcgatacaccagaagaaaacccatattttccaacatacaagtttcctgaactacctgagatccagcagacctccgaagaggataacccgtatacaccaacctaccagtttccggcatctacccctagcccaaagagcgaggatgacgacagcgatctctattctcccagatattcttttagcgaagacacaaaatccccactctcggtgcctaggagcaagagtgaaatgtcatatatcgatggagaaaaggtggtgaagcgctcagcgacactgcccctcccagcacgcagttcttcacttaagagttcatctgagagaaacgactgggagcctccagacaagaaggttgatacgcgcaagtatagggcagaaccgaaatcaatttatgagtatcagccgggaaagtctagcgtgctgaccaacgagaagatgagtcgggacatctcaccagaggagatcgatctcaagaacgagccctggtacaaatttttctctgagctggaattcgggaaacctcccccaaaaaaaatctgggactacacacctggagactgctcaattctccccagggaggaccgtaagacgaacctggacaaagacttatcgctttgccaaacagagctggaagcagacctcgagaaaatggagacgctgaacaaggctccgtccgccaatgtgccccagtcttctgcaatcagtcctacacccgagatcagctccgagacccccggatacatctactcatccaatttccacgctgtgaaaagggagtccgatggggcacccggtgatcttacctccttagaaaatgaaaggcagatctacaagtccgtgcttgaggggggagacatcccattgcaggggttgagtggtctcaaacgaccttcttcatccgcatccacgaaggactctgagagcccgaggcactttatccccgcagactatctggagtctactgaagagtttattcgtcggaggcatgacgacaaagagaaactcctggccgaccagcggaggctcaaaagggagcaggaggaggcagatatagccgctaggaggcacacgggggtcattcccacccatcatcagttcattaccaatgaaaggttcggggatctcctcaacattgatgataccgctaagcgcaaatctgggtccgagatgagacccgcacgggcaaagttcgatttcaaggcacaaaccctgaaggagctcccattgcagaaaggcgatatcgtgtatatatacaagcagattgaccaaaactggtacgagggggagcatcacggacgggtgggaatttttcctagaacttacattgagttgctgccgcctgctgagaaagcacagcctaagaaactgacccccgtgcaggttctcgaatacggcgaagccattgccaagtttaattttaacggagacacccaggtcgagatgtcgttcaggaaaggagaaagaattacacttcttagacaggtcgacgagaactggtacgaaggcaggattcctggaacatctcgacaaggcatatttccaatcacctatgttgacgtgataaagcgtcccttggtgaagaaccctgtcgattacatggacctcccctttagctcgtccccctcaagatcagccacagcttcaccccaatttagctcacatagcaaacttatcacccctgctccgtcttccctgccccactccaggcgtgcactgagcccagagatgcacgccgtcacatccgagtggatcagtctgacggttggggtgccaggcaggcggagcctggcccttaccccccctctgccccctctgcctgaagcctcaatctataatacggaccacctggccctgtcaccacgcgcatctccgtctctttccctatctctgcctcacttgagctggtccgatcggcctacccctaggagtgtggcaagcccactggcccttccatctccccataagacctacagtctggcgccaacaagccaggcatccctgcatatgaatggggacggaggggtccataccccatcttctggtattcaccaggacagcttcctccaactgccactcggcagctccgacagcgttatttcacagcttagcgacgctttctcaagccagtccaagcgccaaccatggcgcgaggaatccggtcagtatgagcggaaagctgagcgaggcgctggcgagcggggacctggcggaccaaaaatcagtaagaaatcatgccttaaaccttccgacgtggtgagatgcctgtctaccgagcagagactatctgacttgaacacccctgaggagtctcgcccaggtaagccccttggctcagcctttccaggttctgaggctgagcagacagagagacacaggggtggggagcaggcaggtagaaaggctgcccgtcgcggaggttcacagcagccccaggcccagcagcgccgagtcacgccagaccgaagccagacaagccaggatctgttctcgtatcaggctctctacagctacattccccaaaatgatgacgagcttgagctcagagacggagatatcgtggatgtaatggaaaagtgcgatgacggctggttcgtggggacgagcaggcgcactaaacagtttggtacatttcccggaaactatgtcaagcccctgtacctctag

SEQ ID NO: 241929 - DNA, 2451 bp, synthetic construct
  misc_feature 1..2451: note = Description of Artificial Sequence: Synthetic coding sequence
  source 1..2451: mol_type = other DNA
atgtcatcggagtgcgacgggggaagcaaagcagtgatgaatggtctggctccaggatccaatggccaggacaaagacatggacttgaccaaaatctgtactggcaagggggctgtgaccctgcgggcatcgtcatcctacagggagaccccctcatcaagccccgcaagtccacaagagacccgtcaacacgaaagtaaaccaggcctggaaccagagccatccagtgcagacgagtggcgtttatcaagctcagccgatgccaatggcaacgcacagccctcgtccctggcagcaaaaggctataggtcggtccacccaaacctgccttcggacaaatcacaggacgcaacaagcagcagtgccgctcaacctgaggtcatcgttgtccctctgtatctggtgaacacagaccgcggacaggaggggactgctaggccccctaccccactcggacctctgggatgcgtccctactataccagcaaccgcctccgcagcaagtccgctcacctttccgaccctggacgatttcatacctccgcacctgcaaaggtggcctcaccacagccagccagctagagccagtggaagctttgcacccatcagtcagacccccccatccttctcaccaccccctccacttgttcctccagcccctgaggatttacgaagggtgtccgagcctgatctgacaggagccgtatcttcgactgactcatctcccctgctcaacgaggttagcagtagcctgatcggcacagactcccaggcattccccagcgtttcaaagccttcctccgcatatccctcgactaccattgtgaacccaacgattgtgctactccagcataatagggagcagcagaaacgtctgtcttccttgtccgaccctgtcagcgagagacgggtgggcgaacaggacagcgctcccacgcaggagaagcccaccagccctggcaaagctatagagaagcgtgccaaggacgactcgcgacgagtggtgaagtctacacaagacctctccgatgtgtccatggacgaggttggaatcccactgcggaatacagagaggagtaaggattggtataaaactatgtttaaacaaattcataaactcaatcgagacgacgattctgacctttactccccgaggtacagctttagcgaagatacaaagagcccactgtcagttcctcgctccaagtctgaaatgagttacattgacggggaaaaggtagtgaagagatctgctactctgccgctgccagcccgaagctcatctttaaagagtagctccgagcgcaacgattgggagcccccagataagaaggtggacacgcgcaagtatagagcggagccaaaaagtatttatgaataccagccgggaaagtcaagtgtgctaacaaatgagaaaatgtcatcagccatctctcctacccccgagataagttcagagacaccaggctatatctactcctcaaattttcacgccgtcaagagggaaagcgacggcgcacctggcgatttgacttctcttgagaatgagcgccagatttacaagtcagtgctggaagggggtgacattcccctgcagggcttgagcggcttgaaaaggccctcctccagcgccagtacgaaggattctgagagtcccagacacttcatccccgctgattaccttgagtccactgaagagttcatacggcgacgacatgatgataaggaaatgagacccgctagagctaaatttgactttaaggcgcagaccttaaaggaactgcctctgcaaaaaggagatatcgtctatatttacaaacagatagatcaaaattggtacgagggagaacaccatggtagggtggggattttcccacgtacatacatcgagcttctaccacccgctgagaaggcacagcccaagaagctgacccccgtgcaggtcctggaatacggcgaagctatcgcaaagttcaactttaatggagacacacaggttgagatgtcattcaggaaaggagagcggatcacacttttgcgccaggtcgatgaaaattggtacgagggacggattccaggcactagcagacagggcatctttcctataacttacgtggacgtgattaaaaggcccctggttaaaaaccccgtcgattacatggatctcccattttcatcatcacctagtcggtctgctacggcttcccctcagcagccacaggcccaacagcgccgtgtgaccccggatagatctcagacttcccaggatctgttttcctatcaggccctttactcttatattccacagaacgacgacgagcttgaattgagggatggcgacattgtggatgttatggaaaaatgtgacgatggctggttcgttggaacctctcggcgtactaaacaattcggcacatttcccggtaattacgtaaaaccactgtacttatag

SEQ ID NO: 241930 - DNA, 3015 bp, synthetic construct
  misc_feature 1..3015: note = Description of Artificial Sequence: Synthetic coding sequence
  source 1..3015: mol_type = other DNA
atgagttctgaatgtgatgggggatctaaggctgtgatgaatggtttagcacccggtagtaacggccaagataaagcgacagcagaccctctacgcgcacgttcaatttccgcagtgaagataattccagtgaaaacagtaaagaacgcatctggtctggtcctacctacagacatggacttaactaagatttgcacaggtaagggggctgtgacactgagggcttccagttcttacagggagactccctctagttccccagcctcaccccaggagacgagacaacacgaaagtaagccggacgaatggaggcttagttcttccgccgatgccaatggcaatgcccaacctagtagcttggccgcaaaggggtaccgtagtgtccatccgaatctgccatccgacaaatctcaggacgccacatcttcttcagctgcccaacctgaagtgattgtcgtgcctctctacttggtgaacacggaccggggacaggagggcaccgcccgtccaccaacgccacttggtcccctgggatgtgtaccgacaattcccgcaaccgcgtccgctgctagcccactcacttttccgaccctggatgatttcatcccaccccacttgcagcgctggccgcaccacagccagccagctagagcttcagggagctttgcacccatcagtcaaaccccaccttctttctctccccctcctccactcgtccccccagcccctgaagacttacggcgagtgtcagagccagacctcacaggagccgtgagttcaactgacagctccccactgctgaatgaggtgagttcttcgttaataggcaccgattctcaagcattccccagtgtgtccaaaccatcctcagcctatccatctacgactattgtgaaccccactattgtattgctccagcataatcgtgagcaacaaaagagactatccagcctgtctgatcctgtcagtgagcggagagtgggggaacaggacagtgcacctactcaagaaaagccgaccagccctggtaaggcaatcgagaaacgcgctaaggacgactccagacgtgttgtcaaaagtacgcaggatctatctgatgtgagtatggatgaggttggaatacccctccggaacacggaacgcagcaaggactggtataagaccatgtttaagcagatccataagttgaatcgggacacaccagaagagaacccatactttccaacgtacaagttcccagaattgcccgaaatccagcagacatccgaggacgacgattcagatctctactcacccaggtactcattttcagaggataccaaaagtcctctgagtgtcccccgttcaaaatcagaaatgtcctacatagatggcgagaaggtcgtaaagcggtcagcgactcttcccttgccagcccgttccagtagcttgaaatctagttctgaacggaatgactgggaacctcctgataagaaagtggatactagaaaataccgggctgagcccaaaagcatctatgaatatcagccagggaaatctagcgtcctgacgaacgaaaaaatgtcaagggacattagtcccgaggagattgatctgaaaaatgagccatggtacaagttcttctccgaattggagttcggaaagcctcctcctaaaaagatctgggactatacccccggtgactgcagtatcttaccacgcgaggataggaagactaacctcgacaaagatctttcgctctgccagacagagcttgaggcagatctggagaagatggagaccctcaacaaggcgccttccgcgaacgttcctcagagcagcgcgatcagcccaacaccagaaataagctcggaaacgcctgggtatatctactcctcaaactttcatgcagtgaagcgcgaatctgatggcgcacccggagatttaactagtcttgaaaacgagaggcagatttacaaatccgtattggagggtggtgacatcccgcttcaaggcctctccggacttaaacgaccctcatcttcagccagcacgaaagacagcgaatccccacgacactttatccctgctgattatttagaatctacggaggaatttatacgtcgcagacacgacgataaagaaaaactcttggcggaccagcgacgactgaagcgagagcaagaggaggccgatattgccgctagaagacacaccggggtgatccctacacatcaccagtttatcactaatgagcgcttcggggatctcctcaatattgatgacaccgctaagagaaagagtgggtcagaaatgagacctgcacgcgcaaagtttgactttaaagctcagaccctgaaggagctccctctgcaaaagggcgatatcgtgtacatttacaaacagatcgaccagaactggtacgaaggcgagcaccacgggagggttggaatttttcctcgaacatatatagagttgctccctcccgctgagaaggcacagcccaagaaacttacgcctgtgcaagtgcttgagtatggcgaggcaatcgccaaatttaacttcaacggagatacacaggtggagatgtccttcaggaagggagagagaatcacactccttcggcaagtggacgaaaattggtatgagggtaggatcccgggtacatcccggcagggaatcttccctatcacttacgtagacgtgatcaaacggcctctggtaaaaaaccccgtggattacatggatctgccattctcgagctctccaagcagatccgccaccgctagtcctcaacagcctcaggcacagcaacggcgagtgacaccggaccgttcacagaccagtcaagacctgttcagttaccaggccctatacagttacattccccaaaatgacgatgaactggaattgcgcgacggtgacatcgtggatgtcatggaaaaatgtgatgatggttggtttgtcggtactagtagacggaccaaacaatttgggactttcccaggaaattatgtcaagcctctttatctgtag

SEQ ID NO: 241931 - DNA, 2016 bp, synthetic construct
  misc_feature 1..2016: note = Description of Artificial Sequence: Synthetic coding sequence
  source 1..2016: mol_type = other DNA
atgcagggaccacctcgaagccttcgggcagggttatccctcgacgatttcattcccggacacttacagtcccacattggatcttcctcccggggtacccgggtgcctgtgatccgaaacggcggaagtaataccctgaatttccaatttcatgatccagcgccacgcaccgtttgtaacggaggctacactcctcgccgagatgctagccaacacccagacccggcttggtatcaaacctggccagggccaggaagtaagccaagtgcgagcactaagattcctgcatcacagcacacccaaaactggtctgccacctggaccaaggactcgaaaaggcgggataagaggtgggtgaaatacgagggaatcggtccggttgatgagagcgggatgccaattgctcctcgttccagcgtagaccggccaagagattggtatcggcgtatgttccagcaaattcacaggaaaatgcctgatctgcagctcgactggacatttgaggagccaccacgcgatccccgacatctcggcgcacagcagcgccctgcccatcgtcctggccctgccacatcgtcctctggtaggtcctgggatcatagcgaggagttgcctcgatctaccttcaattatcgccctggcgctttttccacagtgctgcagccatcaaaccaggtgctgaggcgccgagagaaggtggacaatgtctggaccgaggaatcttggaatcaatttttgcaggagctagaaacggggcagagacccaagaaacccctggtcgacgatcccggagaaaagccaagccagcctattgaagtcttgctggaacgcgaactggcagagctgtctgccgaactggacaaggacctgcgggcaatcgaaacaagattgccatctccgaaatcttcacctgctccccgaagggcaccggagcagcggcctccggctgggccagcaagtgcatggtcttctagctatccccacgccccttatctcggatctgctcggagtctgtctccacataaaatggctgatggaggaagccccttcttgggccgtcgggattttgtttacccgagcagtacacgagacccctccgcttccaatggcggaggaagcccagcaagacgcgaggagaagaaacgcaaggccgctaggctaaagttcgactttcaggctcagtccccaaaggagttgaccctgcaaaagggcgatatcgtctatatccataaagaggtggacaaaaactggctggaaggcgagcatcacggacggctgggcatcttcccagcaaactatgttgaggtgctgcctgccgacgagattcccaaacccatcaagccgccaacctatcaagtcctggagtacggagaagcagtggcacagtacacgttcaagggggacctagaagtcgagttgtccttccgcaaaggtgagcatatctgcttgattcggaaggtgaacgaaaactggtacgagggcagaattacgggcactgggcgacaaggaatcttcccagcatcatatgtgcaggtgtcgagggaaccgagattacggctgtgcgacgatggtccccagttgcctacatcccccagactgacagcagccgcacgcagcgcgaggcatccttctagcccgtcggccttgaggtcaccagccgacccgatcgacctcgggggacagacgtccccacggagaaccggatttagcttcccgacccaagaaccaaggccacaaacccaaaacctcgggaccccagggcctgcattatcccattcccgcggtccaagtcaccccctggacctgggaaccagcagtccaaacacatcccagatacattggactccgtacagggctatgtatcagtatcgtccccagaacgaggacgaactggagctccgagaaggtgaccgcgttgacgttatgcagcagtgcgacgatggctggttcgtgggtgtgagccgtagaacccagaagtttggaacctttccgggtaactatgttgcacccgtatag

SEQ ID NO: 241932 - DNA, 990 bp, synthetic construct
  misc_feature 1..990: note = Description of Artificial Sequence: Synthetic coding sequence
  source 1..990: mol_type = other DNA
atggccgatggcggatccccattcctgggacgtcgggactttgtgtaccccagcagtacacgagacccaagtgcatctaacgggggaggctcgccagctcgcagagaggagaaaaagaggaaggccgctaggttaaagttcgacttccaggcacagagcccaaaggagcttactctgcaaaagggtgatattgtctacatacataaggaagtcgacaagaattggctcgaaggggagcaccacggacggctgggcatctttcccgctaactacgtcgaagtgcttcctgctgacgaaattccaaaacctatcaagccaccaacttatcaggttctggagtatggagaggcagtggctcagtacacattcaaaggggacttagaggttgagctgagtttcagaaagggagaacatatatgtctgatccgtaaagtcaatgagaactggtacgagggacgtataaccggcacgggtcggcagggcatttttccggcatcatacgtacaggtcagcagagagccaagattgcgtctctgcgatgacggtcctcagcttcctacatctccacggcttaccgccgctgcgcgatcagctcggcatccctcctcaccttcggcccttcgcagccccgcagatccgatcgaccttgggggacagacatctccacgccgtacgggttttagctttccaacacaagaaccgaggccacagactcagaatctcggaactcccggtccggcactttcccactccagaggcccttcccaccctctggatctggggacttcgtcccccaatacctcccagattcattggacaccatacagagctatgtaccaatatcggcctcagaacgaagacgaactcgagctacgggaaggtgatagggtcgatgtaatgcagcagtgtgacgacggatggttcgtgggcgtgagcagacgcacgcagaaattcgggacctttcctggaaattacgtggcacccgtttag

SEQ ID NO: 241933 - DNA, 1074 bp, synthetic construct
  misc_feature 1..1074: note = Description of Artificial Sequence: Synthetic coding sequence
  source 1..1074: mol_type = other DNA
atggctgcagccgctaaacccaacaatctgtcgctcgtggtgcacgggccaggtgatctgcgattggagaactacccaataccagagccgggacctaacgaggtcctgctccgcatgcactctgttggaatctgcggctccgatgtccactactgggaatacgggcgtatcggcaacttcattgtaaaaaaacccatggttctggggcacgaagcatctggcaccgtggagaaagtgggtagtagcgtaaagcatctgaagcctggcgacagagtggcgattgagcctggtgctccaagggagaacgacgaattctgcaagatggggaggtacaatctgtccccaagcatcttcttttgcgcaacacctccagatgatggcaacctgtgccgattttataaacataatgccgctttctgttacaagctgcctgacaatgtcaccttcgaggagggggcactgatagagcctttgtcagtaggaatacacgcatgcagacgcggaggtgtgaccctcggccacaaggtgttagtctgtggagctggtcctattggtatggtcacactcttggtggccaaggcgatgggcgcagctcaggttgtggtgaccgacctgtctgcgacaaggctgagcaaggccaaggagatcggggcagacctggtcctgcaaattagcaaagaatccccgcaggaaattgccagaaaggtggaaggacagctcggctgcaagccagaagtcactatcgaatgtactggagccgaagctagcatccaggccggaatttacgctacccgaagtggcggaaatctcgttctggtgggcctgggcagcgaaatgacaaccgttcccctgcttcatgccgctattagagaagttgacatcaaaggagtgttccgatactgtaacacctggcccgttgccatcagcatgttagctagcaaatcagtcaacgtaaagccgcttgtgacacaccgcttcccactggagaaagccttggaggcctttgagaccttcaagaaggggttaggcttgaagattatgctaaaatgtgatccgtccgatcaaaatccctag

SEQ ID NO: 241934 - DNA, 597 bp, synthetic construct
  misc_feature 1..597: note = Description of Artificial Sequence: Synthetic coding sequence
  source 1..597: mol_type = other DNA
atggcttatcctggccatcccggtgctggagggggttactatccaggaggatacgggggtgcccctgggggaccagcctttcccggacagacccaggacccactctacggctatttcgcagcagtggctggccaggatgggcagatagatgccgacgaactgcagagatgcctgactcagtcgggtattgccggagggtacaagccttttaatcttgagacatgtagattgatggtgtccatgctggaccgagatatgagtggaaccatggggtttaacgagttcaaggaactctgggccgtgctgaacggctggcggcagcacttcattagtttcgatactgaccggagtggcaccgtggacccgcaggagctacagaaagctctgactacaatgggttttaggctgtctccccaggcggtaaattcgattgcaaagcgatacagcaccaacggaaaaatcacgttcgacgattatatcgcctgttgtgttaaactgcgcgctctaacagatagctttcggcgacgcgatactgcacagcagggtgtcgtgaacttcccatacgacgatttcattcaatgcgttatgagcgtgtag

SEQ ID NO: 241935 - DNA, 552 bp, synthetic construct
  misc_feature 1..552: note = Description of Artificial Sequence: Synthetic coding sequence
  source 1..552: mol_type = other DNA
atgcagtatggcggtgcccctggtggtcctgccttccctggtcagacacaggatcctctgtacggatatttcgcagctgtggccggacaggatggccagatagacgccgacgagctgcagaggtgcttgactcagagcggcatcgcgggaggctataaacctttcaatttagagacttgtcgtttgatggtgtctatgctggatcgcgatatgagcggcaccatgggcttcaatgagtttaaggaactgtgggcagttctaaatgggtggcggcagcacttcataagctttgataccgataggtcaggcaccgttgatcctcaggagctgcagaaagccctgaccacgatggggttccgtctctctccccaagcagtgaactccatcgccaaaaggtattccacgaatggcaaaattaccttcgatgactacatcgcatgttgcgtcaagctacgagccctgaccgatagtttcaggcgacgcgatactgctcaacagggtgtagtgaatttcccatacgatgactttatacaatgtgtgatgtccgtgtag

SEQ ID NO: 241936 - DNA, 543 bp, synthetic construct
  misc_feature 1..543: note = Description of Artificial Sequence: Synthetic coding sequence
  source 1..543: mol_type = other DNA
atgcagtatggaggtgcacccggtggcccagcattcccgggacagacgcaggacccgctttacggatatttcgccgcagtggcgggtcaagatggtcagatcgatgctgacgagctgcagaggtgtctgacccagtctggcatcgcagggggatacaagccattcaaccttgaaacttgcagactgatggtgagtatgctggatcgcgatatgtctgggaccatgggattcaatgagttcaaggaactgtgggccgtccttaacggatggcgacaacattttatttccttcgatacagatcgctccggcactgtggacccacaggaactccagaaagcattaaccaccatgggctttagattatctcctcaggcagtcaactctatagccaagcgatactcaacaaacgggaaaattacattcgacgattatatagcgtgttgtgtaaaactccgcgcactgaccgactcatttcgcaggcgagacacagcccagcagggtgtggtaaatttcccctatgacgacgtgtcactccgcaactag

SEQ ID NO: 241937 - DNA, 6644 bp, synthetic construct
  misc_feature 1..6644: note = Description of Artificial Sequence: Synthetic coding sequence
  source 1..6644: mol_type = other DNA
atggcaacccgaagctcccgaagggagtcccggctcccttttttgtttaccttggtagccttgctgcctcccggagccttgtgtgaggtttggacacagagactgcacgggggttcggctccactgccgcaggacaggggattcttggtggtccaaggtgaccctagggaactacgcctgtgggcaaggggggatgcccgtggagcctcgcgggcagacgaaaagccactgcgtcggaaacggtctgctgcccttcaaccagagcctatcaaggtgtatgggcaggtgagtttaaacgatagccacaatcagatggtcgtgcactgggcaggcgagaagtctaatgttattgtggctcttgcccgtgacagcttggctctagcgaggccaaagtcgtctgatgtgtacgtgagctatgactacggtaaaagttttaaaaagattagtgataaactcaactttggattgggcaaccgctctgaggcagtgattgctcagttttatcattcccccgcagacaacaagagatacatatttgcagatgcatacgcccagtacttatggatcacatttgatttttgtaatacactgcagggtttcagtatacccttcagagccgcagacctgctgctgcacagcaaggcttccaacctgctgcttgggtttgacagaagccaccccaacaaacagctctggaagtctgacgactttggacaaacctggattatgatccaggagcacgtcaaaagttttagctgggggatcgatccctacgacaaacctaatactatatacattgagcggcatgagcccagtggttatagcacagttttccgaagcacagatttttttcagagtagagagaatcaagaagtgatcctggaagaagtcagggacttccagctgcgcgataagtatatgttcgccacaaaagtcgttcacctgctaggctctgaacagcagagttcagttcagttatgggtgtcctttgggaggaaacccatgcgagccgctcaattcgtcacacggcacccaataaatgaatattacatcgctgatgcctcagaagaccaggtttttgtgtgtgtgagtcactccaataacaggactaatttatacatctcggaagcagaagggttgaaattctctctatcactcgaaaacgtcctgtattatagtccaggtggggcaggttccgacacccttgtgaggtatttcgcaaatgaaccattcgctgatttccacagagtcgaaggcttgcaaggagtctatatagccaccctgatcaacggcagcatgaatgaagagaacatgcggagcgtaattacattcgacaagggtggaacttgggagttcttgcaggcacccgcattcaccggatacggggagaagatcaactgtgaactaagccaggggtgctctctacacctggcgcagagactgagccagctgctgaacctacagttgagaaggatgcccattctcagcaaagagtccgcccctgggctgatcatcgccactgggagtgtggggaagaacctcgccagcaaaacaaacgtctacatttcgtcttcagccggtgctaggtggcgtgaggctctccctgggcctcactattatacctggggagatcacgggggaataattaccgccatcgcccagggcatggagaccaatgaactcaagtactccacaaatgaaggtgaaacgtggaagacattcatcttctctgagaagccggtgtttgtctacgggctcctgacagaaccaggcgaaaagagcacagtgttcaccatattcggctctaacaaggagaatgtccacagctggcttatcctgcaggttaacgcaaccgatgcactaggtgtgccttgcaccgaaaacgactacaagttgtggtcacccagcgacgagaggggtaatgagtgtcttctcgggcacaagacggtgtttaaacgtcgcacacctcacgcgacatgctttaacggcgaggacttcgatcgcccagtggtggtcagtaactgctcctgcacacgggaagattatgaatgtgactttggtttcaagatgagcgaggatctcagtctggaagtttgtgttcctgatccagaattcagcggcaagtcttatagtccccctgttccatgtcctgtcggttccacctacagacgaacacgagggtaccgaaagattagcggcgatacttgcagcggcggtgacgtcgaggccagactggaaggggaattggtgccctgtccattagctgaggagaatgagtttatattgtacgcagtgcggaaatccatataccggtacgacctggcgtcaggggctacagaacaattgccactcaccggactccgggctgctgttgcccttgactttgactatgagcacaactgtctgtattggtctgacctcgcactcgatgtgatccagcggctgtgtttaaacggcagcacggggcaagaggtgatcataaatagcgggttggaaaccgttgaggcactggcatttgagcccctctcccagttgctgtactgggtggacgccggattcaagaagattgaagtggccaatccggacggagatttccgcctgacaatagttaattctagcgtcctggacaggcccagagccctagtacttgtgccccaggagggagtcatgttttggacagattggggggacctgaaacccggaatctacagaagcaatatggatggttctgctgcctaccacctggttagcgaagacgttaagtggcccaatggaatctccgttgacgatcagtggatctattggaccgatgcttacctggaatgtatcgagaggataacattcagcggccagcagagaagtgtcatcttggataacttgcctcacccctacgccattgcagtctttaagaacgaaatttactgggacgactggagtcagttgtccatcttccgcgcatcaaagtactctggatcccagatggaaatcctcgccaaccaattaaccggcctcatggacatgaagattttttataaggggaagaatactggcagcaacgcttgcgtgccgagaccttgtagtctactgtgtcttcctaaggccaacaacagcaggagctgtaggtgccccgaggatgtgtcctcatcggttctgccgagcggcgatctgatgtgcgactgtcctcaggggtaccagctcaaaaacaacacatgcgttaaacaagaaaatacctgcctacggaaccaatacaggtgttccaacggtaattgcatcaacagcatttggtggtgcgacttcgacaacgactgtggagatatgtctgatgaacgtaactgccccacaactatatgtgatttagacacccagtttcgctgtcaagagagcggaacctgtattcccttgagctataaatgtgacctcgaggacgactgcggagataatagcgatgagtcccattgcgagatgcatcaatgtagatccgacgaatacaattgcagttccggcatgtgcatccgctcttcctgggtgtgcgatggcgacaacgattgccgggattggagcgatgaggcaaactgcaccgcgatctaccatacctgcgaagcttccaacttccagtgccggaacgggcactgtattccccagcgctgggcctgtgatggcgacactgattgtcaggatggcagtgacgaggacccagtaaattgtgaaaaaaagtgtaacggattccgctgcccaaacgggacgtgcattccatcgtccaaacactgcgacggcctccgcgactgcagcgatgggtcagacgaacagcattgtgagccgttgtgtacacatttcatggattttgtgtgcaagaataggcagcaatgtctgtttcactctatggtgtgtgatggtatcatacagtgtcgagacggaagtgacgaagacgccgctttcgcaggttgctcacaggatcctgaattccataaagtctgcgacgaatttggctttcagtgccagaacggcgtctgcatttcgttgatctggaaatgcgacggaatggacgactgcggtgattatagcgatgaagccaactgtgagaacccgaccgaggcccctaactgtagtagatatttccagttcagatgtgaaaatggccactgtattccaaaccgctggaagtgcgatcgcgagaacgattgcggagattggagtgatgagaaggactgcggggatagccacattctcccgttttcaacccccggaccttcaacctgcctccctaattactatagatgtagttccggcacatgtgtcatggatacttgggtctgcgatggatatagggactgtgctgatggttcagacgaagaagcgtgccccctgctggcaaatgtcacagctgcctctactcctacacagcttggtcgatgtgatcgctttgaattcgagtgccaccagcctaaaacttgcataccaaactggaaaaggtgcgatgggcatcaggattgtcaggatggtagagacgaagctaactgcccaactcattcgacgctaacctgcatgtccagagagttccaatgcgaggacggcgaagcctgcattgtactctccgagcgctgtgacgggttcctggattgttcagatgaatctgacgagaaagcttgtagtgatgaactgactgtctataaggtacagaatctgcagtggaccgccgacttttctggcgacgtaacactcacatggatgaggcctaaaaagatgcccagcgctagctgcgtgtataatgtgtattatcgagtagtgggcgagtctatctggaagacactggagacccattccaataaaactaacaccgtcctgaaagtactgaagccagacactacctaccaggttaaggtccaagtgcagtgcctcagcaaggcccacaataccaacgactttgttaccctccggacccctgaaggcctgcccgatgcccctcgaaacttacagctcagcctgcccagggaggccgaaggggtcatagtaggacattgggcaccccctatacatacgcacggtctcatcagagagtacattgtcgaatattctcggagcggttctaagatgtgggccagccagagagccgcttctaattttacagagataaagaacctgttggtcaataccctgtacacagttcgggtggctgcggttacaagtagaggcatcgggaactggagcgacagcaagtccatcacaactattaagggaaaggtgattccgcctcccgacatccatatcgactcgtacggggagaactacctaagtttcacgttgaccatggaatccgatatcaaggtgaatggatacgtggttaatctcttttgggctttcgacacacacaagcaggaacgcagaaccctgaacttcagaggctccattctgagccataaggtgggaaacttaaccgcccacaccagctatgagatatctgcctgggccaaaaccgacctgggggactcccccctcgcatttgagcacgtgatgactcgcggagtgagacctcctgccccttcccttaaggccaaggccatcaaccagactgctgtggagtgcacttggacaggcccacggaatgtcgtctacggcatcttctacgcgaccagttttctggacctgtataggaaccctaagtccctgactacatctttgcacaataaaaccgtgatcgtgtctaaggatgaacaatacctgttccttgtccgcgtcgtggtcccttaccagggacccagttccgattacgttgtggtcaaaatgatcccggacagcaggctaccaccccgtcacctccatgtggtacataccggtaagacaagtgtggtaattaaatgggagtccccatatgactccccagaccaggatctgctttacgctgtggcagtgaaggacctgatccggaaaacagatcgcagctataaggtgaaaagcagaaactcaacagtagagtacacactgaacaagctggagccgggtggcaagtatcatatcatagtgcaacttggaaatatgtcaaaggactcttctatcaagatcactacagtatctctgagtgccccagatgcacttaagattatcacagaaaatgaccatgtcttactgttttggaagtccctggccctgaaagaaaagcattttaatgagagtagaggctatgaaatccacatgttcgatagcgcgatgaacatcacagcctacctaggaaatacaaccgataattttttcaagataagcaatttgaaaatggggcacaattatacattcacggtacaggctcggtgcttgtttggcaaccagatctgcggggagccggcaattctgttatatgatgaactgggaagtggagctgacgcctctgctacgcaggcggctcggagtaccgatgtggccgcagttgtggtccctattctgtttctgatcctgttgagtctcggcgttggattcgccatcctctatactaaacaccgccgattgcagtccagttttaccgcatttgctaattctcattacagctctcggctaggatccgctatttttagctccggcgatgatctgggggaggacgacgaagatgcgcctatgataaccggtttttccgatgacgtcccaatggtgattgcgta

SEQ ID NO: 241938 - DNA, 3507 bp, synthetic construct
  misc_feature 1..3507: note = Description of Artificial Sequence: Synthetic coding sequence
  source 1..3507: mol_type = other DNA
atgggtaaagtcggcgctggcggtggatcgcaagcccgtctatcagcactcctggctggtgcaggcctcctcattctgtgcgcgcctggcgtttgtggaggagggagttgctgtcctagccctcatccttcttccgcccctaggtctgcttcaactccaaggggcttctcacatcagggacggccagggcgtgccccagcaacaccactgcccctggtggtgcggcctctttttagcgtcgcacctggggatcgggctctgtcgttggaacgagccaggggcactggtgcatctatggcagtggcggcacgatcaggacgtaggcggaggtcaggtgccgaccaggagaaggccgaacgaggggaaggtgcctctcgcagccccaggggcgtgctccgagatggagggcagcaggagcctggcacacgggaacgtgaccctgacaaagcgacacggtttagaatggaggagctgaggctaactagtactaccttcgccttgacgggagattcagcacacaaccaagcaatggtgcactggtccgggcacaatagctctgtcattctcattctgaccaagctctacgactataatctaggtagcattacagagtcaagcttatggcggagtaccgattatggaaccacgtacgagaagctgaacgacaaagtgggtcttaagactattctgagctatctctatgtgtgtccaaccaataaaagaaaaattatgctgctcacagatccagagatcgagtcgagcctcctcatttcatccgatgaaggagctacctatcagaaatacaggttaaacttttacattcagtccttgctgttccaccctaaacaggaggactggatcctggcatattcccaggatcagaaactgtactccagcgctgagttcggcaggcggtggcagctgattcaagaaggagtggtgccaaaccgcttctactggtctgttatgggctctaacaaagaaccggatctcgtgcatctcgaagctcgcaccgtagatggccattctcactacctgacatgtcgcatgcagaattgcactgaagcgaatcgtaaccagcctttccccggatatatagaccccgattcacttatcgttcaggatcattatgtattcgtccagttgactagcgggggaaggcctcactactatgtatcatacaggcgcaatgcctttgctcagatgaaactaccaaaatatgcccttccgaaagatatgcacgtgatcagcaccgatgaaaatcaggtattcgcagccgttcaggagtggaatcaaaatgatacctacaacctgtacatctctgacacccggggagtgtatttcaccttggcattagaaaacgtgcagtcaagtagaggaccagagggcaatatcatgattgacctttacgaggtggctggaattaagggaatgttcctggccaataagaaaatcgacaatcaagtcaagacctttataacatataataagggcagagactggagactgctgcaggcacctgataccgatctccgcggagacccagtgcactgcctccttccctattgtagcctgcacctccatttgaaggtgtctgagaatccctacacatctggaattatcgcttccaaggacacggctcctagtattatcgtggcctctgggaatatcggctccgaactgtctgacactgatatttcaatgtttgttagctccgacgccggtaacacctggaggcaaatctttgaggaggaacactccgtgctatacctagaccagggcggagtcctcgttgctatgaagcacacttcgcttcccatccgtcatctgtggcttagtttcgatgagggtaggagctggtcgaagtatagtttcacatccattccgttatttgtggacggagttctgggggagcccggtgaagagaccctcataatgaccgtcttcggccacttcagccatcgctcagaatggcaactggtgaaggtggattacaagagcattttcgaccgccgatgtgcggaggaagactatcggccttggcagttacactcacagggtgaggcgtgcatcatgggagccaaacgtatttacaagaagagaaaaagcgagcgcaaatgcatgcagggcaagtatgctggggcaatggagagtgagccttgtgtgtgcaccgaggccgactttgactgcgattatgggtacgagaggcactccaatggccagtgcctccccgcattctggtttaaccccagctctctctctaaagattgcagccttgggcagagctatttaaacagcacaggatacagaaaggtagtgtctaataactgcaccgacggcgtccgtgagcaatatacagccaaaccccaaaagtgcccaggcaaggcacccaggggtttgaggatagttactgccgatggtaagctcacagccgaacagggacacaatgtgacacttatggttcagctagaagaaggagatgtgcagaggaccctgattcaggtggactttggggatggtatcgcagtgagctatgtgaatctgtcttctatggaagacggcattaagcatgtctaccagaatgtcggaatttttagggtcaccgtccaggtcgataactccctgggatccgactccgccgtcctttatctgcacgtgacctgccccctagagcacgtgcacctctcattgccattcgtgaccactaaaaataaagaagtcaatgcaacagcagttctgtggccaagtcaagtcggtaccctcacatacgtgtggtggtatggtaataacactgagcctctgatcacactggagggaagtatctcttttaggtttacctcggaaggcatgaacaccatcactgtccaggtgagcgcgggtaatgccatcctccaggacacaaagacgatagcagtgtatgaagaattccggtccttgaggctgtccttctcccccaatctcgatgattacaacccggatatcccagaatggagacgtgatatcggaagggtgattaagaaatctctggtggaggcaactggggtgcctggccagcacatcctggtcgctgtcctgcctggcctgcccacaacggcagaattgttcgtgctcccttaccaggatcccgcaggggagaataaacggagcacagatgatctggagcaaataagtgaactgttaatccacactctgaaccagaacagcgtccacttcgagctcaagccaggggtacgggtactcgttcatgccgctcatctcacggccgctcctctggtagaccttacaccaacccatagtggaagcgctatgctgatgttgctgtctgtggtgttcgtcggcctggcagttttcgtgatttataagttcaaaagaagagttgcactgccatccccaccttctccttctacccagccaggtgacagctctttgaggctccaacgtgccagacatgctactcccccttccacccctaaaagaggttccgctggggctcagtatgctatctag

SEQ ID NO: 241939 - DNA, 3597 bp, synthetic construct
  misc_feature 1..3597: note = Description of Artificial Sequence: Synthetic coding sequence
  source 1..3597: mol_type = other DNA
atgggcaaggttggtgccggtggcggttctcaggctcgcctcagtgccctgttggctggcgcaggcctgttgatcctgtgtgcccctggagtttgcggcggtggttcctgctgtcccagtcctcacccatcttccgcacccagaagcgcaagcacaccaagaggattcagtcatcaaggacgcccagggagagctcccgcaaccccgttaccactggtagtcagaccgctgttctctgtcgccccaggtgacagagcactgagcctagaacgcgcaaggggaaccggtgcaagcatggcagttgccgcaaggagcggcagacgaaggagatctggagcagaccaggagaaggcagagcgtggcgaaggggctagcaggtctcccagaggtgttctccgggacggagggcagcaggaaccgggaacacgggagcgagacccagacaaagctacccgttttaggatggaggagttacgccttacatccaccacatttgctctcacgggggacagtgcccataatcaagccatggtgcactggagcgggcacaacagttctgtgattctgattctaaccaaattgtatgactacaacctaggttcaatcactgaatcgtcactgtggcgtagtactgattacgggaccacgtacgaaaagcttaacgataaagtcggtctaaaaaccattctgtcatatttatacgtctgtcctactaacaaaaggaaaattatgctcctgactgatcctgaaatcgagtcgtcactacttatcagttccgacgagggggcaacctatcagaaatatcggttgaatttctacatccagtccttgctgttccaccccaaacaggaggactggatccttgcctactctcaggatcagaagctgtatagctcggccgagttcggcagacgctggcagctgatccaggagggcgtggtcccaaaccgcttctattggtccgttatgggctcaaacaaagaaccagacctcgtgcacctcgaggcgcgaacagtcgatgggcactcacattatcttacatgccgcatgcagaattgtacagaagcaaacagaaatcagcccttccctgggtacattgatcccgactctctcatcgtgcaggaccactatgtgttcgtgcaattaacctccggaggtaggccacactactacgtgtcctatcgcaggaatgctttcgcgcagatgaaactcccaaaatacgctttgcccaaggatatgcacgtcatttcaaccgatgaaaaccaggtgtttgcggcagttcaggaatggaaccagaatgatacttacaacctctacatctccgatacgcgaggtgtctattttacacttgcgctcgagaacgtacaatctagccgcggacctgaaggtaacattatgatcgacctgtatgaggtcgcaggtatcaagggcatgttcttggctaataaaaaaatagacaatcaggtgaaaacctttatcacctacaacaaaggtcgcgattggcgcctccttcaggcaccagacacagatctccggggagacccagttcactgcctgcttccttactgctctttgcacttgcatctcaaggtgtcggaaaatccatacacgtctggcatcatcgcgtccaaagatacggccccatctattatcgtggcaagcggaaatatcgggtccgagctgagtgataccgatatcagcatgtttgtctcttctgacgccggaaacacctggagacagattttcgaggaggaacactctgtactatacctcgatcagggcggagtgctggtcgctatgaaacatacctctctgcccatccgccatctgtggctgagcttcgatgaagggagatcatggtccaagtactcatttactagcatccccctattcgtggatggcgtactaggagagcctggggaagaaaccctgattatgactgtgttcggccacttttcccatcgcagtgagtggcagctcgtcaaagttgattataaaagcatcttcgaccggaggtgcgccgaggaggactacagaccatggcagctgcacagccagggagaagcctgcataatgggtgccaagaggatctacaagaagaggaaatcggagcgaaagtgtatgcagggtaagtatgctggtgctatggagagcgaaccatgtgtgtgcaccgaggcggactttgactgtgattacgggtatgaacgccattccaatggtcagtgcctgccagcgttttggtttaacccttcgtcactgagtaaagactgctcccttggacaaagctatctaaactctactggataccgcaaagtggtttccaataactgcacggacggcgttagggagcagtacacagcaaagcctcaaaaatgtccaggtaaggcccctaggggacttcgcattgtcactgctgatggtaaactgactgcagaacaggggcataatgtcacccttatggtccagctcgaagagggggacgttcagagaacactgatacaagtggattttggggacggtatcgccgtctcttatgtcaatttatctagcatggaggatggcattaagcacgtgtaccagaatgtgggaatcttcagagtgaccgtgcaagttgataactctttgggctctgatagcgccgtgctgtacctacatgtgacatgcccactggagcacgtccaccttagtctgcctttcgttactaccaaaaataaggaggttaacgccaccgccgtcctgtggccgtctcaggttggcacactaacgtatgtgtggtggtacggaaataatacagaaccgctaatcacgttggagggttccatcagcttcagattcaccagcgagggaatgaataccataaccgttcaggtctctgcaggaaacgccatccttcaggataccaagaccatcgcggtgtatgaagaattcaggtcgcttaggctttccttttcaccaaatctcgacgactataacccagacatccccgagtggaggagagacatcgggagagtgattaagaagagccttgttgaggccactggcgtgcctggccagcatatcctagtggcagtgttaccaggcctgccgacaacagctgagttatttgtgctgccctaccaggatcccgctggagagaataaaagaagtactgacgaccttgagcagatctcggaactcctgatccataccctgaaccaaaactccgtccactttgaactgaagccaggggtgagagttctcgtccatgctgcacacctgactgccgctccattggtggacttgacccccacccattcaggttctgcaatgcttatgcttttgagcgtggtctttgttggtttggccgtgttcgtgatatacaaatttaagcggaagattccaggaatcaacgtatatgcccagatgcagaatgagaaggagcaggaaatgatttctcctgtcagtcattcagagtcaaggcctaacgtgccccagaccgaactgagacgtcctggccagctcatcgacgaaaaggtggaatctcagctgatcggcagtatcagtatcgtagctgaaaaccagtcaacaaaagaaatcccaacctatgtgaatgtttag

SEQ ID NO: 241940 - DNA, 2145 bp, synthetic construct
  misc_feature 1..2145: note = Description of Artificial Sequence: Synthetic coding sequence
  source 1..2145: mol_type = other DNA
atgatcgacctttatgaggtcgctggaattaagggtatgttccttgcgaataaaaagatcgataaccaggttaagacgtttattacttacaataaaggaagggactggaggcttctgcaggctccagacacagatttacgaggggaccccgtgcattgtctgctaccctactgctccctgcacctccacctgaaagtgtctgagaatccttatacctcaggtatcatcgcctctaaggatactgctcctagcatcattgtggcctccggaaacattggatcggagctgtcagatacagacatcagcatgtttgtgagctccgatgccggtaatacatggcgccagatctttgaagaggaacacagcgtcttatatctggaccaaggtggagtgcttgtggcgatgaagcataccagtttgcccatcagacatctctggttatctttcgatgaaggcaggtcttggtctaagtacagttttacttcgatccccctttttgtagatggggtgctaggggaacccggagaggagactctgatcatgacagtattcgggcacttcagccatagatcggagtggcagctggtcaaggttgactacaagtctattttcgatcggaggtgtgcagaggaggactacaggccatggcaacttcactcacagggcgaagcgtgcattatgggggcaaaaaggatttataagaaacgcaaaagcgagagaaaatgcatgcagggaaagtatgcaggagccatggagagtgagccttgcgtgtgtacagaggccgactttgattgcgactacggctacgagcggcattcaaatggtcagtgtctgccagctttctggtttaaccccagcagtctttcaaaagactgcagtctcgggcagtcatatctgaacagcacaggttatcggaaagtggtgtccaacaattgtaccgatggggttcgtgagcaatacaccgcaaagcctcagaaatgtccaggaaaggcccctcggggtctccgcattgtgaccgccgacggcaagctgacagctgagcagggccacaatgttactttgatggtccagcttgaggagggagatgtacagcggacactcatccaggtggattttggcgatggaattgctgtgtcatatgttaacttgtcatctatggaggacggaatcaagcacgtgtaccagaacgttgggatcttccgcgtcaccgtgcaggtggacaactctctgggtagcgattcagcagtgttatacctgcacgtcacttgtcctctagaacatgttcacctgtctttgcccttcgtgactactaaaaataaggaggtcaacgccacagccgtcctctggccatctcaggtcggcactctgacttacgtatggtggtacgggaataacactgagcctttaataacccttgagggctccatttcattccggtttacatccgagggtatgaacacgattacggtccaagtgtcggcagggaacgctattttgcaggacactaagactattgctgtgtacgaagaattcagatcgctcaggctgtcatttagccccaacctggatgattataacccagatatcccagagtggcgcagggacatcgggagggttatcaagaaaagcctggtcgaggccacaggcgtacctggacaacatatccttgtcgccgttctgcccggtctgccaactacggccgagttgttcgtgcttccttaccaggaccccgctggggagaataagcgcagtacagacgacttagagcagatttccgaacttctgattcataccctcaaccagaacagcgtccacttcgaactgaaacctggagttcgcgttttggtccatgcagcccatctcacagccgctccgctagtggatctcacacccactcactcagggtccgctatgctgatgctcctgtccgttgtctttgtgggtttggccgtattcgtgatttacaagttcaaaaggaaaatccctggcatcaatgtgtacgcacagatgcaaaacgagaaggagcaggagatgatctcacccgttagccattctgaatctaggccaaacgtcccgcagactgaactgcggagacctgggcagctcatcgatgagaaagtcgagtctcagcttattggcgagtag

SEQ ID NO: 241941 - DNA, 642 bp, synthetic construct
  misc_feature 1..642: note = Description of Artificial Sequence: Synthetic coding sequence
  source 1..642: mol_type = other DNA
taactcgacgattacaaccctgatattcctgaatggagaagagacattggcagagtcatcaagaaaagcctcgtggaggcaaccggagtgccaggtcagcacatccttgtggcagtgctgcctggacttccaaccacggcggagcttttcgtgttgccatatcaggaccccgctggggagaacaagagaagcaccgatgatctagagcagatttctgaattattgatacatacactaaaccagaacagtgtgcactttgagctcaaaccaggagtgcgggttctggtccatgctgcgcacctgaccgctgctccgttagttgacctgacccccacacattccggatccgccatgctgatgctgctctccgtcgtgttcgtcggccttgcagttttcgtcatctataaattcaaacgcaagattcccggaattaacgtctacgcccagatgcagaacgaaaaggagcaagagatgatttcccctgtgtcccattcagagagcaggcccaacgtgccgcagacagaactgaggagacccggacagctgatcgacgagaaagtggaaagtcagcttatcgggtctatttcaatcgtcgcagaaaaccagtctaccaaggagattcccacttatgtgaatgtgtag

SEQ ID NO: 241942 - DNA, 3009 bp, synthetic construct
  misc_feature 1..3009: note = Description of Artificial Sequence: Synthetic coding sequence
  source 1..3009: mol_type = other DNA
atgggaaaggtgctggaaagttctctttggaggtctagtgacttcgggactagctatacaaagctgactctgcagcctggtgttaccaccgtgatcgataacttctacatctgccctacaaacaagaggaaggtgattctggtatcttcttctctcagcgatcgtgatcagagcctttttctgagtgcagacgagggcgctacgttccaaaagcaaccgatcccattttttgtagagacattaattttccacccgaaggaagaggacaaagtgttagcgtatacaaaggagagcaagttatacgtctcaagtgatttgggtaaaaaatggaccctgttgcaagagagggtcaccaaagatcatgtgttctggtctgtgtcaggcgtggacgcagacccagaccttgtgcacgtagaggctcaggatcttgggggagattttcgctacgttacatgcgcaatccacaactgctccgagaagatgctgaccgcccctttcgctggccctattgatcacggttcactgacggttcaggatgattacatcttttttaaggcaacctctgcaaatcagacaaaatattatgtatcttatcgtcgaaacgagttcgtcctaatgaagctcccgaaatacgcactgccaaaggatctgcagatcatatcaaccgacgaatcccaggtcttcgtggccgtgcaagaatggtatcagatggatacctacaacttgtatcagtccgatcctcggggtgttagatatgcccttgtcctgcaagatgtcagatccagcagacaagctgaggagtccgtgctcattgatattctggaagtcagaggggtgaagggagtttttctggccaaccaaaagattgatggcaaagtcatgacccttatcacctacaataaaggccgtgattgggattatctgagacccccatcaatggacatgaatggcaagcccacaaattgtaagccccctgactgtcatcttcaccttcaccttcgatgggccgacaacccttatgtttccggcacagtacatacaaaggacaccgcgcctggcttgattatgggagctggcaacctcggttctcaactggttgagtataaagaggagatgtacatcacaagtgactgcgggcatacttggcgccaggtgttcgaagaggaacaccatatcctgtatctggaccatgggggagtgattgttgccattaaggacacatccatccccctgaaaattcttaaattctcagtcgacgagggactcacatggtcaacacacaatttcaccagcacgagcgtgttcgtggacggtttgttatcggaaccaggcgatgagacgttggtgatgacagtgttcgggcatatatcatttaggtctgactgggaactcgttaaagttgatttccggccatccttttcacggcagtgtggtgaagaagactacagctcctgggagctgagcaatctccaaggcgacagatgcataatgggccagcagcgaagtttccggaagcggaagtctaccagctggtgcataaaaggccgatcttttacatccgctctcacgagcagagtctgcgagtgccgagacagcgattttctgtgtgactatggctttgaacggtcaagttcatcagagagtagcactaataagtgtagcgctaacttctggttcaaccccttgagcccaccagatgactgcgctctggggcagacttatacttcctcactgggctaccggaaggttgtcagtaacgtatgcgaaggtggggttgatatgcaacagagccaggtgcagctgcagtgcccgttgactcctcccagggggcttcaagtaagcatccagggtgaggccgtcgcggtcagaccaggggaggacgtgctattcgtcgtgagacaggaacagggggatgtcctgacgaccaaataccaggtagacctgggtgatggattcaaagccatgtatgttaatctgaccttgaccggcgagccaattcgccaccgctacgagtccccaggcatctatagagtatctgtgagagctgagaataccgctggccacgacgaagctgttctgtttgtgcaggtcaatagcccactgcaagccctatacctcgaagtggtgccagtgattggccttaaccaagaggtgaatcttactgccgtgctgctccccctcaatccaaatctcactgtgttttactggtggattgggcactcccttcagcctctgctatcgcttgataatagtgtcaccacacgatttagtgacacaggagacgtgcgtgtgaccgtccaagccgcttgtggaaattcagtgttacaggatagtcgcgtactgcgggtactagatcagttccaggtcatgcctctccaattcagcaaagagttggacgcctacaacccaaatactcccgagtggagagaggacgtcggcctagtggtgacacgcttactgagcaaggagaccagcgtcccacaggaacttctggttacggtggtaaaacccggactgccgactctggccgacttgtacgttcttctccctccccctcgtccaaccaggaagagaagtctctcatccgataaacgcctggccgctattcagcaggtcctaaacgcccaaaagatttctttcctgttgaggggcggtgtgagagtgctagtcgccctgcgggatacaggcaccggtgcggaacagctggggggagggggaggttattgggccgtagtcgtcctgtttgttattggacttttcgctgcaggcgcattcattctgtataaattcaaatcccgcaagcggcctggcagaaccgtgtacgcccagatgcacaacgagaaagaacaggaaatgacaagccctgtctctcattctgaagatgtgcaaggtgcagtacagggcgaagagttcattgatgacgatctagattcgcagacattgggaaaccatagtggagttgtgctctcgattaattcgcgagaaatgcattcgtatctggtttcctag

SEQ ID NO: 241943 - DNA, 3480 bp, synthetic construct
  misc_feature 1..3480: note = Description of Artificial Sequence: Synthetic coding sequence
  source 1..3480: mol_type = other DNA
atggcccaccgcggaccgtccagagccagtaaaggccctggccctactgctagggcgcctagcccaggagccccacctccaccacgatccccaagaagccgaccactccttttgctgcttctgctgttgggcgcatgtggggctgctgggaggtccccagaaccgggtcgcctcgggccacacgcccagctaacgcgggttcccaggagccctccagctggcagagctgaacctggtgggggagaggatcgccaggccaggggaaccgagcctggggcacctggcccatcgccaggcccagcccctggcccaggggaagatggggcacccgcagccggttacagaagatgggagagagctgcacccctcgctggcgttgctagccgagcacaggtatctctgatctctacctctttcgtactcaagggggacgccacccacaatcaggccatggtgcactggaccggcgagaattcttctgtgattctcatcctgactaaatactaccatgcagacatgggcaaagttctggagtcctcactctggagatccagtgattttggcacatcctatacaaagctaacgctacaaccaggagtgacaaccgtcattgacaacttctacatctgcccaaccaacaagaggaaggttattcttgtaagcagctctctatcagaccgggaccagtctctatttttgtcggctgacgaaggcgcaacattccagaagcaacctattcctttctttgtagagaccttaatcttccaccccaaggaggaagacaaagttttagcctacacaaaggaatccaaactctatgtatcctcagacctgggaaaaaaatggacactcctacaggaaagggttactaaagatcatgtgttctggtcagtgtctggcgtcgacgccgatccggatttagtgcacgtggaagcccaggatctgggcggtgactttcggtatgtaacatgcgctattcataattgtagtgagaagatgttaacagcccctttcgctggacctatcgaccatggtagcctcaccgtccaggacgactacatcttttttaaagctacatcagccaaccaaacaaaatactatgtctcctatcggaggaacgagtttgttctcatgaaactccctaagtatgcgctgcccaaagacctgcaaattatttccactgacgaatcccaggtctttgtggcggtccaagagtggtaccagatggacacgtataacttgtatcagagcgatccacgaggagttagatacgctctggtcctgcaggatgtgaggtcgagccgacaggcagaggagagtgtgttgatagatatcctggaggtgcggggagtgaaaggcgtgttcctggcaaaccaaaagatcgacggaaaggttatgaccttgatcacatataacaagggccgagattgggattacctcaggcctccctccatggacatgaatgggaaacccacaaactgcaagccgcctgactgtcacctgcacctgcatctgcggtgggccgacaatccatacgtatcgggcaccgtgcacacaaaagacacggcaccgggtttgattatgggcgcaggaaacctggggtctcaattggtcgagtacaaggaggaaatgtatataacatctgactgcggacacacatggagacaagtttttgaggaggagcaccacatcctttacctggaccacggcggtgttattgtcgctattaaggatacttctatccctctgaaaattctgaaattctcggtggacgaagggctgacctggtcaacacacaacttcacgagtactagtgtttttgttgatggcttattgtccgagccaggcgacgagaccctggtcatgacggtgttcggccatatcagctttagatccgactgggaacttgtcaaagtggattttaggccatccttctcacggcagtgtggggaggaagactactcctcatgggagttatctaacctgcagggcgatcgctgcataatgggccagcaaagaagcttcagaaagagaaagtctacatcctggtgtattaagggaaggagcttcacctccgccctgaccagtcgcgtatgcgagtgtagagactcggattttctttgcgactacgggttcgaacggtcgagcagttccgagtcttcgaccaataaatgcagtgccaacttctggttcaacccccttagccccccagatgactgtgctctgggtcagacttacacatcctcactcggttaccgcaaagtggtttctaacgtgtgcgaaggcggagtggatatgcaacagtctcaggtgcagctgcagtgtcccttgacacctcctcgagggcttcaggtgagtatacagggcgaagccgtggcagtaagaccgggtgaggatgtactgttcgtagtccggcaggagcagggggatgttttgacaaccaagtaccaggttgaccttggtgatggcttcaaggctatgtacgtaaatctcactctaaccggcgagcccatccgtcaccgctacgaatcccccggaatctaccgggtgtcagtgcgcgctgaaaacaccgcaggtcatgacgaggcggtcttgttcgtccaggtcaactctccgctgcaagccttgtacctggaagtggtgcctgtaatcgggctgaaccaggaagtcaatttgacagccgtgcttctccctctgaaccccaacctgaccgttttttactggtggatcggtcattcactgcaacccctgctcagcctggataattccgtgacgacaagatttagcgacaccggcgatgttagagtgacagtgcaagcggcatgtgggaattcagtccttcaagatagtagggtgctccgggttctggatcagtttcaggttatgcccctgcagttttccaaggagcttgacgcgtataatccaaatacacctgaatggagggaggacgtcggcctagttgttacccggctgcttagtaaggaaacttccgtcccacaggaactgttggtcactgtggtcaagccaggactgcctactttagcagatctctacgtcctgctcccaccaccccgacctacccgaaagcgcagcctatctagcgataaacgcctagcagctatccagcaggtactgaatgcccagaagatttctttcctgctgagaggcggtgtacgggtgctggtagccttacgagacacaggtacaggagccgaacagctgggaggcggtgggggttattgggcagtggttgttctcttcgtgatcggtctgtttgccgctggcgctttcattctctataagtttaaacgaaaacgccctgggaggactgtgtatgctcaaatgcacaatgaaaaagaacaggaaatgacctccccagtctcccatagcgaagacgtgcagggtgccgtacagggcaaccattctggcgtggtactgtccatcaacagtcgggagatgcacagctacttggtgtcatag

SEQ ID NO: 241944 - DNA, 594 bp, synthetic construct
  misc_feature 1..594: note = Description of Artificial Sequence: Synthetic coding sequence
  source 1..594: mol_type = other DNA
atgggagaaagaaagattttcaaaaagagaaaacccggagctcaatgcgccttgggcagggaccactccggctcagtggtgagcgagccctgcgtctgcgctaattgggatttcgaatgcgattacgggtatgaaagacacggagagagtcaatgcgtgcctgctttctggtacaaccctgcttcaccaagtaaggactgtagcctgggacagtcgtatctgaatagcaccgggtacaggcggattgtgtccaacaattgcaccgacggactgcgtgagaagtacaccgcaaaggcacagatgtgtcccggaaaagcgcctagaggcctgcatgtcgtgaccactgatgggcgtcttgtcgccgagcagggccacaacgcaaccttcatcattctgatggaggagggagacctgcagaggacaaatattcagcttgacttcggggacgggattgctgtgtcttatgctaacttctcacccatcgaggacggcattaaacatgtgtacaagagcgcagggattttccaggtcaccgcctacgctgaaaataatcttggaagcgacacggcggtcctgttcctccacgttgtgtag

SEQ ID NO: 241945 - DNA, 3669 bp, synthetic construct
  misc_feature 1..3669: note = Description of Artificial Sequence: Synthetic coding sequence
  source 1..3669: mol_type = other DNA
atggaggctgctagaactgagcgccctgccggtagaccaggagccccactggtgcgaacgggactgcttctcctgtctacatgggtcctggccggtgctgagataacttgggatgccaccggtggacccggacggccagccgcacccgctagtcgtcctccagctttgtcacctctttcaccaagagccgtggcttcacaatggcctgaggagctggctagcgccaggagagctgccgtcctgggcagaagagcagggccagagcttctacctcagcagggcggaggaaggggcggagagatgcaggtagaggctgggggaaccagccctgcgggagagcggagaggcagaggcattccggctccagctaagctagggggtgcgagaaggagtcggagagcccaaccgccaatcacccaggagagaggagatgcgtgggccaccgcgccagccgacggaagcagagggtctagacctctcgccaagggctccagagaggaggttaaggcgcctagggctggtgggagcgctgcagaggatctgcggctgccgagcacctcatttgccttaacaggcgactcggcacacaatcaagcgatggttcactggagcgggcacaacagtagtgtgatcctcatattgacaaagttatatgatttcaacctgggttcagtgacagaaagtagcctgtggaggtccacagattacgggaccacttacgagaagcttaatgataaggtggggttgaaaacagtactctcatacctgtacgtaaatcccaccaataaaagaaagattatgctgctgagcgatccagagatggagagttcaattctgatctcgagcgacgagggcgctacatatcaaaagtataggcttacgttttacattcaatctctgctatttcatccaaaacaggaagactgggtgctggcatactcactggaccagaaattatacagcagcatggacttcggcagacgctggcagctcatgcatgagagaattactcctaataggttttactggagcgtagctggcctggacaaggaagctgatctggttcatatggaggtcaggactactgatggctacgctcactacctaacctgtaggatccaagagtgcgcggaaactacgcggtccggaccttttgccagatcgatcgacatctcgtcgctggttgttcaggacgagtatatttttatccaagtgaccaccagcggcagggcttcctactatgtgtcttatcgcagagaggcatttgcacaaatcaagctgccaaaatattccctgccgaaagatatgcatatcatttcaacagacgaaaatcaggtgttcgcggcagttcaggagtggaatcaaaacgacacctataatctctacatctctgacacacggggtatttattttacactggccatggaaaatattaaatctagccggggattgatggggaatatcataatcgagttatatgaggtggccggtatcaaaggaatctttctggcaaacaaaaaagtagacgaccaggtgaagacttacataacctacaataaggggagggactggcggcttctgcaagctcccgacgtagatctgaggggttccccggtgcattgccttctgcctttctgttccctgcatctgcatctgcagttgagcgagaacccatacagtagtgggcgaatcagcagcaaggaaaccgcccctggcttggtggttgctacaggcaacatcgggcctgagctgtcctacacagacatcggtgtgttcatcagcagcgacgggggaaatacctggcgacaaattttcgatgaagaatacaatgtttggtttctcgattggggtggcgctctggtggcaatgaagcacacccccctacccgtcagacacttgtgggtgtccttcgacgagggccactcatgggacaaatacgggtttacttccgtccccttatttgtagatggcgctcttgtggaggcaggcatggagactcacattatgactgtcttcgggcatttcagcctgagatccgaatggcagctggttaaggtcgactacaaaagcatcttctccaggcactgtactaaagaggactatcaaacctggcacctgctcaatcagggcgagccttgcgtgatgggcgagagaaagattttcaaaaaacggaaaccaggggctcaatgcgctctgggcagagatcattctggatccgttgtgtctgaaccatgcgtgtgtgccaattgggatttcgagtgcgattatggttatgagcggcatggtgagagtcaatgtgtgccagctttctggtacaaccctgcatccccgagtaaggattgttctctgggacaatcgtatcttaatagcactggttaccgacgcatagtttcaaataattgcactgacggactgcgcgagaagtacacagccaaagcccagatgtgcccagggaaagcgcctcgcggtctccatgtcgtcactacagacggtagattggtcgccgaacaggggcataacgcgacatttattattcttatggaggagggggacctccagcgcacaaatatacaactggattttggcgacggaatcgctgtaagctacgcaaacttctcgcctatagaggacgggattaagcacgtgtataagtctgcaggtatcttccaagtcacagcgtatgccgaaaataatctggggagcgatacggctgtactgtttctacatgtggtgtgtccagtggagcacgtgcacctgcgggtacccttcgtggcaattcgcaacaaggaagtgaacattagtgctgttgtttggccatcacagctgggcacactgacctacttttggtggttcggaaacagcacgaagcccctaattaccttggactcatcaattagttttacgtttctcgcagaagggaccgacaccatcacggttcaggtagccgctggcaacgcactgatacaagacaccaaggagatcgcagtgcacgaatactttcaaagccagctgcttagcttctcaccgaacctcgactaccacaatcctgatatccccgaatggcgaaaggatattggaaacgtgattaagcgagccctggtgaaggtgacgagtgtaccagaggaccagattctgatcgcagtatttcccggactgcccacctcagctgagttgtttatcctgccacccaaaaatttgacagaacggaggaagggtaatgagggagacctggaacagatcgtggagaccctgttcaatgccctcaatcagaacctcgtgcagttcgagctcaaacctggggtccaagtgatagtatacgtcacacagttaacattggctccccttgtggactcttccgcaggtcactcttcatcagccatgctgatgctgctgtctgttgtgttcgtaggacttgccgtgttcctaatctataagttcaagcgcaaaatcccttggatcaacatttacgcccaagttcagcacgataaagagcaagaaatgatagggtcggtttcccaatctgagaacgctccgaagatcacactgtcagacttcactgaaccagaggaactgctcgacaaggagctcgatacaagggtaatcggtggtatcgccactatagctaacagcgaatctaccaaggagatacctaattgcacctcagtgtag

SEQ ID NO: 241946 - DNA, 462 bp, synthetic construct
  misc_feature 1..462: note = Description of Artificial Sequence: Synthetic coding sequence
  source 1..462: mol_type = other DNA
gaaaacccttattcctcgggccgaatttcatctaaggagaccgcccctgggctggtagtggcaactgggaacattggcccagagttgtcctatacagatattggagtctttatctcttctgacggagggaatacatggcgccaaatattcgatgaagaatataacgtgtggttcctcgactgggggggtgcactggtggctatgaaacatacccccctacccgtgcgacatctgtgggtcagcttcgacgagggacacagttgggacaagtacggttttacatccgtccccctattcgtagacggagcactggtggaggcgggtatggagacacacataatgactgattacggttatgagcggcacggtgagtctcagtgtgttcccgctttttggtataacccggcttcacctagtaaagattgcagcctgggccagtcatacttaaattccactggatag

SEQ ID NO: 241947 - DNA, 1410 bp, synthetic construct
  misc_feature 1..1410: note = Description of Artificial Sequence: Synthetic coding sequence
  source 1..1410: mol_type = other DNA
atgggaactgttcacgccagatcactcgaaccattaccatcttctggccctgacttcggcggactgggagaagaagcagaattcgtcgaggtggagcccgaggcaaaacaggaaattctggaaaacaaggacgtagtcgtccagcatgttcacttcgacggcctcggaaggacaaaggacgatatcattatctgtgagatcggcgatgtctttaaagcgaaaaatttgattgaagttatgcgtaagagccatgaagctagggaaaagttgttgaggttaggaatatttcgacaggttgatgtactcatcgatacatgccagggggatgacgcacttcctaacggtcttgatgtgacatttgaggtcaccgagctacggcgtttgacgggctcttataacacgatggttggcaacaacgagggctcaatggttctgggactgaagttgcctaacctgttaggacgagcagagaaagtgaccttccagttctcttatggcaccaaggagactagctacgggttgagtttctttaaacctaggcctggcaatttcgaacgaaatttttcggttaacttatataaagtgaccggccaattcccatggtccagccttagggagacagacaggggcatgtccgccgagtactcctttcccatctggaaaacttcccacaccgtaaaatgggagggcgtgtggcgcgagctgggttgcctctctcggaccgcttcctttgctgtccgaaaagagtcaggtcacagcctaaaaagcagcctgagccatgccatggtgattgattcacgaaacagctcgattttgcccagaagaggcgcattactaaaggtgaatcaagaactagctgggtacactggcggagacgtgtccttcattaaggaagatttcgagctgcagttgaacaagcagctgatattcgatagcgtgttctccgctagcttctggggtgggatgctggtacccataggtgataagccatcaagcattgccgataggttctatctcggcggacctactagtattcggggtttcagtatgcattccatagggccacagagcgaaggcgattatcttggtggcgaagcatactgggctgggggtctccacctctatacccctctgccattccggcctggtcagggcggattcggggagttattcagaacccacttcttcttaaacgctggcaatctctgcaatctgaattatggggagggacctaaagcccatattaggaagttggcagaatgtatcagatggtcgtacggtgctggcatcgtcctgcggctggggaatattgctagactcgagctgaactattgtgtcccaatgggagttcagactggtgacagaatctgtgacggagtgcagttcggcgctggtatccgtttcctgtag

SEQ ID NO: 241948 - DNA, 780 bp, synthetic construct
  misc_feature 1..780: note = Description of Artificial Sequence: Synthetic coding sequence
  source 1..780: mol_type = other DNA
atgtctgctgagtactcttttccaatttggaagactagtcacacagtgaaatgggaaggggtgtggcgggagttagggtgtctctcaagaactgcctcctttgctgtcaggaaggaatctggccactccttaaaatctagtcttagccatgcgatggtgatcgatagcaggaacagctcgatcctgcccaggcgtggcgcactattgaaggtgaatcaagaactagctggttatactgggggtgatgtctctttcataaaagaagattttgagctccagttgaacaagcaactaattttcgactctgtgtttagcgcaagtttttgggggggaatgctagtacccattggagataagcccagcagtattgccgatcgattttaccttggagggcctacatcgattcgcggtttttccatgcactctatcggaccgcaatctgagggggactatctgggcggtgaagcctactgggctggcggactccatctgtatacccccctgccttttaggccaggacagggtggcttcggagagctcttcaggacccacttttttctcaacgccggaaacctgtgtaacttgaactatggcgagggcccaaaggcccatattcggaaactggccgagtgtattaggtggagctacggcgcaggcattgtgctcagactggggaatatagcgcgactggagctaaactactgcgtccctatgggggtgcagactggggataggatttgcgacggagtgcaattcggagccggaattaggtttctgtag

SEQ ID NO: 241949 - DNA, 1425 bp, synthetic construct
  misc_feature 1..1425: note = Description of Artificial Sequence: Synthetic coding sequence
  source 1..1425: mol_type = other DNA
atggccagcggaggaggtggctgctctgcttcagagagactgcctcccccttttccaggccttgagcctgagagcgaaggtgctgcaggcggttcagagcccgaggctggggactcagacactgaaggcgaagacatcttcaccggcgctgccgtggtctccaaacaccagtctcccaagataactacttcactgctgccaattaacaacggatccaaggagaacggaatccacgaagagcaggaccaggaaccgcaggatttgtttgcagacgctacagtggagctgagtttggattctacccagaacaaccagaaaaaagtgctggccaaaaccttgatcagcttgcctcctcaagaggcgactaactcatccaagccgcaacccacatacgaggagctggaggaagaagagcaggaagaccaatttgatctcacagttggcatcacggatccagagaaaatcggagatggtatgaacgcatacgttgcctacaaggtgaccacacagaccagcctcccactgttcagatccaagcagtttgctgtgaagcgaagattcagcgatttcctgggactctacgaaaagctgtcggagaaacatagccagaacggcttcatagttccccctccccctgagaagagcttgattggcatgactaaagtgaaggttggtaaagaggatagttcatctgcagagttcttagagaagagaagagccgctcttgagcggtatctccagcggattgttaatcatcctacaatgttacaggacccagatgtacgggagttcctggagaaggaagaactcccgagggctgtcggtacccagacactgagcggggctggactgttgaaaatgtttaataaggccactgatgcggtctccaaaatgacaattaagatgaacgagtcagacatctggttcgaggaaaagcttcaagaagtcgagtgcgaagaacaaagactgagaaagcttcatgctgtagtggagacgttggtaaaccacaggaaagagctggccttgaatacagcacagttcgccaagagtctggctatgctaggctctagcgaggataatacagcgctgagtcgggctcttagtcagcttgccgaagtggaagaaaagatagagcagttacatcaggagcaggccaataatgatttctttctgctggccgagcttttgtccgattatatacggttactggccattgtgcgttgggagtcccgggtcacccaatacgaaagagacttcgagagaatttccacagtcgttagaaaggaggtgatccggttcgagaaagaaaagtctaaggacttcaagaaccacgtgattaaatatctcgagaccctgctgtattcgcagcagcagcttgccaagtattgggaggcttttcttccagaggctaaggccatttcctag

SEQ ID NO: 241950 - DNA, 1569 bp, synthetic construct
  misc_feature 1..1569: note = Description of Artificial Sequence: Synthetic coding sequence
  source 1..1569: mol_type = other DNA
atggcttccgggggaggaggctgctctgcatccgagcgccttcccccaccattccctggcctggagcctgagtctgaaggagccgctggcggaagtgagcccgaggctggagattccgacacggaaggggaggatatctttacgggtgccgcagtggtgagcaaacaccaatccccaaagattactaccagcctgctgcctattaataatgggtccaaggaaaatggtatacacgaagaacaggatcaggaaccacaggatctgtttgcggatgctaccgtggagctgtcactcgactccacacagaacaaccagaagaaagtgcttgccaaaacacttatttctctgccacctcaggaagccacgaacagcagcaagcctcaacccacctacgaagaattagaagaggaggagcaggaggaccagttcgatttgacagtcgggattaccgacccagagaaaatcggagacggaatgaatgcctatgtggcttacaaggtgacaacgcagacctccctgcctctctttaggtcaaagcagttcgcagtcaagagacgcttttccgactttctggggctgtacgaaaagctctctgagaagcactcccaaaacggattcatcgtgcccccacccccagagaaatccctcatcgggatgacaaaagtaaaggtaggaaaggaggattcttcttcggctgagttcctcgaaaagcggcgagctgccttggaacgatatttgcaacgcatcgtcaatcaccccactatgctacaggaccctgatgtgcgtgaattcctcgaaaaggaggagctgcctcgggctgtggggacccaaacgctgtccggggctggtctgttgaaaatgtttaacaaagcaacagatgccgtaagcaagatgacaattaaaatgaacgagagcgacatatggtttgaggaaaagctccaagaggtggagtgcgaggagcagcgcctgcgtaaactgcacgcagtggtggagactttagtgaatcacaggaaggagttagcactgaataccgcacagttcgctaagtcgctggccatgttgggtagctccgaagataatacagccctgagcagggcactgagccaacttgctgaggtggaggagaagattgaacaactacatcaggaacaggcgaacaatgacttctttctcttagccgagctcttaagcgattacatcaggctgcttgccatcgtgagagccgcatttgaccagcgcatgaaaacctggcagaggtggcaggatgcccaggctactcttcagaagaagcgcgaggccgaagccagactgttatgggcaaacaagccagataagttgcaacaagcgaaggacgagatattggaatgggagtcccgtgtcacgcagtacgagcgcgatttcgagcgcatctcaacggttgtccggaaagaagtcatacgctttgagaaagagaagtctaaggatttcaaaaatcatgtcattaagtacctagaaacactactgtatagtcaacaacagctggccaaatactgggaggccttcttgcctgaagcaaaggccatatcttag

SEQ ID NO: 241951 - DNA, 1374 bp, synthetic construct
  misc_feature 1..1374: note = Description of Artificial Sequence: Synthetic coding sequence
  source 1..1374: mol_type = other DNA
atggctagtggcggtggaggttgctccgcctcagagcggctgccccctccatttccaggtttagaaccagaaagcgaaggagctgcaggcggaagtgaaccggaagccggagattcggatacagagggggaggatatttttacaggagccgcagtggtgagtaagcatcagtcacccaaaataaccacgtccctactgcccattaacaatgggagtaaagagaatggcattcacgaggaacaggaccaggagccacaggacctgtttgctggggacgggatgaacgcgtacgtagcctacaaagtaacgacccagacttccctgccactgttccggtcaaaacaatttgccgttaaacggcgattcagtgatttcctgggcctgtacgagaaacttagtgagaagcatagccagaacggatttatagttcctcctccacctgaaaaaagtttgattgggatgaccaaggtcaaggttggaaaggaggattcttccagcgccgagtttctcgagaagcgtcgagccgctctggaaagatacttacaacgaattgtcaatcaccccacgatgctgcaggatccggatgtgagagagttcctagagaaggaggagctgcccagagccgtgggcacccagaccctgagtggcgcaggcttgctgaagatgtttaataaagccacggacgccgtgtccaagatgacaattaagatgaatgagagcgacatttggttcgaagaaaagctccaggaagtggagtgcgaggagcaaagactccgcaagcttcacgctgtagtggagactctggtgaaccatcgcaaagaactggccttgaatactgcgcagtttgccaaatcattggccatgttgggtagcagcgaagacaatactgccctgagcagagcactgagtcagcttgctgaggtggaggaaaagattgaacagctgcaccaggagcaggcaaacaacgacttctttctcctagctgagctcctctcagactatattagacttttggccattgtgagggctgccttcgaccagcggatgaagacctggcagcgatggcaggacgctcaagccacactgcagaagaagagagaagcggaagcccgacttctctgggctaacaagcctgacaagctgcagcaggcaaaggacgagattctcgaatgggagtcaagagtgactcagtacgagcgggattttgaaagaatctctacggtggttagaaaggaagtgatccggttcgaaaaagagaagtctaaggattttaagaaccacgtcatcaaatacctcgagaccctcctctacagccagcagcaactggctaagtattgggaagcctttctgcctgaggcaaaggccatctcctag

SEQ ID NO: 241952 - DNA, 1374 bp, synthetic construct
  misc_feature 1..1374: note = Description of Artificial Sequence: Synthetic coding sequence
  source 1..1374: mol_type = other DNA
atggcctccgggggagggggatgtagcgccagcgagcgtctacccccaccctttccaggacttgaacctgaatctgagggcgctgccggagggtccgagccagaggccggtgatagcgatacagaaggcgaggacatcttcacaggtgccgctgtggtgagtaagcatcagagccccaagatcactacgagccttctgcctatcaacaatggcagcaaggagaacgggatccacgaagagcaagatcaagagcctcaagatctctttgcgggagatggcatgaatgcctatgtggcttacaaggtaactacacagacttccttgccgttatttaggtccaaacagttcgctgtcaagcggaggttcagcgatttcttgggactgtatgagaagctgtctgaaaaacactcccaaaacggctttatcgtgccacccccaccagaaaagagcctgatcggcatgactaaggtaaaagtgggcaaggaggactcatcctctgcagagttcctcgaaaagcgacgcgcagccctggagcggtatctgcagcgcattgtaaatcaccctacaatgctgcaggaccctgatgtccgcgagtttcttgaaaaagaggagttaccaagggcggttggtacccagactctgtctggcgctgggctcctcaaaatgttcaacaaagcaactgatgccgtgtccaagatgaccattaagatgaatgagtctgacatctggttcgaggaaaagttgcaggaagtagagtgtgaggagcaacgccttcgaaagctgcacgcagtggttgagaccttagtgaaccatcgcaaagaactggctctgaatacagctcagttcgcaaagtctttagccatgcttggttccagtgaagataataccgcactctccagggccctgtcacagctcgccgaggtggaggaaaagattgagcagctgcaccaggagcaagccaataacgattttttccttttagcagagttgctttccgactacatcaggttgctggctatcgtgcgcgcagccttcgaccagcgcatgaaaacgtggcagaggtggcaggacgcccaggctacccttcaaaaaaaaagagaggcagaagctaggctgttgtgggctaataaaccagacaaactgcagcaagccaaagacgagatcctggagtgggagtccagggtaacccagtacgaacgcgattttgaaaggatttcaactgtcgtgcgtaaggaagtgatcagatttgagaaggagaagagtaaggattttaaaaaccacgtcattaagtatcttgaaacgttgctatatagccaacagcagttggcaaaatactgggaggcgttcctgccagaagccaaagcaatatcatag

SEQ ID NO: 241953 - DNA, 3018 bp, synthetic construct
  misc_feature 1..3018: note = Description of Artificial Sequence: Synthetic coding sequence
  source 1..3018: mol_type = other DNA
atggccgctcggccatcccgggctaccggccctagaggaggacagaggagccgagttaaaccacctcccggacgcagattaaaagagcagcttccacccctcgcagctgcccgagccgtgtttgcagcagccaccgccgtgatcatgctcaccgaagcatctctgtccatctgggggtgggggtctttgggcatcgtgttattcctcatcacctttggcccatttgttattttctatctgactttctacatcctttgttttgtgggaggcggactggtcgtgacactgttgttcggtaaaacgaacagcgagaaatacttggaacagtgcgagcattctttcctgcctcctacatccccgggtgtgcccaagtgtctagaagagatgaagagggaggccaggacaatcaagatcgacagaaggctaacaggagcaaacattattgatgagccactccaacaggtaatccagtttagcttaagggattatgtgcaatattggtattatacactatcagacgatgaaagctttctcctcgagatcaggcaaacacttcagaatgccctcatccagtttgcaacccgtagtaaagagatagattggcagccctactttacaactcggatagtggacgacttcgggactcacttgagagtttttcggaaggctcagcagaaaataacagaaaaagatgatcaggttaaagggaccgccgaggacttggtcgatacgttcttcgaggtggaggtggagatggagaaggaggtctgtagagacctggtttgcacatcacccaaagacgaggagggctttctgcgagatctgtgcgaggtcctcctctacctgttgctgcctcccggtgattttcaaaataaaatcatgcgatactttgtgcgcgagatcttagcacgtggcatcctgctgcccctgatcaatcaactaagtgacccggattacattaatcaatacgtgatttggatgatccgagattctaactgcaactatgaggcattcatgaacattatcaagttgagtgataatataggggaactggaagccgtccgggataaagccgctgaggaactacaatatctccgctctctggacactgccggagacgatataaacacaataaagaaccaaattaacagtctgctgttcgtgaagaaggtgtgcgattcccgcatccagcgcctgcaatcaggtaaggagattaacacggtcaagctcgcggcaaatttcggaaagctgtgcacagtacctctcgactccatcctagtcgataacgttgctctgcaatttttcatggattatatgcagcagacaggagggcaagcgcacctcttcttctggatgaccgtggaggggtacagagtaactgcacagcagcagcttgaagttcttcttagcaggcagagggatggtaaacaccagactaatcagaccaagggactgctcagagcagccgctgttgggatctacgagcagtacctgtctgagaaggcctccccccgagtgacagtggacgattaccttgtggcaaaactcgccgacacccttaaccacgaagatcccacgccagaaatcttcgatgatatacaacggaaagtgtacgaactgatgctgcgagacgaaagattctatccttccttccggcagaacgccctgtacgtaaggatgttagctgagttagatatgctcaaggatccatcgttccggggtagcgacgacggggacggcgaatcattcaacggatcccctacaggctctatcaacctctctctggatgatctgtccaatgtatctagtgatgactctgtgcagctccacgcatacatttctgacacaggcgtatgcaacgatcacgggaagacttatgccctttacgccatcaccgtgcacagaagaaatctcaattccgaagagatgtggaaaacttacaggagatacagtgacttccacgatttccacatgcgcatcacggagcaattcgagtctctgtccagcattctcaagctgccaggcaaaaagacattcaataacatggatcgagattttctggagaagaggaagaaggatcttaacgcctatctgcaactccttctggctccggagatgatgaaggcctctcctgctctagcccattacgtgtacgactttctggagaataaagcctattcaaaaggaaaaggcgatttcgccaggaagatggacaccttcgtcaatccccttaggaactcaatgaggaatgtgagcaacgcagttaagtccctaccggactcactcgccgaaggaatgacaaagatgtctgataatatgggtaaaatgtcagagcgactgggacaggatatcaaacagtcattctttaaagtgccaccactcataccgaagactgactccgaccccgagcatcggagagtgagcgctcagctagacgacaacgtcgatgataatattcctcttagagttatgctgttactgatggatgaggtgtttgacctcaaagaaagaaatcagtggctcagaagaaatatcaaaaatctgctgcagcagctgatccgtgcgacctacggggacacaatcaatcgcaagatcgtggatcacgtagactggatgaccagtccagagcaggtagctgactccgtgaagcgattccgcgacgctttctggcctaatgggatccttgcggaggccgtcccgtgtagggataaaagtatacgcatgaggaccagagtcgccggtaaaaccaaactccttgcaattatgcctgatgaattgaaacacatcataggcgctgaaaccactagaaaagggatcttgcgcgtgttcgaaatgtttcagcataatcaactgaacagacggatggtctacgtgttcctggaaggcttcttagagactctgttcccgcaatacaagttccgcgagctcttcaacaaactgcacagccggtctaaacagatgcagaaatacaaacaaaagctgcagaccacgcaggccccttccctgcagaaaagatag

SEQ ID NO: 241954 - DNA, 2874 bp, synthetic construct
  misc_feature 1..2874: note = Description of Artificial Sequence: Synthetic coding sequence
  source 1..2874: mol_type = other DNA
atgctaactgaggcatcgctgtctatttggggctggggcagcctgggcattgtgcttttcctgattacgtttggaccgtttgtcattttttatctcaccttttatatactttgcttcgtgggcggaggcctcgtcgtgacacttctgtttggcaagactaatagcgaaaagtacctggagcaatgtgaacactcattcctgcctcccactagtccaggagtgccaaaatgtctagaggagatgaagagagaggccaggaccataaaaatcgacaggcgcttgaccggggcaaatatcatcgatgaacccctccagcaggtgatccaattctcactgagagactatgtccagtattggtattacacgctttctgatgacgaatcttttcttctggaaatcagacaaacacttcagaacgcactgatccaattcgcaaccagaagcaaggagatcgattggcaaccgtactttactacgcgtatcgtggacgatttcggaacacacttgcgtgtgtttcgaaaggcacaacaaaaaattaccgagaaagacgaccaggtcaaggggacagctgaggacctggttgacacgtttttcgaggtggaagtagagatggaaaaagaagtgtgtcgcgatctagtgtgtaccagtcccaaggatgaagaaggcttcctgcgagatttatgcgaagtgctgctctaccttttactccccccaggtgatttccaaaacaaaataatgagatactttgtgagagagatcctcgccaggggaattctgctgccactgattaaccaactcagcgatccagattatatcaatcagtacgtcatatggatgatccgagatagcaactgcaattatgaggcttttatgaacatcatcaagctcagtgacaacatcggtgagcttgaagccgtccgagacaaggccgctgaggagctgcagtatctgaggtcactggacaccgccggagacgacatcaatactataaaaaatcagattaacagtcttctttttgtgaagaaggtgtgtgacagccggattcaaaggctccagtccggcaaggagataaatactgtgaagctggccgcaaacttcggcaaactgtgtaccgtgccgcttgattccatcctcgtggacaacgtggccctccagttttttatggattacatgcagcagaccggtgggcaggcccaccttttcttctggatgactgtagaagggtatagggtaactgcccaacagcaactggaagtcctcctttcgagacaaagagatggcaagcatcagactaaccaaactaaggggctcctcagagctgctgcagtcggaatttatgaacagtacttgagcgagaaagcctcccctcgggtcacagtggacgattatttggtggcaaagcttgccgatactcttaaccatgaagatcccacacctgagatcttcgacgacattcagagaaaggtttacgaattgatgttgagggatgaaaggttttaccctagtttccggcagaatgctctttatgtgcgcatgctcgcggaattagacatgttgaaagacccttcattcagaggctccgatgatggggacggggagtcattcaacggctcaccgactggatctatcaatctgtcgctggacgatctctccaatgtctcaagcgacgactccgttcaattgcacgcatatatatctgacacaggggtgtgcaatgatcacggtaagacttatgctctctatgctatcaccgtacatcgccgtaatctaaacagcgaagagatgtggaaaacatatcgaaggtatagcgactttcacgactttcatatgagaataaccgagcaattcgagtcgctgagtagtattctaaaacttccgggtaagaaaacattcaataatatggaccgagattttctggaaaagcggaaaaaggacctgaacgcatacctgcagctgctactggcccctgagatgatgaaagcctcacccgctcttgcacattacgtctacgactttttggaaaacaaggcctactctaagggtaagggcgattttgcccgaaaaatggatacgttcgtgaaccctcttaggaattccatgcgcaatgttagtaatgctgtaaaatcccttcctgattctctcgcggaagggatgactaaaatgagtgataatatggggaagatgtccgaacgcctggggcaggatatcaagcagtcgttcttcaaggttcccccacttattcccaaaaccgacagcgaccccgagcacaggagggtttccgcacagctcgatgataatgtggatgacaatattcccttacgcgtgatgctcttgctgatggatgaagtgttcgatctcaaggaaaggaaccaatggcttagacgcaacatcaaaaacttgctccagcaattaattcgagctacctacggggatactattaaccgtaagatcgttgaccatgtagactggatgaccagccccgagcaggtggcggatagcgttaaaagatttcgggacgcgttctggcccaatggaatattggcagaggcagtcccctgtagggataagtccatacgaatgcgaacccgcgtcgccggaaagactaagctgctcgccattatgcccgacgagttgaaacacattatcggagctgagaccacaagaaaaggtatccttagagtgttcgagatgtttcagcataaccagttgaataggcgaatggtgtacgtgttcctggaggggttcctagagaccctgtttccacagtataagttccgagagttgtttaataagctgcactcaaggagcaagcagatgcagaaatacaagcagaaattacagacaacgcaagcacctagcttgcagaaacggtag

SEQ ID NO: 241955 - DNA, 771 bp, synthetic construct
  misc_feature 1..771: note = Description of Artificial Sequence: Synthetic coding sequence
  source 1..771: mol_type = other DNA
atgtcccgccaggcaaaagacgacttcctacggcattacaccgtttccgaccctcgaacccacccgaaaggctacaccgaatacaaggtgactgctcagttcatcagtaagaaagatccagaagatgtcaaagaggtggtagtgtggaagcgttacagcgactttaggaaactgcacggtgatctcgcctatactcatcgcaatctgtttcgtaggttagaagaattccctgcatttcccagagctcaggtcttcggaagatttgaagcctcagtcatagaggaacgcagaaaaggagcggaagatttgttacgcttcaccgtccatatccctgccttaaataattcccctcagctcaaggagttctttagaggtggcgaagtgaccaggccactagaagtgtctcgagacctgcacatcttaccgccacccctgatccctaccccgcctcccgatgatcccaggctgtctcagctgctccccgcagaacggaggggattggaggaacttgaagttcctgtcgatcccccaccctcaagcccggcacaggaggctctcgacttgctcttcaactgcgagtccacggaggaggccagtggcagcccagcgcgaggtccactgacagaggcagagctggcactatttgatccgttctctaaggaaggagatccacttccagcgcgtcaagaaggagtcaagaaaaaggctgcggagtatctgaaaagagccgaggagatcctgcggcttcacctgtcccaactgccaccatag

SEQ ID NO: 241956 - DNA, 1029 bp, synthetic construct
  misc_feature 1..1029: note = Description of Artificial Sequence: Synthetic coding sequence
  source 1..1029: mol_type = other DNA
atgagtcgtcaggccaaggatgatttcttacgccattataccgtgtccgacccgaggacacaccccaaaggttataccgaatacaaggtcacagcccaattcatttctaaaaaagatcctgaggacgtcaaagaggtggttgtctggaaacgatactctgacttccgaaagttgcatggcgatttagcttacactcatcggaatcttttccgcaggctggaggagttcccagcattccctcgtgcccaagtcttcggaaggttcgaggcttctgtgattgaggaacggagaaagggcgctgaggaccttctgaggttcaccgttcacattcccgctctgaataacagcccacagctcaaagagttcttcagggggggagaggtgacacgtccactggaggtctctcgggacttgcacattttaccccctcctctaatccctactcccccacccgacgaccctcggctctcccagctattgcctgccgagaggagggggctcgaagagctggaagtaccagtggaccctccgccaagctccccggcacaggaggcactcgacttactgtttaattgcgagtccaccgaggaagcctccgggtcgccagccagaggacctctcactgaagccgagctggcccttttcgatcctttctcaaaagaagagggggctgcgccatctccaacacatgtggccgagctggccactatggaagttgaatcagccagattggatcaggagccctgggagccaggaggacaggaggaagaggaagatggtgaggggggtccgactccggcttacctgagtcaagccaccgagcttatcactcaggccctccgcgacgagaaggccggagcctacgcggcagcgctccaagggtaccgagacggggttcacgtcctgttacagggcgtgcccagtgaccctttacccgcacggcaggagggagtgaaaaaaaaagcagcggaataccttaagcgggctgaggaaatcttgagacttcatctgagccaactgccaccctag

SEQ ID NO: 241957 - DNA, 1608 bp, synthetic construct
  misc_feature 1..1608: note = Description of Artificial Sequence: Synthetic coding sequence
  source 1..1608: mol_type = other DNA
atgtctgagggagagtctcagaccgtattgagtagtggatccgaccccaaggttgaatcatctagctctgctcccggactcaccagtgtctcccctccagtgactagcactacgtccgccgctagccccgaggaggaggaggagtccgaggatgagtccgaaattctcgaggagagtccttgcgggcgttggcagaagcgacgggaggaggtcaatcagcgaaacgtccctggtattgactccgcatatctggctatggatactgaggagggtgtagaggtggtgtggaatgaagtgcaattctccgaaagaaaaaactataaactccaagaagagaaggtaagggcagtctttgataatctcatacaactggagcacttgaacattgtcaagttccacaagtattgggccgatatcaaggagaataaggcaagggtgatcttcatcaccgagtacatgtctagcgggtccctgaaacaatttctcaaaaagaccaagaaaaatcacaagacaatgaacgagaaagcttggaaacgctggtgtactcagattttgtctgccctgtcctacctgcacagttgcgaccctccaataatacacgggaatctcacctgcgacaccatattcatccagcataatgggctgattaagattggcagtgtagccccagacaccattaacaatcacgttaagacttgtagggaggagcaaaaaaatcttcacttttttgcaccagagtacggagaagttacaaatgtaaccactgcagtagatatttactccttcggcatgtgtgccctcgagatggccgtgttagagatccagggaaatggcgaaagctcttacgtcccacaggaagccatcagtagcgctattcagctcctcgaagatcccctccaacgcgaattcattcagaagtgtctgcagtcagaacccgctagaaggccaacggctcgagagctgctcttccaccctgcactttttgaagttccaagtctcaagctgctcgccgcacattgtattgtcggtcaccagcatatgattcccgagaacgccctggaagagatcaccaagaatatggacacctctgcggttctcgcagagattcccgcaggaccagggagggaaccagtacaaacattgtactcacaaagcccagccctcgaattggacaaatttctggaggatgtgagaaacgggatctaccccctgactgcctttggactcccaagacctcagcagccgcagcaggaagaggttactagtcccgtggtgccgccttccgtgaagacccccacgccagagcccgcagaagtggagacaagaaaggtggtattaatgcagtgtaacatagagagcgtggaggaaggcgtgaaacatcatctgacactgctcctcaaactggaggacaaattaaatcgacatctctcttgcgatcttatgcctaatgaaaacattcctgagttggctgcggagctcgtacagctcgggttcatatcggaggctgatcagtcgagactcacatccctgcttgaagagacacttaacaaatttaatttcgctcgtaactctaccctcaatagcgccgctgtgacagtgtctagttag

SEQ ID NO: 241958 - DNA, 1338 bp, synthetic construct
  misc_feature 1..1338: note = Description of Artificial Sequence: Synthetic coding sequence
  source 1..1338: mol_type = other DNA
atgcatttctcaatcccagaaacagagtccagatccggagattccggaggatcagcctacgttctaaggaaagaatatggagcaaatgttcttccggcattcccaccgaagaagctgttttctttaacaccagcagaggtggaacagcgtagggagcaactagagaagtacatgcaggcagtacgtcaagaccccctgttggggtcaagcgaaacattcaatagctttctgagacgggctcagcaagagacccagcaagtgcctaccgaggaagtatccttggaggtcctgctctcgaacggtcaaaaagtcctggtgaatgtgctcactagcgaccaaacagaagatgtgctcgaggctgttgccgctaagctggatcttcccgacgacctcatcggatatttttcactgttcctggtgagagaaaaggaagacggggcttttagctttgtgcgcaaactccaggagttcgagctgccatacgtcagcgtgaccagcctgcgcagccaggaatacaagatcgtgctcagaaagtcgtactgggattcagcttacgacgatgacgttatggagaaccgcgtgggcctgaatctactgtacgcacaaacagtcagcgacatcgagaggggatggattctggtaactaaagagcagcatagacagctgaaaagcctgcaggaaaaagtaagtaagaaggagttccttcgccttgcccagactcttcggcactacggctatctgaggttcgacgcctgtgtggctgactttcctgaaaaggattgtccagtggtggtgtctgctggcaatagtgagctttccctacagctgcgcctgcccggacagcagcttagggagggctcctttcgcgtaaccagaatgcgctgttggagggtgacatcaagtgtcccactccctagtggctcaaccagctcacccggaagaggccgtggcgaggtgcggctggaactcgcgttcgaatatctgatgtcaaaggaccgcttacagtgggttacaatcacgagtccgcaggctataatgatgagcatttgcttgcagagcatggtagatgaactgatggtcaaaaagtccggcggatcaatcaggaagatgctcagacggagagttggaggaactctgcgcagaagcgatagccagcaggccgtgaaaagcccccctctgctggagtccccagacgcaaccagggagtcgatggttaagctgagcagcaagctgagcgccgtctctctgagaggcattggtagcccttcgacagatgcctccgcttcagacgtccacggcaactttgcattcgagggaattggagacgaggacttatag

SEQ ID NO: 241959 - DNA, 771 bp, synthetic construct
  misc_feature 1..771: note = Description of Artificial Sequence: Synthetic coding sequence
  source 1..771: mol_type = other DNA
atggagaatagagtcggcctcaatctgctttacgcccaaacggtgtccgatatcgagaggggctggatcctcgtcaccaaagaacaacacagacagcttaagagtctccaggagaaagtttctaagaaggaattccttcggctcgcccaaactctgcgacattacggctacttaagattcgacgcgtgtgtggccgacttccctgaaaaagactgccccgtcgtcgtttcagcgggaaactccgaactctctcttcagttgcggcttcctggacagcagcttagagagggcagttttcgtgtgacgcggatgcggtgctggagggtgactagtagcgtgccccttccctctggctccacttcatctccaggacgcggaagaggggaggtgcgattagagctcgcatttgagtatctgatgtctaaggatcgccttcagtgggtgaccatcacttccccgcaggctataatgatgtccatttgccttcagtctatggtggatgagctgatggtgaagaaatcggggggatcaatacggaaaatgctgaggcgccgagtgggtggtaccctgagaaggagtgattcgcaacaggccgtgaaaagcccccctcttctggaaagtccagatgcaacacgggagtcaatggtgaagcttagctcgaagctttctgccgtcagtctcaggggcattgggtccccaagtactgacgcctctgctagtgacgtccatgggaattttgcgttcgagggcatcggcgatgaagacctgtag

SEQ ID NO: 241960 - DNA, 771 bp, synthetic construct
  misc_feature 1..771: note = Description of Artificial Sequence: Synthetic coding sequence
  source 1..771: mol_type = other DNA
atggagaatcgcgttggcctcaacctgctgtatgcacagacagtgtccgacatagaacgcggatggattctggtgaccaaagagcagcatcgccagctcaagtccctgcaggaaaaagtgtccaagaaggagttcttgcgactcgcgcagacccttaggcattacggatatttgcgcttcgacgcctgcgtggcagacttccctgaaaaggattgtccagtcgtggtttctgccggtaattccgaactgtctctgcagctgagactccctggtcagcagctgcgcgaagggagcttccgagtgacaagaatgcggtgttggagggtgacctcctccgtccctcttcccagcgggtctaccagcagtcccggacgcggaaggggcgaggtgcgcctggaactggccttcgagtacttgatgtcaaaggatcgcctgcagtgggtcactatcacctcacctcaagccatcatgatgagtatttgtttgcaaagcatggtcgacgagcttatggtgaagaagtctgggggatcaattagaaagatgttaagaaggagggtcggtgggactctccggaggagcgatagtcaacaggccgtcaagagcccaccattgctagagtcacctgatgcaactagagagtcaatggtaaagctcagcagtaaactcagcgctgtgagtttgcggggtataggatctcctagcactgatgctagcgccagcgacgtccacggaaactttgcatttgagggcatcggggacgaggacctgtag

SEQ ID NO: 241961 - DNA, 1560 bp, synthetic construct
  misc_feature 1..1560: note = Description of Artificial Sequence: Synthetic coding sequence
  source 1..1560: mol_type = other DNA
atggcagcggagagagaacccccaccactgggggatggcaagcccactgacttcgaggatcttgaagacggagaggatctctttacaagcacggtgtctaccttggaaagctccccctcatcccctgaacccgctagcctccctgcagaggacatctcagcaaacagtaacggcccaaagccaaccgaggtggttctcgacgatgaccgggaggatctttttgcagaagccactgaagaggtgtcgctcgacagccccgaacgtgaaccgatcttgtcctccgagccatcacccgctgtgacaccagtgacccccaccaccctaatcgcgccacggatagagagcaagagtatgtccgcaccagtgatttttgaccgctcgcgcgaagagatcgaggaggaagctaatggcgacatttttgatatcgaaatcggtgtttcagacccagaaaaagtgggcgacggaatgaatgcttatatggcctatagagtaaccacgaagacgtctctgtctatgttttctaagtcagagttctcagtcaagcgcaggttcagtgactttttagggctacactccaaacttgcttctaaatatctgcacgttggctacatcgtgcctccagcacctgagaaaagtatcgtcggtatgactaaggtgaaggtggggaaggaagactccagttcaacggagttcgtggagaagcgaagagccgcactggaacgttaccttcaacgtaccgtaaagcaccccacgctgttgcaggaccccgatcttagacaattccttgaaagctctgagctcccaagggccgtgaacacacaagcgctttcaggtgcaggaatattgcgcatggtgaataaggctgctgacgctgtgaacaaaatgactattaaaatgaatgaatctgatgcatggttcgaagagaaacaacagcagtttgagaacctcgatcagcaactgagaaagctacatgtgtctgtggaggcgcttgtgtgccatcgaaaggagctctcggccaacactgctgcttttgccaagtcggcagctatgctgggaaattccgaggatcacaccgctcttagccgggctttgtcacagttggcggaggtcgaagaaaagattgatcaactgcatcaagagcaggccttcgcggatttttatatgttttcggaactgttaagcgactacattcggctgatcgcggctgttaaaggggttttcgaccacagaatgaagtgctggcaaaaatgggaagacgcacaaattaccttgttgaagaagagagaggccgaggcaaaaatgatggtggccaataagcccgacaagatccagcaagcaaaaaacgagatcagggagtgggaggcaaaagttcagcagggcgagagagatttcgagcagatttccaaaaccattcgtaaagaggtgggtcgtttcgagaaagagcgtgtgaaggatttcaagactgtgatcatcaagtatcttgaatccctggtacagactcagcaacagcttatcaagtactgggaggctttcttacccgaagccaaagccatagcctag

SEQ ID NO: 241962 - DNA, 390 bp, synthetic construct
  misc_feature 1..390: note = Description of Artificial Sequence: Synthetic coding sequence
  source 1..390: mol_type = other DNA
atggccagcccagagcaccctggctcaccaggatgtatggggccaatcacccaatgtacggccagaactcagcaagaagcacctgccaccggtcctgatctgcctcaccccggaccggacggccacttggacacgcattcgggactgagttctaactctagtatgactacccgtgagttgcagcagtactggcagaatcagaaatgtaggtggaagcatgtgaagctccttttcgaaattgcatcggctcggattgaagagagaaaggttagtaagttcgtcatgggcaagtcccgccctggcgagatgacctatcccggatccaggggagaaacagggacggccccagaaccagatcccaggtgccctcgtcagtccgacatgctgtag

SEQ ID NO: 241963 - DNA, 951 bp, synthetic construct
  misc_feature 1..951: note = Description of Artificial Sequence: Synthetic coding sequence
  source 1..951: mol_type = other DNA
atggcttcacccgagcaccctgggtcacccggatgcatggggccaatcactcagtgtaccgcacgaacccagcaggaggcgcctgccaccggcccagatctcccgcatcccggaccagatggccacctcgatacgcattcaggactatctagtaattcatcaatgactaccagagaacttcagcaatactggcagaatcagaaatgcaggtggaaacatgtgaaattactctttgaaatcgcctccgctaggatcgaggaacggaaggtgtccaagttcgtagtctaccagatcatcgttatccaaacaggatcattcgacaacaataaggcagtgctagagcgaagatactctgattttgcaaagctgcagaaagcacttttgaagactttccgcgaggagatcgaagacgtcgagttccccaggaagcacctgactggaaattttgccgaagagatgatctgcgaacgaagacgcgctctccaggagtatctcggcctcttgtacgctatccgatgcgtgcgcaggtctcgggagtttctggacttccttacccgcccagagctcagagaagcattcggttgtctgagggccggacagtaccccagggcattggaactgttgctccgcgtactccccctacaggaaaagctaacagctcactgccccgctgctgccgttcccgcactgtgcgccgtgctgctgtgccaccgcgacctggatcgccctgctgaggcttttgccgctggcgaaagggcactgcagagactgcaagctcgcgaaggccacaggtattacgctcctctgctcgatgcaatggtgaggctggcctacgcactcggtaaggactttgtgacgttgcaggagaggctcgaagaaagccagctgcgacgtccaacacccagggggattactttgaaggaactcactgttagggaatacctgcactag

SEQ ID NO: 241964 - DNA, 459 bp, synthetic construct
  misc_feature 1..459: note = Description of Artificial Sequence: Synthetic coding sequence
  source 1..459: mol_type = other DNA
atggcttcgccagaacacccaggctcaccaggctgcatgggcccaattacacagtgtacagcacgcactcagcaggaggctcccgctactggtcctgatctccctcatcctgggcctgacggtcatctggacacccacagtggcctctcttctaactccagcatgaccaccagagagttacagcaatattggcagaaccaaaagtgtagatggaagcacgtgaaactcttgttcgagattgcttcagcacgaattgaggagcggaaggtcagtaagtttgtggtgtatcaaataatcgtgatccagacgggatccttcgataacaataaagctgtgttggagcggagatatagtgacttcgttaccctgcaggagagacttgaagagtcacagcttagacggcctacacccagagggatcactctgaaagaactgaccgtccgggagtatctgcattag

SEQ ID NO: 241965 - DNA, 309 bp, synthetic construct
  misc_feature 1..309: note = Description of Artificial Sequence: Synthetic coding sequence
  source 1..309: mol_type = other DNA
atggcatcaccagagcatcccggaagccccggttgcatggggccaatcacccagtgcaccgcaaggacacagcaggaggcccctgcaacagggccagacttgcctcaccccggaccagacggccaccttgacacacactccggattgtctagcaattcttctatgactaccagagagctccagcaatattggcagaatcagaaatgccgatggaaacacgtcaagctgctcttcgaaatagcttccgcgaggattgaggaacgcaaggtgtctaagttcgttgcccctgcccctgatgccaccccttag

SEQ ID NO: 241966 - DNA, 807 bp, synthetic construct
  misc_feature 1..807: note = Description of Artificial Sequence: Synthetic coding sequence
  source 1..807: mol_type = other DNA
atgcagcagattcgccctcctttcattcggggtccccctcaccatgcatcgaatcctaactccccactgtccaatccaatgttacctggtattggcccacccccaggtggtccgaggaatctggggccaacgtccagtccaatgcatagacccatgctttctcctcacatccatcctccttcaacgccaactatgcctgggaatcctccaggactgcttccacccccacccccaggcgctcccctgcccagtctcccttttcctccggtaagtatgatgccgaacggcccaatgccggtcccacagatgatgaacttcgggctcccatcccttgccccactggtcccaccaccaactctccttgtgccctaccccgttattgtgcctctgcctgttcccattcccatcccaattccaattcctcatgtgagtgattcaaagccacccaagaagctgttgtcccccgaggagcctgcagtgtctgagttggaatccgtcaaggagaataattgcgcatccaattgccatctcgatggggaggccgcaaagaagctcatgggcgaggaggccctggccggtggagacaaaagtgatccaaatcttaacaacccggcagacgaggatcacgcctatgccttaagaatgctcccgaagacgggttgcgtcatacagccggtccctaaacctgccgaaaaggcagcaatggcgccttgtatcatcagctcccccatgctgagcgctgggcctgaagacttagagccccctctgaaacggaggtgcttacggattaggaaccagaataagtag

SEQ ID NO: 241967 - DNA, 423 bp, synthetic construct
  misc_feature 1..423: note = Description of Artificial Sequence: Synthetic coding sequence
  source 1..423: mol_type = other DNA
atggccgagactgtggccgacacccggagactgattaccaagccacagaatctgaacgacgcctacggccctccaagtaattttttggaaatagacactaatctaccaatttttaagctcaaagaaagcactgtgcgcagaagatactcagactttgagtggctgcgttccgaactagagagggagtctaaggttgtcgtgcctcctctgcccggtaaggcgttcttgagacagctcccttttcgcggagatgacggtatctttgatgacaactttatcgaggagcgcaagcagggtctcgagcagtttattaataaggtcgccggacatcctctggcccagaacgaacgatgtctccatatgtttctgcaagacgagatcatagataaatcttataccccgagcaaaattaggcatgcttag

SEQ ID NO: 241968 - DNA, 342 bp, synthetic construct
  misc_feature 1..342: note = Description of Artificial Sequence: Synthetic coding sequence
  source 1..342: mol_type = other DNA
atggctgaaacggtcgctgacactcggaggttaataactaaaccgcagaatctgaacgacgcatacggcccaccgtcaaatttcctagaaatagatgtgagcaatccccaaaccgtcggtgttgggaggggacgatttaccacctacgagattagggtgaaaacaaaccttccgatattcaaactaaaagaatccactgtaagacggagatattcagactttgaatggttgcggagtgagcttgagcgtgagtctaaaccctgtctgcgcatgacctcagaagcaagatcacacgggagaacatggtgtgctcagaatgatgaaaagctgttctgcgattag

SEQ ID NO: 241969 - DNA, 393 bp, synthetic construct
  misc_feature 1..393: note = Description of Artificial Sequence: Synthetic coding sequence
  source 1..393: mol_type = other DNA
atggccgagactgttgcggacacccgaaggctaataaccaagccccagaacttaaatgacgcgtatggaccaccctcaaacttccttgagattgatgtgtctaacccacagactgtaggagtcggccgaggaagatttacgacctacgaaataagggtgaaagttgtcgtgcctccactgcccggaaaggctttcttgcggcagctgccctttagaggggatgatggaatcttcgatgacaattttatagaagaaagaaaacagggcctggaacagtttatcaataaagtggccggtcacccactggcccagaatgagagatgcctgcacatgtttctccaggacgaaattatcgacaaatcctacactccctctaagatccgacacgcttag

SEQ ID NO: 241970 - DNA, 1353 bp, synthetic construct
  misc_feature 1..1353: note = Description of Artificial Sequence: Synthetic coding sequence
  source 1..1353: mol_type = other DNA
atggaacaggcgcctcctgacccggagagacagctgcaacccgcacctcttgagcccttgggcagccctgacgccggactcggagccgcagtggggaaggaggctgagggagctggggaagaatctagtggtgtcgacaccatgacccataacaatttttggctgaaaaagattgagatctcggtaagcgaggcggagaaacgcacgggacggaacgcaatgaacatgcaagaaacatacaccgcctacctgattgaaacgcggtccgtggaacacacagacggacagtctgtgctgactgattctctctggcggaggtatagtgaatttgagttactgcgctcatatctgttggtatattacccacatatcgtcgtgccaccactgcccgagaagcgtgctgagtttgtatggcataagttaagcgccgacaatatggaccctgactttgtcgagcgaagacggatcggactcgaaaatttcctccttcgcattgcctcccaccctatcctgtgccgagacaaaatcttctacctgttcctgacacaggagggcaactggaaggaaaccgtgaatgagacgggcttccagctcaaagctgatagccgcttaaaagctttaaacgcaactttccgggtaaagaatcccgacaagagattcacagacctgaaacactattctgacgaattacagtctgttatctcccatctcctgcgtgtgagggcacgggtcgccgaccgactgtacggagtgtacaaggtgcacggtaattatgggagagtgttctccgagtggagcgctatcgagaaggagatgggtgatgggctgcagtccgctggccaccatatggacgtctacgccagcagcatagacgacatccttgaggatgaagaacactacgccgaccagctgaaggaatatttattctatgctgaggcactgagggccgtctgccgcaaacacgagcttatgcagtacgacctcgagatggctgctcaggatctggcgtcaaagaaacagcaatgtgaggagcttgttacaggtacagtcagaacattctcactcaagggaatgactaccaagttgtttggccaggagactcctgaacagagggaagccaggataaaagtgctcgaggaacagatcaacgagggcgagcagcagctcaaatctaaaaacctggaaggaagggagttcgtgaagaacgcctgggccgacatagagagattcaaagaacaaaagaaccgagacttaaaagaggctttaatcagctacgccgtaatgcaaatcagcatgtgcaaaaagggtatacaggtctggactaacgccaaagagtgcttctccaaaatgtag

SEQ ID NO: 241971 - DNA, 918 bp, synthetic construct
  misc_feature 1..918: note = Description of Artificial Sequence: Synthetic coding sequence
  source 1..918: mol_type = other DNA
atggaccccgactttgtggaacggcgtagaataggcttggagaatttccttctgagaattgcttcccaccctattctctgccgggacaagattttctacctcttcctgactcaggagggcaactggaaggaaaccgtcaacgaaacagggttccagctgaaggcagacagcagactgaaggcacttaacgctaccttccgtgtgaagaacccagataagaggtttacagacctaaagcattactcagatgagttacagtccgtgatctctcatttgctaagggtgcgggctcgggtggcagatcggctgtacggggtgtacaaggttcacggcaattacggcagagtctttagcgagtggagtgcgatcgagaaagagatgggggatggcttgcagagcgctggacatcacatggacgtctatgcctccagtattgacgatatcctggaagacgaggagcattatgccgatcagctgaaagagtatctattctatgcggaggcacttcgcgcagtgtgtaggaaacacgagcttatgcaatacgacctggagatggccgcacaggacctggcaagcaagaaacagcagtgtgaggagctggtaactggcaccgtgcgaaccttcagcctgaaaggaatgacaacaaagttgtttggccaagagactcccgagcagagagaagccagaataaaggtgctggaagaacagattaacgaaggggaacagcagctcaaaagcaagaatcttgagggcagagaatttgttaagaatgcatgggcagacatagagaggtttaaagaacagaagaaccgcgatctgaaggaagccctcatctcttacgccgtgatgcagatttccatgtgcaagaaaggcatccaggtttggacaaacgcaaaggaatgcttttcaaaaatgtag

SEQ ID NO: 241972 - DNA, 1215 bp, synthetic construct
  misc_feature 1..1215: note = Description of Artificial Sequence: Synthetic coding sequence
  source 1..1215: mol_type = other DNA
atggcagccgtcccagagctgttgcagcagcaagaggaggacaggtcgaagttgcgatcggtgtcagtcgatttaaatgttgacccatctctccagatcgacataccggacgccctgtccgagcgcgacaaggttaagttcacagttcacactaaaaccactctgcctacatttcagagtcccgagtttagtgttacgcggcagcatgaagacttcgtgtggctacacgataccctgatcgaaaccacagactatgccggactgattataccaccagccccaacaaaacccgacttcgacggcccacgagaaaaaatgcagaaactaggagagggggaaggatctatgacaaaagaggagtttgccaagatgaaacaggagcttgaggctgagtatctggccgtgtttaaaaaaaccgtcagctcccacgaagtgttcctgcagaggctgtccagccacccggtgctatccaaagacaggaacttccacgtgtttttggagtacgatcaggatctttctgtccggaggaagaatactaaggagatgttcggaggcttctttaaaagtgtggtgaagtcagctgacgaagtgctgttcacgggggtgaaagaggtggacgattttttcgaacaagaaaagaactttctgattaactactacaatcgcattaaagattcatgcgtcaaggccgataagatgacccgctcccacaaaaatgtggctgatgactacattcacaccgcggcttgcctacacagcctggccctagaggaacctaccgtgataaagaagtacctcctgaaagttgcggagctgttcgaaaagctgagaaaagtcgaaggacgggtctcttctgacgaagatctcaagctgactgagctcctgcgttactatatgctgaatattgaggctgcaaaggatctgctttaccgcaggactaaagcgctcatcgattacgaaaacagcaacaaggccttggacaaagccaggctgaaatccaaagacgtgaaactcgccgaggcgcaccagcaagagtgttgtcagaaattcgagcagctgagtgaatccgccaaggaggaactcataaattttaagaggaagagagtcgccgctttccggaagaacctcattgagatgtcagaactggagataaagcacgctcggaacaacgtgagtctgctgcagtcctgcattgatctgtttaaaaataattag

SEQ ID NO: 241973 - DNA, 1215 bp, synthetic construct
  misc_feature 1..1215: note = Description of Artificial Sequence: Synthetic coding sequence
  source 1..1215: mol_type = other DNA
atggccgctgttcccgaattgctccaacaacaggaggaagaccgttctaaactgcggagcgtgtcagtcgatctgaacgtggatccttcactgcaaatcgatattccggacgccctgagcgaaagggataaagtcaagtttaccgtgcacacaaaaaccaccttaccaacattccagtcccccgagttttcagtgacccgacagcacgaggacttcgtttggctccatgataccctgattgaaaccaccgattacgctggtctgattataccacctgcgccaacgaaacccgattttgacggtcccagagaaaagatgcagaagctaggagaaggggaaggctctatgacgaaggaggaattcgccaagatgaagcaggagcttgaagctgagtatctggccgtttttaaaaaaacagtcagcagccacgaggtctttctgcagcggttgtcctcacacccagtgctgtctaaggatagaaattttcacgtcttcttggaatatgatcaggacctctccgtgcggaggaaaaacacgaaggaaatgttcggtggatttttcaagtctgtggtgaagagcgctgacgaggtcctgttcaccggcgttaaagaagtagacgatttcttcgaacaggaaaagaatttcctgatcaattattacaatcgaataaaggacagttgcgttaaggcagacaaaatgaccagaagtcacaagaatgtggcagatgattatattcacacagctgcctgtctgcacagtctggccctcgaagaaccaacagtgatcaagaagtaccttctcaaggtggccgagttgtttgaaaaactcagaaaggtggaaggacgcgtctcctctgatgaggacttaaagctgacggagctcctgagatattatatgttaaatatcgaagccgctaaggatctgctgtaccgacggacaaaggcccttattgactacgaaaatagcaataaggccttggataaggcgaggttgaagagcaaggacgtcaagcttgcggaggcccaccaacaggagtgttgtcagaagtttgaacagctatccgagagtgctaaggaggagctcataaacttcaagcggaaaagagttgccgctttcaggaagaacctcatcgagatgtctgagctggagattaagcacgcacggaacaacgtgagtcttttgcaatcgtgtattgatttatttaagaataattag

SEQ ID NO: 241974 - DNA, 687 bp, synthetic construct
  misc_feature 1..687: note = Description of Artificial Sequence: Synthetic coding sequence
  source 1..687: mol_type = other DNA
atggcagccgtccctgagttgctccagcagcaggaggaggatagatcaaaaactactctgcctacatttcagtctcctgaattttccgtcacgaggcaacacgaagatttcgtctggctgcatgacaccttaattgagactacggattacgcaggactaatcataccgccagccccaactaaacccgacttcgatggcccacgcgagaagatgcagaagctgggcgagggtgaaggaagtatgactaaggaagaatttgccaaaatgaagcaagaactggaggccgaatacttggcagtgtttaagaaaactgtgtcttcccatgaagtttttctccaacgcctctccagccacccggtgctatcaaaggatcgaaacttccatgtgtttctcgaatacgaccaggacctttctgtgcggaggaaaaatacaaaggaaatgttcggtggcttcttcaaaagcgtggtgaagagtgccgacgaagtgttatttacaggggttaaggaagtcgatgattttttcgagcaagagaagaacttcctcattaactactacaaccggatcaaggacagctgcgtcaaagccgacaaaatgacacgctctcataaaaatgtcgccgacgactatattcatactgctgcgtgtctgcacagcttggccctggaggagcccactgttataaaatag

SEQ ID NO: 241975 - DNA, 810 bp, synthetic construct
  misc_feature 1..810: note = Description of Artificial Sequence: Synthetic coding sequence
  source 1..810: mol_type = other DNA
atggccgcagtgcctgaactgctccagcagcaggaggaagaccgttccaagttgcgcagcgtctcagtcgacctgaacgtagaccccagccttcagattgatattcctgatgctctttcggaaagggataaggtgaaatttaccgtccatacaaagatcccacctgcgccaaccaagccagacttcgacggccctcgcgagaaaatgcagaagctgggcgaaggcgaagggagcatgactaaagaggagttcgcgaagatgaaacaggagctggaggctgaatacctcgccgtctttaaaaagacagtgagctcacacgaggtcttcctccagcgactgtcaagtcatcctgtgctgagtaaggacaggaatttccacgtatttctagaatacgatcaagacctctccgtgaggagaaaaaatactaaggagatgtttgggggtttcttcaagtctgtcgtcaagagcgccgacgaagtcctgttcacaggagtcaaagaggtggatgacttcttcgagcaggagaagaattttctgattaactattataacaggattaaagattcctgcgtgaaggcagacaagatgaccaggagtcacaaaaatgtcgcagacgactacatccataccgccgcttgtttgcattcactagcattagaagagccaaccgttattaaaaaatacctgttgaaagtggctgagctgtttgaaaaactgagaaaggtggaggggcgtgtgagctctgacgaagatctgaagctgacagaattgctgcggtattatatgttaaatatcgaggcagcaaagtag

SEQ ID NO: 241976 - DNA, 885 bp, synthetic construct
  misc_feature 1..885: note = Description of Artificial Sequence: Synthetic coding sequence
  source 1..885: mol_type = other DNA
atgacaaccctgacagagattaagctactcccgtctctggtcctcctggtttgttgcgagtacctggcaatctttaaaaagacagtggccatgcacgaagtgttcctctgtcgggttgcggctcatcccattctgaggagagatttgaacttccacgtgttcctggaatataaccaggaccttagtgtgagaggtaagaacaaaaaggagaagttggaggactttttcaaaaacatggtcaaaagcgccgatggcgtgatcgtaagcggggtgaaagatgtagatgacttttttgaacacgagcgtactttccttcttgagtaccataaccgggtcaaggacgcctccgctaagtccgaccgtatgacccgctcccacaaatcagctgcagatgattacaaccggatcggcagctctctgtatgcactcggaacccaggacagtacagatatctgtaagttttttttaaaggtttccgagctattcgacaaaacgcgcaaaattgaggctagggtgtcggctgacgaggatctgaagctctccgacctcctgaagtactatttgcgggaaagtcaagccgcaaaggacctgctttatagacgctctaggagcctggtggactatgagaatgctaacaaagccctggataaagcgagagcgaaaaacaaggatgtgctccaggccgaaaccagccagcagctgtgctgccagaaattcgagaagatttctgagagtgccaaacaggagttgatagattttaagacgagacgcgtcgccgcatttaggaagaatctggtggagctcgctgaacttgagcttaagcatgcaaaggggaatctgcagctgctccaaaactgcttagccgtgctgaatggtgatacatag

SEQ ID NO: 241977 - DNA, 1257 bp, synthetic construct
  misc_feature 1..1257: note = Description of Artificial Sequence: Synthetic coding sequence
  source 1..1257: mol_type = other DNA
atgagagcctgtgccggaccacgcctgggggctgccatgatggaaggcctggacgacgggccagacttcctctcagaggaagaccgtggcttgaaagcaatcaacgtggatctgcagtctgacgccgctctacaggtggacatttcagatgccttaagcgaacgagacaaagttaagttcactgtgcacaccaagtcctccctgcccaatttcaagcagaatgagttttcagtagtgcgccagcatgaagaattcatctggctgcatgacagcttcgtggaaaacgaggattacgccggatacattatccccccagcccctccccgacccgactttgacgccagtagggagaagctccagaagctgggtgagggagagggcagcatgaccaaggaggaattcaccaaaatgaagcaggagctggaagcagaatatttggctatcttcaaaaaaaccgttgcgatgcacgaggtattcctgtgcagggtggctgcccatccaatcctgagacgggaccttaacttccatgtcttcctcgaatacaatcaggacctcagtgtcaggggtaaaaataagaaagaaaagttggaagatttctttaagaatatggttaagagcgccgacggcgtgatcgttagcggggtaaaagacgtggacgacttctttgaacacgagaggacgttcctcctggagtaccataatcgggtgaaggatgcttctgcaaagtccgatagaatgacccgtagccataaatccgccgctgatgactacaatagaataggaagcagtctatatgctttggggacccaggattctacggacatctgtaagttctttctcaaagtgtcggaactattcgataagacccgtaagatcgaagccagagtatcagctgacgaggacctaaagctatctgacttgttgaagtattatttgcgggaaagccaggcagccaaggatctcctctaccggcgttcccgttctctggtagattacgagaacgctaacaaagcactcgataaggccagagcaaaaaataaggacgtgctgcaggcagagacatcccagcagctctgctgccagaaatttgaaaagatatctgagagcgcaaaacaggagctgatagactttaaaacccggagagtcgctgcctttaggaaaaatctagtggagttggccgagctcgagctgaaacacgctaagggaaatctccagctccttcagaactgtctggcggtgttgaatggagatacctag

SEQ ID NO: 241978 - DNA, 873 bp, synthetic construct
  misc_feature 1..873: note = Description of Artificial Sequence: Synthetic coding sequence
  source 1..873: mol_type = other DNA
atgaccaaggaggaatttaccaagatgaagcaggagctggaggctgagtacctagcaatctttaagaaaacagtcgctatgcatgaggtgttcctctgtagagtggccgcacatcccattctgagaagagacctgaattttcacgtgttcttggagtacaaccaggatctttctgtgagaggtaaaaataagaaggaaaagctggaggacttcttcaagaacatggtgaaatccgcggacggggtgatcgtgtccggggtcaaggacgtcgatgactttttcgagcacgagcgcaccttcctgcttgagtaccacaatagagtcaaagatgctagtgccaagtctgaccggatgactagaagtcacaagagtgccgcagacgactacaacaggatcggctcaagtctgtatgccctgggcacacaggacagtaccgacatctgcaaatttttcttgaaagtgtcagaattgttcgataagacaaggaagatcgaggccagggtgtcagcggacgaggatttgaaactctctgatctgctcaaatactacctgcgcgaatctcaggccgctaaggacctcctgtatcggcgaagccgatcgctggttgactacgaaaatgcaaacaaggccttagataaagctagagctaagaacaaggacgtgcttcaggccgaaaccagccagcagctctgctgtcagaagttcgagaagataagtgagtctgctaagcaagagttgatcgacttcaagacaagacgcgtggcagcctttcgaaagaacttagttgagctggccgaactcgaattgaaacatgcgaaggggaacctgcagcttttgcaaaactgtctggcggtactgaatggggacacgtag

SEQ ID NO: 241979 - DNA, 873 bp, synthetic construct
  misc_feature 1..873: note = Description of Artificial Sequence: Synthetic coding sequence
  source 1..873: mol_type = other DNA
atgactaaagaggagttcaccaagatgaaacaggagctcgaggccgagtatctggccatctttaaaaagactgtcgcgatgcacgaagtgttcctatgtcgggtggccgctcatccaattctgcgcagggatttgaattttcacgtttttctggagtataaccaggatctttctgtgagaggcaaaaacaaaaaagaaaagctggaagacttttttaagaacatggttaagtccgcagatggggtcatcgtgtcgggtgtaaaggatgtagacgatttctttgagcatgagcgaacctttcttctcgagtaccacaacagggtgaaagatgctagcgctaaaagcgatcggatgacacggtcgcacaagtcagcggcagatgactataataggatcggtagcagtctgtatgccctggggacacaggattctacagatatttgtaaatttttcctgaaagtttcggagctgttcgacaaaacaagaaagattgaggctcgggtgtcggcggatgaagacctgaaactgagcgacctgctgaagtactacttgcgagaatcccaggccgctaaagacctcttatatagaaggagtcgcagcctggtagactatgagaatgccaataaagccctcgataaggcccgagccaagaacaaagacgtgctgcaggcagagacctcccagcaactgtgttgccagaagttcgaaaagatctcggagtcagcaaaacaggaactgattgacttcaagacacgccgtgttgccgcatttcgcaagaatctggtcgaattggccgagcttgagctgaaacatgccaaaggcaatttacagctgctccagaattgtctggctgttcttaacggggacacttag

SEQ ID NO: 241980 - DNA, 1188 bp, synthetic construct
  misc_feature 1..1188: note = Description of Artificial Sequence: Synthetic coding sequence
  source 1..1188: mol_type = other DNA
atgaaaatcccacttaataagttccccggattcgcaaaacccggtacagagcagtacctgctggctaagcaactggcgaagcccaaggagaaaatacctattatcgtcggtgattacggaccaatgtgggtgtaccctactagtaccttcgactgcgttgtggcggatcctcggaagggaagcaagatgtacgggttgaaatcttacatcgaataccagctgacgcctacaaataccaatagatcggtgaatcataggtacaagcacttcgactggctctatgagcggctcctggtgaagttcggtagtgcgatcccgatcccctctctaccagacaaacaggtaaccggacgatttgaggaggaatttataaaaatgcgcatggagaggctgcaggcctggatgacccgcatgtgcaggcacccagttattagtgagagtgaggtgtttcagcagtttctgaactttagggatgagaaagagtggaaaaccggtaaacgtaaagcagagagagacgaattggccggagtgatgatattttcaacgatggagcctgaagcccctgacctggatttagtagaaattgagcagaagtgcgaagctgtggggaaattcactaaagcaatggatgacggtgtaaaagaactgctgacggtgggccaagaacattggaagaggtgcactgggcctcttccaaaggaatatcagaagatcgggaaagcgttacaaagcctggcaaccgtgttcagcagttctggctaccagggagaaacagacttaaatgatgccatcactgaggctgggaagacgtacgaggagatcgcaagccttgttgcagagcaaccgaaaaaagatctgcatttccttatggagtgcaatcacgaatacaaagggtttctggggtgtttcccggatattatcggtacgcataaaggggctatcgagaaggtaaaagagagcgataaactggttgccaccagtaaaattaccctccaggacaaacaaaacatggttaagagggtttccattatgtcttacgccttgcaggctgaaatgaatcatttccattcaaaccggatctacgactataacagtgtcatcaggctctatctggaacagcaagtgcaattttatgagactatcgccgagaaactgcgacaggctttaagccggttcccagtcatgtag

SEQ ID NO: 241981 - DNA, 1788 bp, synthetic construct
  misc_feature 1..1788: note = Description of Artificial Sequence: Synthetic coding sequence
  source 1..1788: mol_type = other DNA
atggccaccaaggctcgtgtcatgtatgattttgctgcggaaccaggtaacaatgaactaactgttaatgaaggagagataattaccattacaaaccctgatgtgggcggaggatggctggaaggaagaaatataaaaggcgaacgtggattagtgcccacagactacgtcgagatcttaccgtcagatggaaaagaccagttctcttgcgggaatagcgtagcggaccaggcctttcttgattccctcagcgcatccactgcccaggctagttcctctgccgcaagcaataatcaccaggtgggtagtggcaacgatccctggtccgcctggtctgccagcaaaagtggcaactgggagagctctgagggatggggcgcacagccagaaggcgctggtgcacagaggaataccaacactccaaataattgggacacagcctttgggcatccacaagcataccagggcccagctaccggtgatgacgacgactgggatgaagactgggatggcccaaaaagctcttcctattttaaggattcggagagtgcagatgcaggcggtgctcagagaggaaatagcagagcctcctccagctctatgaaaattccactgaataaattccccggttttgctaaacccggaacagagcaatatctgttggccaagcagttggccaagcccaaggaaaaaatccccatcatagtaggcgactatgggccaatgtgggtctatccaacatcaacctttgactgtgtggtagcagacccacgcaagggatcaaagatgtatgggctgaagtcttacatcgaatatcagctaacccctaccaataccaaccggagcgtcaatcaccgctataagcattttgattggctgtacgaacggctcttggtcaaattcggctctgctatcccaattccctccctcccagataaacaggtgactgggcgatttgaagaggaattcatcaagatgaggatggagcggctgcaggcttggatgacccgcatgtgccggcatcccgtaatcagcgagagtgaggtctttcagcagtttctcaactttcgggacgagaaagaatggaaaacagggaaaagaaaggctgagcgcgatgagctggctggcgttatgatcttcagcacaatggagcctgaagctccggatctcgacttggtggagatagagcaaaagtgtgaagccgtggggaagtttacaaaagccatggacgatggtgtgaaagaactcctgacagtaggccaggagcattggaagcgttgcaccggccctctgcctaaggagtaccagaagattgggaaggcactccaaagcctagccaccgttttctccagcagcggctatcaaggggaaactgacctcaatgatgccataaccgaggctggcaagacatacgaggagattgcgagtttggtggccgaacagccaaagaaagatcttcatttcctcatggaatgtaaccacgaatacaaagggtttctgggctgtttcccagacatcatcggcactcacaagggtgcaatagaaaaggtcaaggagtctgataaactagtggctacatcaaagattactctacaagataaacagaatatggtcaaacgcgtgtcaatcatgtcttatgccctgcaggccgaaatgaaccattttcactctaaccggatctacgattacaacagcgtgattagattgtacttggaacagcaggtgcaattttacgagaccattgcggaaaagcttcgtcaggcactttcacgctttcccgtcatgtag

SEQ ID NO: 241982 - DNA, 1788 bp, synthetic construct
  misc_feature 1..1788: note = Description of Artificial Sequence: Synthetic coding sequence
  source 1..1788: mol_type = other DNA
atggctacaaaggctcgagtgatgtatgattttgcggcagaacctggcaataacgagctgactgtcaacgagggtgagatcataaccatcacaaatcctgacgtcggcggaggttggctggaagggagaaacatcaaaggggaacgaggactggttccaacagactacgtggagattctcccctctgacggcaaggatcagttttcgtgcggtaattcggtggcagatcaggctttcctcgattctctttcagcctctacggctcaggcctcatcctcagcagccagtaacaatcaccaggtggggtccgggaacgacccatggtcggcatggtctgccagcaaaagtggtaactgggagtcttccgaaggctggggggctcaaccggagggggctggcgcacagcggaacacaaatacccctaacaattgggatactgcctttggtcaccctcaggcttatcaaggccctgcaacgggagacgatgatgattgggatgaagactgggatggcccaaagtctagttcatactttaaggactccgagtccgccgatgctggtggggctcagcggggaaactccagagcaagtagcagcagtatgaaaatcccactgaacaaattccctgggttcgctaagcctggcactgaacagtacctcctggcgaaacaactggccaaacccaaagaaaagatacccatcatcgtaggtgattatgggccaatgtgggtgtacccaacgagcaccttcgactgcgtcgtggctgaccctcgcaaaggtagcaaaatgtacggccttaagtcttatatcgagtatcaactgactccaacgaacactaaccgtagcgtcaatcatcgatataaacacttcgattggctgtatgaaaggctcctcgtcaagtttgggtccgcaatccccattccatcactgcctgataagcaagtgacaggcaggtttgaggaagaatttataaagatgcgaatggaacggctccaggcttggatgaccagaatgtgtcgacaccctgtcatctctgagtcagaggtctttcagcagttcctgaattttcgagatgagaaggaatggaaaactggcaaacggaaggccgagcgagatgaactggccggtgtgatgatctttagtacaatggaacctgaagctcccgatctggacctagtggagatcgaacagaagtgcgaggcagtggggaagtttactaaggccatggacgacggtgttaaggagctgctgaccgtgggtcaggaacactggaagagatgcaccggtcctcttcccaaagaataccagaaaattggtaaggcattgcagtccctggccacagtcttctcctcaagcggctaccaaggtgagactgatctgaatgatgccatcactgaggccggaaagacctacgaggaaattgcatccctggtggctgagcagcctaagaaagacttgcatttcctgatggagtgcaatcacgaatataagggatttctgggatgcttccccgatatcatcgggacccacaagggcgcaatagaaaaggtgaaggaaagtgacaagttagtagcaacttcaaagataacacttcaggataagcagaatatggtgaagcgcgtttcaataatgtcatatgccctccaggccgagatgaatcacttccatagtaatcgcatttatgattacaattcggttattcgcctgtatctggaacaacaagtgcaattttatgagaccatagctgaaaagctaagacaagccctctcacgattcccagtcatgtag

SEQ ID NO: 241983 - DNA, 1308 bp, synthetic construct
  misc_feature 1..1308: note = Description of Artificial Sequence: Synthetic coding sequence
  source 1..1308: mol_type = other DNA
atggggctctccttctctctgtttcctctgcgcaaccatgtgaacgtagaaggcgctacacataaacaagttgtcgatctaatccgcgctggtgaaaaggagctgattttaacagttttgtccgtcccaccgcacgaggccgacaatctggacccatccgatgactccctggggcagtccttttatgattatactgagaaacaggctgtgcctataagtgtgcctaggtacaagcatgtggaacaaaatggggagaaatttgtcgtgtataacgtctacatggcgggtcggcagttgtgctccaaaaggtaccgcgaattcgcgatattgcatcagaacctcaaacgtgaattcgccaacttcacgtttcccaggttgccaggaaagtggccatttagcctgtctgagcagcaactggacgccagacgcaggggtttggaagagtaccttgaaaaggtgtgtagtatccgcgttattggcgaatctgatatcatgcaggaatttctgtcagaaagtgatgaaaattataatggcgttagtgatgtggagttgagggtggccttaccggacgggactacggtgacagtgcgagtgaagaaaaactccaccacagatcaagtctaccaggcaatcgccgctaaagtggggatggactccaccaccgtgaactactttgcactgtttgaagtgatcagtcacagctttgtgcgaaaactcgccccaaatgagtttccgcacaagctgtacattcagaactacactagtgccgtccctgggacttgcttgacaatacggaagtggctatttactacggaggaagagatcctactcaatgataacgacctggccgtgacctatttctttcaccaggccgtggacgatgtcaagaaggggtatattaaagctgaggagaagagctaccaactgcaaaagctttatgaacaacggaagatggtgatgtatctaaacatgttgcggacttgtgaaggctataacgaaattatctttcctcattgcgcgtgtgattctagacgcaaagggcacgtgatcacagcaataagcataacccatttcaagctgcatgcctgcacagaggaaggccagctggagaaccaggttatcgcatttgagtgggatgagatgcaaaggtgggacaccgacgaggagggaatggctttttgttttgagtacgccaggggagaaaagaaacccagatgggtcaaaatatttaccccctacttcaactacatgcacgagtgttttgaacgggtgttttgcgaactcaaatggcgtaaggaagaatactag

SEQ ID NO: 241984 - DNA, 1587 bp, synthetic construct
  misc_feature 1..1587: note = Description of Artificial Sequence: Synthetic coding sequence
  source 1..1587: mol_type = other DNA
atggcggatgaagatggggaagggatccacccatctgctccccacaggaacggtgggggtggagggggagggggtagtggactccattgcgccggaaatgggggaggaggcggtggaggaccaagagttgtgaggattgtgaaatcagagtcaggctatgggttcaacgttcggggtcaagtgtctgagggaggccagttacggtcaatcaatggggagctttatgcccctcttcaacacgtcagcgccgtccttccagggggagccgcagatagagcaggcgtacggaaaggggataggatcctcgaggtgaatcacgttaatgtcgagggagcaacccacaagcaggtggtggaccttattcgtgccggtgagaaggaactgattctcacggtgctctctgttccgccacatgaggccgacaacctggatccgtcagacgactccctgggccagtcattttatgattacaccgaaaaacaggctgtacctataagtgttccaaggtacaagcatgtggagcagaatggggagaagttcgttgtctataatgtctatatggccggtcgccaattgtgtagcaagcgataccgcgagttcgctatcctgcaccaaaatttgaagcgcgagtttgctaactttactttccccagactgcccggaaaatggccgtttagcttgagtgaacagcagctggacgccagaaggcgcggactggaggaatatctcgaaaaagtctgcagtattcgggtgatcggggagtctgatataatgcaagagtttttatctgaatctgacgagaattataatggggtcagtgacgtggagctgcgtgtggcactcccagatggaaccactgttacagtgagagtgaagaaaaatagcaccacagaccaggtgtaccaagccatcgccgctaaggtgggcatggatagcacgacagtgaattacttcgccctattcgaagtgatttctcactcctttgttaggaagctggcccctaacgagttccctcacaagctttacattcagaattatacctccgctgtccctggtacatgtcttactattcggaagtggctatttaccaccgaagaagaaatcctgctgaatgacaacgacttagccgtgacgtacttcttccatcaagcagtggacgacgtgaagaagggatacatcaaggctgaggaaaagtcgtaccagctacagaagctatatgaacagaggaagatggtgatgtacctgaatatgctgcgaacttgtgaagggtacaatgaaatcatcttccctcactgcgcctgcgattccaggcgaaagggccacgtgatcacggcaatctccatcacccactttaagctccacgcctgcactgaggaaggacaacttgaaaaccaggtaatcgcatttgagtgggatgaaatgcagaggtgggacacagacgaggaaggcatggctttttgttttgagtatgcgagaggggaaaaaaagccccgatgggtcaagatcttcaccccttattttaattacatgcacgagtgttttgagcgcgtattctgtgagctaaaatggcggaaggaagaatactag

SEQ ID NO: 241985 - DNA, 1626 bp, synthetic construct
  misc_feature 1..1626: note = Description of Artificial Sequence: Synthetic coding sequence
  source 1..1626: mol_type = other DNA
atggccgacgaagatggagaaggaatccatccttcggcccctcacaggaacggcggaggaggcggaggaggaggctctggcctccattgtgctgggaatgggggaggcggagggggaggtcctagggtagtccgaatcgtcaagagcgagagcggctatggctttaatgtgcggggtcaggtttctgaggggggtcagttaagaagcattaacggagaactttatgcgcctcttcaacacgtaagcgctgtgctgcccggaggcgctgcagaccgggctggggtgagaaagggtgaccggatcctcgaggtaaatcatgtgaatgtcgagggagctacacacaaacaggtagtggaccttattcgggctggtgagaaagagctcatcctgacagtgctgtcggtgccaccacatgaagctgacaatttggatcctagcgatgatagtttaggacagagtttctacgattatacggagaagcaggccgtgccaatcagcgtgcctcggtataagcacgttgaacagaacggcgaaaagttcgtggtgtataacgtatacatggccggacggcaattgtgcagcaagcgttacagggaatttgccatcttacatcagaatttgaagcgggaattcgccaattttacttttccacgccttcccggaaaatggccattctcgctctctgagcagcagcttgacgctagacgtaggggcctcgaggaatatctggagaaggtgtgctctattagagtgataggcgaaagcgatataatgcaagagttcttatccgaatccgatgaaaattacaacggtgtgagcgacgttgaattaagagtggctctccccgatgggaccacagtcacggtgagagttaaaaagaactctactaccgaccaggtttaccaggcgatcgccgcaaaagtagggatggacagcactactgttaactactttgctttgtttgaggtgatatcgcattcattcgtccgcaaactggcaccaaacgaattccctcacaaattgtatatccaaaattacacctccgcggtgccaggtacgtgcctgaccattagaaaatggcttttcaccacagaggaggagatactattgaatgataacgacctcgctgttacttactttttccaccaggccgtcgacgatgtcaagaagggatatattaaggccgaggaaaagtcctaccagctgcagaagttatatgaacagcggaaaatggtcatgtatctcaacatgctccggacttgcgaggggtacaacgaaatcattttccctcattgcgcatgtgacagccggaggaagggccatgtcatcacagctatatcgattactcacttcaaactgcatgcctgcactgaagaaggccagttagagaaccaggtgatcgcattcgagtgggacgaaatgcagcgatgggacactgacgaagaaggaatggccttttgctttgaatatgcccgtggggagaagaaacctaggtgggtgaaaatttttaccccatatttcaattatatgcacgagtgctttgagcgagtcttctgcgaacttaagtggagaaaggaaaatatattccagatggctaggtcacaacagcgcgatgttgccacatag

SEQ ID NO: 241986 - DNA, 2640 bp, synthetic construct
  misc_feature 1..2640: note = Description of Artificial Sequence: Synthetic coding sequence
  source 1..2640: mol_type = other DNA
atggccggaggaggtggggatttgtccactaggagacttaatgaatgtatctctcctgtcgccaacgaaatgaatcaccttcccgctcacagccacgatcttcaaagaatgttcacagaggatcagggtgtagatgaccggctgctctacgatattgtgtttaaacatttcaagaggaataaagtggaaatctcaaacgcgataaaaaagaccttcccattcctcgaggggctgcgggatagggatctgataacaaataaaatgttcgaagactcgcaggattcctgccggaaccttgtgcctgtacagagagtagtatacaacgtgctgtccgagctagaaaaaacatttaatcttcctgtgctcgaagctttattctccgatgtgaacatgcaggaataccccgatctgattcatatttacaaaggatttgaaaatgttattcatgacaagctgccactccaggagtcggaagaggaagagcgggaggaaagaagcggtctgcagctgagcctcgaacaggggactggcgaaaatagctttagatccttgacatggcctccgtccggttctccttcccacgcagggactacccccccagagaacggtctgtccgagcacccctgcgagaccgaacaaattaacgccaagaggaaggataccacttccgataaggatgacagcctgggaagccaacaaactaacgagcagtgcgctcagaaggccgaacctacagaaagttgtgaacagatagctgtgcaagtcaacaatggagacgcaggtagagaaatgccttgccctctcccctgtgatgaagagagccctgaggcagagctccataatcacggcatccaaatcaactcatgttctgtccggctggttgatattaaaaaagaaaaacctttctcaaattcgaaggtggaatgccaggctcaggcacgcactcatcacaatcaggcctctgacattatcgtgatctctagcgaggatagtgagggtagcaccgatgtggatgagcccctggaggtttttataagcgctccaagatcggaacccgtgatcaacaacgataatcctctggagagcaacgatgagaaggagggccaggaggccacgtgcagtaggcctcaaatcgtacctgagccgatggattttcggaagctgtccacctttcgagagtcctttaaaaagagagttatagggcaagatcatgacttttccgagagctccgaagaagaggcaccagccgaggcgagcagtggcgcactgcgatcaaagcacggcgagaaggcacccatgacgtcaaggtcaacaagtacatggcgaataccatctcggaagagacggttttcaagttctgacttctccgacctgtctaatggcgaggaactgcaggagacttgctccagctcactgagacgaggcagcgggagccaaccacaggagcctgaaaataaaaagtgctcctgcgtaatgtgtttcccaaagggcgttccgcgttctcaagaggctcgcacagaatctagccaggcttcagatatgatggatacgatggacgttgaaaacaactcaaccttagagaaacacagtggaaagcggaggaaaaagcgcagacataggagtaaagtcaacggactgcagaggggcaggaaaaaggaccgacctagaaagcacctgacattaaataataaggtgcagaagaaaagatggcagcaacgcggaaggaaggctaatacgcgacctctgaagcggagacggaagcggggtccaagaattccaaaagacgaaaacataaactttaagcaaagcgaattacctgtgacctgtggagaggtaaaaggcaccctttataaagaacggttcaagcaaggaacgtcgaagaaatgcatacagtcagaagataagaaatggtttaccccaagggagtttgagatcgagggcgaccggggtgcaagtaaaaattggaaactgtctatccggtgcggaggttataccctgaaggtgctcatggagaacaagtttctgccggagccaccatctacaaggaagaagcggatactggagtcacacaacaataccctggtggacccatgcgaggaacataaaaagaaaaaccccgacgcctctgtgaaattttccgaattcttgaaaaaatgcagcgagacctggaaaaccatctttgctaaagagaaaggcaagttcgaagatatggctaaagcagacaaagcccactacgagagggagatgaaaacttatattccgccaaaaggcgagaaaaaaaaaaagttcaaggatcccaacgcgcctaaacgacctcccctggctttttttcttttttgctctgagtatagacccaaaatcaagggtgaacacccgggtctttcaatagatgacgtcgtcaagaaactggctgggatgtggaataatacggcagcagcggacaaacagttttacgaaaaaaaggccgcaaagctgaaagagaaatataaaaaagatattgcagcataccgagctaaggggaagccgaacagtgcaaagaaaagggtcgttaaggctgaaaaaagtaagaaaaaaaaagaggaggaggaggatgaagaggatgaacaggaggaggaaaacgaggaggacgatgataaatag

SEQ ID NO: 241987 - DNA, 2658 bp, synthetic construct
  misc_feature 1..2658: note = Description of Artificial Sequence: Synthetic coding sequence
  source 1..2658: mol_type = other DNA
atggccggaggtggtggagacctgagcactcgcaggctaaatgaatgcatctcacccgtggctaatgaaatgaaccacctgcccgcacactcccacgacctccagaggatgttcaccgaggaccagggtgtcgatgaccgcttgttatatgatattgtcttcaaacatttcaagcgaaacaaggtggaaattagcaatgccattaagaagacattcccctttctcgaaggactgcgcgaccgcgatctcattactaacaagatgttcgaggattcccaggactcatgcaggaatttggtccctgttcagcgagtcgtgtacaacgttctatcagagctcgaaaaaacctttaatctgcccgtcctggaagcattatttagtgacgtaaatatgcaggaataccccgacttgatccatatctataaaggatttgaaaatgtgattcatgataaactgccactgcaagagtccgaggaagaggagcgcgaggaacggtccggtctccagttatcattggaacagggaaccggagagaactctttcaggtctctcacttggcctcccagtggatcaccttcacacgctggaaccactccgcctgagaatggtctgtctgaacacccctgcgagacagagcagattaacgccaagcgcaaggacactacttctgacaaggatgactccctcgggagtcaacagaccaatgaacaatgtgcccagaaagctgaacccaccgaatcctgtgagcagatagccgtacaggtcaacaatggtgacgcgggacgggaaatgccttgcccactaccatgtgacgaggaatcaccagaggcagaactgcataatcacgggattcagattaatagctgcagcgtgcgattggtggatattaagaaagagaaacctttctccaacagcaaagtggagtgccaggcacaggcgaggacccaccacaaccaggcctctgacataatcgttatcagcagtgaagattcggagggttctacagatgtggatgagcccctggaggtttttatatccgctcctcggtctgaacccgtgatcaacaatgataatccccttgaatctaacgacgagaaggaagggcaagaggctacctgttcccggccacagattgtccccgaacctatggacttcaggaagctgtccacattccgagagtcttttaaaaaaagagtgatcggacaggaccatgatttcagcgagtcttccgaagaagaagcaccagctgaagcatctagtggagccttgcgaagtaagcacggtgaaaaggctccgatgacatctaggtcaactagtacatggagaatccccagtcgtaaacggagattctcttcttctgatttcagtgacctgtcgaatggagaagaactgcaggagacatgtagcagttcgcttagaagaggtagcggaagccagccccaggaacccgagaataaaaagtgcagctgtgtgatgtgctttcccaagggcgtgcctagaagccaggaggcccgtacagaaagctctcaggcaagtgacatgatggacacaatggatgtggagaacaactccaccttagagaagcactctggaaagagacgtaaaaagcggaggcacagatcaaaggtcaatggcctgcagcggggacgtaagaaggacagaccaagaaaacatttaacactgaataataaggtgcagaagaagcgctggcaacagagaggcaggaaagctaataccaggcccctgaagcggaggcggaaaaggggccctagaatccccaaagatgaaaacatcaatttcaaacagtcggagctgcctgtgacatgcggagaggttaaaggcaccctttataaggaaagatttaaacagggaacctccaagaagtgcatccagagtgaagataaaaaatggttcacgccgagagagtttgagattgaaggggataggggagcctcaaagaactggaagctgtccatcagatgcggaggctacacgcttaaagtgctcatggagaataagttcctgcccgagcccccttccacgcggaagaagcggattcttgagagtcacaataacaccctggttgatccctgccccgagaatagtaatatttgcgaagtgtgtaacaagtggggcaggctcttctgttgtgacacatgtcctcgtagttttcacgagcactgtcacatccccagtgtggaggctaacaaaaacccttggtcttgcatattctgcagaataaagaccatacaggaaaggtgccccgagtctcagtccggtcatcaggaatctgaggtactaatgcggcaaatgctgccagaggaacaactcaaatgcgagtttctgctgctcaaggtgtattgcgattccaaaagctgcttttttgcttccgagccatactataatagggaggggagccagggcccacagaaacccatgtggctcaataaggtgaagacaagcctcaatgaacaaatgtatactagggtggagggtttcgttcaagatatgcgccttattttccacaaccacaaggagttctaccgcgaagataaattcacccggttgggtatccaggtgcaggatatctttgagaaaaatttccgcaacattttcgccatccaggagacatccaaaaacattattatgtttatttag

SEQ ID NO: 241988 - DNA, 1422 bp, synthetic construct
  misc_feature 1..1422: note = Description of Artificial Sequence: Synthetic coding sequence
  source 1..1422: mol_type = other DNA
atggctggcggagggggagatctttccacccgaagacttaatgaatgtatctctcccgtggcgaatgagatgaaccaccttcccgcacatagccacgacctccagaggatgtttaccgaagaccagggcgtggacgaccgactgctctatgatatcgtcttcaaacacttcaagcgcaacaaagttgagatcagtaacgctattaaaaagactttcccgttcctagagggactgcgcgatcgagatctgattactaataaaatgtttgaggactcccaggactcgtgtcgaaacctggttccggtgcagcgcgtggtttacaacgttctctcggaactggaaaagacctttaatctccccgtgctggaggccctcttcagcgatgtaaacatgcaggagtaccccgaccttatccacatttacaaaggttttgagaatgtcattcacgataaattgcccttacaggaatccgaggaggaggaaagagaggagcgctcaggtcttcagttgagcttggagcagggtacaggagaaaacagcttcagatcactgacatggcccccttctggatctccatctcacgctggcacgaccccccctgagaatggcctaagtgagcacccatgtgagactgagcagataaacgctaaaagaaaagatactacatcagataaggacgactctctgggcagccagcagacaaatgaacagtgcgcacagaaggcagagcctacggagtcctgtgaacagatagcggtacaggtgaacaatggcgacgccggacgcgagatgccctgcccgttgccttgtgatgaggagtcacccgaagcagaactccataaccacggcatccagataaattcatgctccgtacgtttggtcgatattaagaaggaaaagccctttagcaacagcaaggtagagtgccaggcacaagcaagaacccatcacaatcaagctagtgacatcatcgtgatctcttctgaagatagtgagggctccaccgacgtggatgagcccctcgaagtttttatctccgcccctaggagcgagcccgttatcaacaatgataatcctctcgaaagtaatgacgaaaaagagggtcaggaggccacttgttccaggccacagatagtgcccgagcccatggacttccgaaagctaagtactttccgagagagttttaagaagcgggtaattgggcaggaccacgatttcagcgagagctctgaagaggaagcacctgccgaggcctcgtctggagccttgagatctaaacatggagaaaaggcccctatgactagcaggtcaacgagtacatggcgcattcctagcagaaaacggcagctgaagaagaaaaagaaaaagaagcagtgccacccacaacctcaaccacaaagaggactgcttgagcagagctag

SEQ ID NO: 241989 - DNA, 2067 bp, synthetic construct
  misc_feature 1..2067: note = Description of Artificial Sequence: Synthetic coding sequence
  source 1..2067: mol_type = other DNA
atggcaggtggaggtggagacctgtcaacccggcgtctgaacgagtgtatttctccagttgccaatgaaatgaaccacctcccagctcattcccacgacttgcagcgcatgttcacagaggatcagggggtggatgatagactcctgtacgacatcgtgtttaagcattttaagagaaacaaggtggagatcagcaacgccatcaaaaaaacgttcccctttcttgaaggtctaagggaccgagatttgattaccaataagatgttcgaggattcccaggattcctgccggaacttggtgcccgtgcagcgtgtggtatacaatgtgctttctgagctggagaagacatttaacttgcccgtgcttgaagctctgttctcagatgtcaacatgcaggaataccccgatctgattcacatatacaaagggttcgagaatgtgattcatgacaaattgccacttcaagagtcagaagaggaggagcgagaggaaagatcaggtctgcagctgagtctggaacaggggaccggcgagaatagcttccggtcccttacctggccaccttctgggtccccaagccacgcgggaacaactccgcctgaaaatgggctgtctgaacacccttgcgaaacggaacagatcaacgccaagcggaaggacacaacaagcgacaaagacgacagtctcggctcccaacaaaccaacgagcaatgtgcccaaaaagcggaacctactgagagctgtgagcagatagccgtccaggttaataatggcgacgccggtagagaaatgccttgcccactgccatgtgatgaggaatcccctgaagctgaactgcacaaccacggaattcaaatcaactcttgcagcgtgaggctggttgatatcaagaaagagaagcccttcagcaattctaaggtggagtgccaagcccaggcgaggacccatcacaatcaggcctcggacattattgtcatcagcagcgaggattccgaggggtctaccgatgtagatgagccactcgaggtattcatctcagccccacgctcggaaccagttattaacaatgataaccctctcgagtcaaatgatgagaaggagggacaggaagctacatgctctcggcctcagattgtacccgagccaatggattttcggaaattgtcaacctttcgcgaatcatttaaaaaacgtgtcattggtcaggaccacgatttttccgagtcctctgaagaggaagccccagcagaagcctcttctggcgctctgcgtagtaagcatggagagaaggcccctatgacgtctaggtcgacatcaacgtggcgaatccctagtaggaaacggaggttttcaagttccgattttagcgatctttctaacggggaggaactgcaggagacctgttccagttccttaagacgaggatcaggatcacaaccccaggagcctgaaaataaaaagtgcagctgcgtcatgtgcttcccaaagggtgttccacgctcgcaagaggctagaacagagagctctcaggcctcagacatgatggatacaatggacgtggaaaacaactccaccttagaaaaacattcaggcaagcgaaggaaaaaaagacgacacaggagcaaggtgaacggactgcagagaggccgaaagaaagaccggcctcgcaagcacttaacgctcaataacaaagtacagaagaagcggtggcaacagagggggaggaaggccaacacgaggccactgaagagacgaagaaagcgtggtcccagaattcctaaggatgagaacattaattttaagcagagcgaactccccgtcacatgtggagaagtgaaggggaccctgtacaaagagcgatttaaacaggggacctccaagaagtgcatccagtcagaagataagaagtggttcacaccacgcgagtttgagatcgagggtgatcgcggagcctccaaaaactggaagcttagcataagatgcggcggttatactctgaaagtactaatggagaataaattcctaccagagccaccatctacacggaagaaggtgatgatcaaatag

SEQ ID NO: 241990 - DNA, 1443 bp, synthetic construct
  misc_feature 1..1443: note = Description of Artificial Sequence: Synthetic coding sequence
  source 1..1443: mol_type = other DNA
atggctgggggagggggtgatctgagtacccgccgtttgaacgaatgcatatccccggttgcaaacgagatgaatcacctcccagctcacagtcacgacctgcaacgtatgttcactgaagatcagggcgtggatgatcggctgctgtacgacatcgtgttcaaacattttaagagaaataaggtggagatttcgaacgcaatcaagaagacctttccctttttagaaggccttcgggaccgagacctcattaccaacaaaatgttcgaagatagtcaggattcttgccggaacctggtgcccgtccagagagtggtttataacgtgctctcagagctggaaaaaactttcaacctgccagtcctggaagcactcttctctgacgtcaacatgcaagaataccctgatctgatccacatctacaaggggttcgaaaacgtgattcacgataagttacctttgcaggagagcgaggaggaagagcgggaggagcgtagcgggctacagctgagtctggagcagggcactggggagaatagctttagatctctcacatggcccccttccgggtctccatcccatgctggtactactccccctgagaacggtctctcagagcacccatgcgagaccgagcagattaatgcaaaacgcaaggacaccacatctgacaaggacgactccttaggctctcagcagacaaacgagcagtgcgcccagaaagctgaaccgacagagtcatgcgagcagatcgccgttcaggtcaataatggggacgcagggagggagatgccctgccctttaccttgtgacgaggagtcgccggaggcagaacttcataaccatggaatccagattaactcctgctccgtgaggctcgtggatatcaaaaaggaaaaacccttctcgaatagtaaagtggagtgtcaggcccaggctcgtacccatcacaaccaagcttctgacatcattgttatcagctccgaggatagcgaggggtctactgacgtcgatgaaccgctagaggtattcattagtgctccaaggtccgaaccggtcattaataatgacaatcccctggagtccaacgatgagaaggagggccaggaggccacatgctcccgtcctcagattgtccccgaacccatggactttcgaaaacttagcacctttagggaatcttttaagaagcgcgtcattgggcaggaccatgatttttctgagtcttctgaggaggaggcccctgccgaagccagtagtggcgctctgcggagtaagcacggcgagaaagccccaatgacatcacgtagtacttccacatggagaataccatctcgcaagaggcgctttagctcctccgatttcagcgacctctccaacggggaagagctgcaggaaacttgtagcagtagcctgcggaggggtagcggaaaagaggattag

SEQ ID NO: 241991 - DNA, 1068 bp, synthetic construct
  misc_feature 1..1068: note = Description of Artificial Sequence: Synthetic coding sequence
  source 1..1068: mol_type = other DNA
atggatgtggaaaacaacagcaccctggaaaaacattctgggaagcggagaaagaaaagaagacacagatctaaagtgaatggactccagaggggtcggaagaaagatcgccctagaaaacacctgacactcaataacaaagttcaaaagaagcggtggcaacagcggggaagaaaggctaatacaaggcctcttaaacgaaggcgcaagcgcggaccacggattcccaaagacgagaatattaattttaagcagtcagaactgccagtgacctgcggagaggtcaaagggacactgtacaaagagaggtttaaacagggaaccagtaaaaaatgtatccagagtgaggacaaaaagtggtttacacccagagagttcgaaatcgagggcgacagaggagcctccaagaactggaaactcagcatccggtgcggcggatacacattgaaagtgctgatggagcgtattctggaaagccataataataccctggtggacccctgccctgagaacagtaacatctgcgaggtgtgcaataagtggggtcgactgttttgttgcgacacgtgccctagaagctttcacgaacattgtcacattccgagcgtcgaggccaataagaacccttggtcctgcatcttctgcaggattaagaccatacaagagcgatgtccagagtctcagagcggccaccaggaatctgaggtcctgatgagacaaatgctccccgaggaacagctcaagtgtgagtttctgcttttgaaagtctactgcgacagcaaaagctgcttcttcgcttctgaaccatactataaccgcgaggggtcccagggcccacaaaagccaatgtggttaaacaaagtgaagacatcacttaacgagcagatgtacactcgtgtagaaggtttcgttcaggacatgagactgatcttccataatcacaaggagttttaccgcgaagataagtttaccaggcttggcatccaggtgcaagatattttcgagaaaaacttccgaaacatattcgccatccaggaaacctctaagaacatcattatgtttatctag

SEQ ID NO: 241992 - DNA, 1359 bp, synthetic construct
  misc_feature 1..1359: note = Description of Artificial Sequence: Synthetic coding sequence
  source 1..1359: mol_type = other DNA
atggctggcggaggaggagacctcagcacaaggatgttcactgaggaccagggcgtggacgatcggctcttgtacgatatagtcttcaaacattttaaacgcaataaggttgagatttccaacgcgatcaaaaaaacgttcccctttcttgaaggcctgcgagacagagatcttattactaataaaatgttcgaggactcacaggattcatgcaggaacctggtgcccgtccagcgtgtagtttataatgtgctcagtgagttggaaaagacattcaatctgccagtgctggaagctttgttttccgacgtgaatatgcaggagtatccggatctgatacatatttataagggcttcgagaatgttatacatgacaagctaccactgcaggagagcgaagaggaggaaagggaggagagatctggccttcaattgtcccttgagcagggtaccggcgaaaactcattcagaagtctgacgtggcccccttccggttccccctcccacgccggaaccaccccacccgagaacggcctgtccgagcatccttgtgagactgagcagatcaatgcaaagcggaaagataccacaagtgataaggatgacagcctggggagccagcagacgaacgaacagtgcgcacagaaagccgaaccaactgagagctgcgagcagattgcagtgcaggtgaataatggtgatgccggaagagagatgccatgtccattgccatgcgatgaggagtcccctgaggccgaactgcataatcatggtatccagattaatagctgctcagttcggttggttgacatcaagaaagagaagccattttcgaattccaaagtggaatgtcaggcccaggctcgcactcatcacaaccaagcctctgacattattgtcatatcatctgaagacagcgaaggaagtacagacgtggacgaaccgcttgaggtctttatttctgcccctagatccgaaccagtcataaacaatgacaatcccctggagtctaacgacgagaaggaaggccaagaagccacatgctccagaccacaaatcgtccccgagccaatggattttagaaaactttcgacttttcgcgaatccttcaaaaaacgggtgatcggtcaagaccacgatttcagcgagtccagcgaggaagaagccccagctgaggcatcaagcggcgctctgcggtcaaaacacgctcccatgactagtagatcgaccagcacctggagaattcccagcagaaagcgtcggttctcctctagcgacttctcggacctgtctaacggcgaggagctacaagagacatgctcctccagcctgcgcagagggagcggaaaggaggattag

SEQ ID NO: 241993 - DNA, 1338 bp, synthetic construct
  misc_feature 1..1338: note = Description of Artificial Sequence: Synthetic coding sequence
  source 1..1338: mol_type = other DNA
atgatgttcactgaggaccaaggcgtagatgaccggctcttgtatgacatcgtctttaagcacttcaaacgaaacaaagtagaaatttccaacgccatcaagaagaccttccctttcctggagggcctgagggatcgcgatctgattaccaataagatgtttgaagattcccaggattcatgccggaatctggtgccggtgcagcgagtggtgtacaacgtgttaagcgagctcgagaagacctttaatctcccagtgctcgaagccctgttttcggatgtcaacatgcaggagtatcccgacctcatccatatttacaaaggattcgagaacgttatccacgataagctgcctttgcaggaaagcgaggaggaggagcgggaagaacgcagcggcctgcagctgtcactggagcaggggactggcgagaacagcttccggtcgctgacttggcctccttcgggaagcccatcccacgctgggacgaccccccctgagaatggtctgtccgagcatccctgtgagacagagcagataaacgccaagcgcaaggacactacttcagataaggatgattcactgggcagccaacagaccaacgaacagtgcgcccaaaaagccgaaccaactgagagctgtgagcaaattgcagtgcaggtgaacaacggggatgccggaagagaaatgccttgtcctcttccttgcgatgaagagagtcccgaggcggagctccacaaccacggaatacagatcaactcatgtagcgtccgcctggtggatataaaaaaggaaaaaccattcagcaactccaaggttgagtgtcaggcacaagcacggactcaccataaccaggccagcgatataatcgttattagtagtgaggactcggaaggatcaaccgacgtcgacgagccacttgaagtatttatcagtgctcccaggagcgaacccgtgattaataacgataaccctcttgagtccaatgatgagaaggaaggacaggaggccacctgttcccgacctcaaatcgtgcctgagccaatggattttaggaagctttcgaccttcagagaaagcttcaaaaagcgcgtgatcggccaggatcatgacttcagcgaatcaagcgaggaggaagccccagctgaggcttcctccggtgcactgcggtcaaagcatggagagaaagcacccatgacctctcgctctactagcacctggcgcataccaagtagaaagcgccgtttcagcagctctgatttcagtgatttgagcaacggcgaagagttacaggaaacctgtagcagcagtctgagacgcggaagcggcaaggaggactag

SEQ ID NO: 241994 - DNA, 2142 bp, synthetic construct
  misc_feature 1..2142: note = Description of Artificial Sequence: Synthetic coding sequence
  source 1..2142: mol_type = other DNA
atgttcaccatgacccgtgccatggaagaggctctgttccagcattttatgcaccagaagctgggtattgcttacgccatccacaagccttttccatttttcgaggggctacttgataattcaatcatcaccaagcggatgtacatggaaagcttggaggcatgtcgcaatctgatcccagttagccgggtcgtgcataatatcctcacccagctggagcggacatttaacctgtctcttctagtgaccttgttttcccaaattaatctgagagagtatcccaatctggttaccatctatcggagtttcaagcgtgttggggcatcttatgaatggcagtcacgcgacacccctatcttactggaggcgccaactggtctcgccgagggatcctcgcttcatacgccgctggctcttccaccccctcaacctccacaaccttcttgtagcccctgtgcgccacgcgtgtccgaacccggaacttctagccaacagtccgacgagattctgagcgagagcccttcaccaagcgacccagttctgcctttgccagcattgatacaagaaggaagatctactagcgtgactaatgataaacttacctcaaagatgaatgcggaggaggactctgaggagatgccttcccttctaacatccaccgttcaagtcgcttctgacaatctgataccccaaatccgggacaaagaagatcctcaggaaatgccccacagtcctctgggttcaatgcctgaaattcgagacaattctcccgagcctaacgacccggaagagccccaggaggttagctccacaccaagcgataaaaaaggcaagaaaaggaagcggtgcatctggagcacgccaaagcgaagacacaagaaaaagtcactgcccggtggaacagccagctcccgccacggaatccaaaaaaagctaaagcgtgttgaccaggtgccacagaagaaagacgatagcacttgcaactccacagtggagactcgagcccagaaagcccgaaccgaatgcgcgcgaaagagtcgatccgaggaaatcatcgatggcacatcagaaatgaacgaaggtaaacggtctcagaagacaccatctactcccaggcgagtgactcagggcgctgctagtcctggccatggcattcaggagaaactgcaagtggttgacaaagttacgcagagaaaggacgatagcacgtggaatagcgaggtgatgatgagggtccagaaggccagaacaaagtgtgcccgtaaaagccggttaaaggaaaagaagaaagagaaggatatatgcagcagctctaaaagacgatttcaaaagaatatccaccgccgtgggaaacctaagtctgacactgtggacttccattgctcaaaactgcccgtgacatgcggtgaggctaaagggatactgtacaagaaaaaaatgaagcacggatcttccgtcaagtgcatccgtaatgaagatggcacctggctgacccccaacgagttcgaagtcgaaggtaaagggcgaaatgccaaaaactggaagcgcaatatacgatgtgaggggatgacactgggggagctccttaagcgcaagaactctgacgagtgcgaagtttgctgtcaaggcggacaacttctgtgttgcggcacttgcccgagagtttttcacgaggactgccacatacccccagtggaggcgaagaggatgctctggagctgcacattttgtcggatgaagcgttcctctggatctcaacaatgtcatcatgttagcaaaaccctggaaagacagatgcagccccaggaccagctgaaatgtgaattcctgctcctgaaagcctactgccacccccagtcatcctttttcactggcatcccttttaatattcgggattacggcgagccatttcaagaagctatgtggttggatctggttaaggaacgcctcatcaccgagatgtataccgtcgcctggtttgtcagagacatgagattgatgtttaggaaccacaagacgttctataaggcatcagatttcggccaggttggccttgacctcgaagcagagttcgagaaggatctgaaggatgtattagggtttcatgaggccaacgacggaggcttctggaccctgccttag

SEQ ID NO: 241995 - DNA, 1650 bp, synthetic construct
  misc_feature 1..1650: note = Description of Artificial Sequence: Synthetic coding sequence
  source 1..1650: mol_type = other DNA
atgtttacaatgactagggccatggaggaagcactgtttcaacatttcatgcaccagaagcttggtattgcgtatgcaattcacaagccttttccctttttcgaaggacttctggacaactccatcatcactaagaggatgtacatggagtccctcgaagcatgtcggaacctgattccagtctcaagagtcgttcataatattcttactcagctcgagagaacattcaatcttagcctactggtgacccttttctcccagattaatctgagggagtatccaaatttagtaactatatacaggtcttttaaacgagtgggggcttcctacgagtggcagtccagggacacccccattttgctagaggccccaaccggtctggctgagggttccagtctgcacactcctctcgcactgcccccacctcagccccctcagccctcttgtagcccctgtgctcccagagtgtctgaacctggtacttcctctcaacaaagcgatgagattttgagcgaatcaccttccccttccgatcctgtactaccattacccgctttgattcaagaggggaggtctacttccgtgactaacgataagctgacgagtaagatgaatgccgaagaagattcagaagaaatgcccagtctgctgacatctaccgtgcaggtggcctctgataacctcatcccgcagatccgagataaggaggacccccaggaaatgccacacagcccgctcggcagcatgcctgagattagggacaactctcctgagcctaacgaccccgaggagccacaggaggtcagttcaacaccatcagacaagaaaggtaagaaacgcaaaagatgcatctggagtacccccaagaggcgccacaagaagaaaagcctcccaggcggaactgcttcttcgaggcatgggatacagaaaaaactcaaacgcgtggatcaagtgcctcaaaagaaggacgatagcacctgtaacagcacggtcgaaacacgggcacaaaaggcgcgaacagaatgtgctcggaagagtcgcagcgaggagattattgacggcaccagcgagatgaacgaaggcaagcggagccagaagaccccaagcacaccccgacgcgtgacccagggcgcagcttcccctggtcatggtatccaagagaagctgcaggtcgtcgataaggttacccagcggaaagatgactcgacttggaatagtgaggtcatgatgcgagtgcagaaagctaggaccaaatgtgctagaaaaagtagactcaaagagaaaaagaaggaaaaggacatctgctcctcctccaaacgccgattccagaagaatatccatcgaagggggaagcccaagtcagatacagttgactttcactgtagcaagttacccgtgacctgcggcgaggctaaggggatcctctacaagaagaagatgaaacatgggtcaagcgtgaaatgtatcagaaacgaggatggaacttggctcacccctaatgaatttgaggttgaggggaaaggccgtaatgctaagaattggaagcgaaacattcgctgcgaaggcatgaccctgggcgaattgctcaagagtggcctacttctttgccccccaagaataaatctaaagcgggagctcaactcaaagtag

SEQ ID NO: 241996 - DNA, 756 bp, synthetic construct
  misc_feature 1..756: note = Description of Artificial Sequence: Synthetic coding sequence
  source 1..756: mol_type = other DNA
atgccagagatccgcgacaatagcccggagccgaacgacccagaggagcctcaggaagtcagctccaccccttctgataaaaaaggaaagaaacgaaagaggtgcatatggtccacacccaaacggcgacataaaaaaaagtctctgcctggagagataatcgacgggacatcagagatgaatgagggaaaacgtagccaaaagaccccaagcactcccagacgcgtgacacagggggctgcatcacccggacacgggatacaggaaaaactccaagtcgtggacaaagtaacacaacgtaaagatgacagcacctggaattcagaagtgatgatgcgagtgcaaaaggccagaaccaaatgcgcaagaaagagcaggctgaaggagaagaagaaagagaaggatatttgctcctcttctaaacgaaggtttcagaagaatattcatcggcgagggaagcctaagtctgatacggtggacttccactgcagcaaactgccagtgacctgtggggaagccaaggggatcctctataagaaaaagatgaaacatggcagcagtgttaaatgcatcaggaacgaagacggcacctggctgacccccaatgagtttgaggtggagggtaaagggagaaacgccaagaactggaagcgcaacatccgctgcgagggcatgactcttggagaacttctgaagagcggtttactcttgtgtccaccgcgtatcaaccttaaaagggagctgaattccaaatag

SEQ ID NO: 241997 - DNA, 2070 bp, synthetic construct
  misc_feature 1..2070: note = Description of Artificial Sequence: Synthetic coding sequence
  source 1..2070: mol_type = other DNA
atgttcactatgacccgggcaatggaagaagctctgttccagcactttatgcatcagaagttgggaatcgcatatgccattcacaagccatttcctttttttgaaggactcctggacaacagtattatcacaaagagaatgtatatggagagcctcgaggcctgccggaatctcatcccagtgtctagggtggtacacaacatcctgactcagttggagcgcacattcaatctttcactattggtgaccctgttctcccaaatcaacctccgcgaatatcctaatctggtgacaatctaccgctcattcaaacgtgtcggcgcatcttacgagtggcagtcacgcgatacccccatcttgctggaggcccctactggccttgccgagggcagcagcttgcacacacctctggctctgccacctcctcagccgcctcagccttcttgttcaccctgcgccccacgcgtgtccgagccaggcacctcaagccagcaatcggacgagattctttccgaaagccctagcccttcagacccagttttgccgcttcccgcactgatacaagagggtcgcagtacaagtgttactaatgataagctgaccagcaagatgaatgccgaggaggattcagaggagatgcctagcctgttgacgtcaactgtgcaggtagctagcgataatctgatacctcagatcagagataaagaggatccccaggaaatgcctcattctcccctggggagcatgcctgagattcgtgacaatagtccagaacctaatgatccagaggaaccacaggaagttagcagcaccccctcagacaaaaaagggaaaaagagaaagcggtgtatctggtccactcctaagcggaggcacaagaagaagtcgctgccgggtggcaccgcgtcttcacgccacggtatccagaagaaactcaaacgggtcgatcaggtcccccagaagaaggacgacagtacttgtaactccacagtagaaactagggcacaaaaagccagaacggaatgtgctcgaaaaagtcgatccgaggagatcattgacggaacatccgaaatgaacgagggaaagaggagccaaaagaccccatccacacccagacgcgttacccagggagctgccagccccggacatggcatccaggagaagctccaagtggttgacaaggttacacagcgcaaggatgactctacttggaacagcgaagtgatgatgagggtccaaaaagccagaacaaaatgtgctcgcaagagccggttaaaagagaaaaaaaaggagaaagacatttgctcgtcgtctaagcgacgctttcagaaaaacatccaccgccgtggcaaacctaaaagcgataccgtggatttccactgttccaaacttccagtgacttgcggtgaggccaagggtattctctacaagaagaaaatgaagcacggctctagtgtgaaatgcattcggaatgaggatggaacctggctgacgcctaacgagtttgaggtggagggaaaagggagaaatgccaagaattggaagcgtaatattcgctgcgaagggatgacactcggggagttgctgaaacgcaagaacagcgacgagtgtgaggtctgctgccagggcggacaactgctctgttgtggaacatgtccgagagtgtttcacgaggactgtcacatccctcctgtggaagccaagagaatgctgtggtcatgtacgttctgcagaatgaagagatcgtcaggaagtcagcagtgccatcacgtatcgaaaacattggaaagacaaatgcaacctcaggaccagctaatccgggactatggcgaaccgttccaggaggccatgtggctggatttggtcaaagagaggcttatcaccgagatgtacactgtggcctggttcgtcagggacatgcggctgatgttccgtaaccataaaacattctacaaagcatccgatttcgggcaagtcggtctggacctcgaggcggaatttgagaaggaccttaaggacgttctcggctttcacgaagctaacgacgggggattctggacactcccttag

SEQ ID NO: 241998 - DNA, 1644 bp, synthetic construct
  misc_feature 1..1644: note = Description of Artificial Sequence: Synthetic coding sequence
  source 1..1644: mol_type = other DNA
atgtttacaatgacaagggcaatggaggaggctttgtttcaacattttatgcaccagaaactgggcatagcttacgctatccacaagcccttcccctttttcgaagggctgctggataacagtattatcactaagcggatgtacatggagtctttagaggcttgtcgaaatctgatccccgttagtagagtagtgcataacattttgacacagctcgaaagaacttttaacctatcgctactagtgacgttattcagccagatcaatctccgtgaataccccaacctggtcacaatttaccgctcattcaaacgagtgggggcttcatatgagtggcaatcccgggatactccgatcctgctcgaagccccaactggcctcgctgaaggcagtagcttgcacacccccctggccctgcctcccccacagccaccacagcccagctgttctccatgcgccccaagagtcagcgagcccggaacctccagccagcagagcgacgagatactctccgaatcaccttctccctctgatcctgtcttacctcttcctgcactgattcaggaggggaggagcaccagtgtgactaatgacaagctgacaagcaagatgaacgcagaagaggacagcgaagagatgccatcactgctcactagcactgttcaggtggctagcgacaacctcatcccccagattagagataaggaggaccctcaagaaatgccgcactctccccttgggtccatgcccgaaattagggacaacagcccagagccaaatgaccccgaggagcctcaggaagttagttctaccccgtcagacaaaaagggcaagaagaggaaacgatgcatctggtcaacacctaaacgtcgccacaaaaaaaagtcacttccaggagcatcatcaaggcacgggatccaaaagaaattgaaaagggtggatcaagtgccacaaaaaaaagacgatagtacttgtaactccacagttgagacccgagcccagaaagccagaaccgaatgcgctcggaagtcacggagtgaagaaatcatcgacggcaccagtgagatgaatgaaggtaagcggtcacagaagactcccagtacgccgcgtcgggttacacagggggctgcttctcctgggcacggcattcaggaaaagctccaggttgttgacaaagtgacacagcgaaaggacgattccacctggaattcagaagttatgatgagggtacagaaagctagaacgaaatgtgcccgtaagagtcgccttaaagaaaagaagaaggagaaagacatctgtagcagctcaaaaagaagattccaaaagaacatccaccggaggggaaaaccaaagtcagatacagttgactttcactgtagtaagctgccggttacatgcggtgaagccaagggcattttgtacaaaaagaagatgaagcatgggagcagcgtcaagtgtattaggaatgaagacggcacctggctgaccccaaacgaattcgaggtggagggcaaaggcaggaacgccaaaaattggaagagaaacattcgctgtgagggaatgaccctaggagagcttctgaaaagcggccttcttctatgccctcccagaattaatctgaaaagagagctgaactcaaagtag

SEQ ID NO: 241999 - DNA, 666 bp, synthetic construct
  misc_feature 1..666: note = Description of Artificial Sequence: Synthetic coding sequence
  source 1..666: mol_type = other DNA
atgttcaccatgacccgtgcgatggaggaggctctgtttcagcatttcatgcatcagaagctcggaatcgcctatgctattcataagccgtttcctttcttcgaaggtttactagacaactcgatcattacaaaacgcatgtacatggaatcattggaagcatgccgcaatttgatcccggtcagtagggtcgtccataatatcctaacacaactcgagcggacatttaacctgtctcttctcgtgaccctgttttcccaaattaatctgcgcgaatatcctaatctggtgacaatttaccggagtttcaagagggtgggggcatcttacgaatggcagagcagggatacccccattttgctggaggcacccacaggtctggcggagggttcatcactgcacacacccctggcactgccgcctcctcaaccccctcagcctagctgctcaccctgcgcccctcgtgtgtccgagcctgggacgtcttcacaacagtcagatgaaatcctgtccgaaagcccttcgccctcagaccccgtgcttcctttaccagccttaatccaggaaggaaggagcactagcgtcacaaacgataagctgacatccaaaatgaacgcggaggaggactcagaagagatgccgagcctcctcacgtccacagtttag

SEQ ID NO: 242000 - DNA, 306 bp, synthetic construct
  misc_feature 1..306: note = Description of Artificial Sequence: Synthetic coding sequence
  source 1..306: mol_type = other DNA
atgttcaccatgactagggctatggaagaggccctgttccaacactttatgcaccagaagctaggaatcgcttacgccatccataagccctttcctttttttgagggcttgctcgataactctatcatcactaagcgcatgtacatggaaagcctagaggcttgcaggaacctcatcccagtgagcagggtggtgcataatatactgacacagcttgaacgtaccttcaatttgagcttgcttgtgactctgttctctcagattaacctcagagaatatccaaatctcgtgaccatttatagatag

SEQ ID NO: 242001 - DNA, 1668 bp, synthetic construct
  misc_feature 1..1668: note = Description of Artificial Sequence: Synthetic coding sequence
  source 1..1668: mol_type = other DNA
atgggtcgcggatttcgcatgtttacgatgaccagagccatggaagaggccctctttcagcattttatgcatcaaaaactcggcatcgcttacgccatccataaaccattcccttttttcgaaggtcttctggataacagtattatcaccaaaagaatgtacatggagtcactggaagcctgcagaaatctgataccagttagcagggttgtgcacaatatcctgacacagttggaacgcacgttcaacctgtcccttctcgtaaccctgtttagccagattaatctgagggagtaccctaacctcgtcactatttaccgatcctttaaacgggtcggagcctcatacgagtggcagagccgggacacgcctatcctactagaggctccaactggtttagctgaaggaagctccctgcacaccccactggccctccccccacctcagcctccccagccaagctgcagcccgtgtgctccgagggtttctgagcctggtacttcaagtcagcagtccgacgagatcctatctgagagtccaagtcctagtgaccctgtactccctttgccagctttgattcaggaggggcgaagtacgagtgtgactaatgataaattgacgagcaagatgaacgccgaggaagactccgaagagatgccatccctgctgacttctaccgtgcaggtagcatcagacaacctcatacctcagattagggacaaggaagacccccaggagatgccacattcacccttggggagcatgccagagatccgagataattccccagagccaaatgatcccgaggagccgcaggaggtgagctcaaccccgagcgataagaagggcaagaagcgcaagcggtgcatctggtctaccccaaagcgacggcataagaaaaagagcctccccggagggacagccagcagcaggcatggtattcagaaaaaacttaaacgggttgaccaagtgccgcagaaaaaggatgacagcacatgcaattcgacagtcgagaccagagcccagaaggcacgtactgagtgtgctcgcaagtcccgctccgaggagattatcgacggcacgtcagagatgaatgagggtaaacgcagtcagaaaacaccttccactcctcgcagagttactcagggcgctgcctccccaggacatgggattcaggaaaaactgcaggtcgtggacaaggttacacagcggaaagacgactctacctggaactccgaggtgatgatgcgagtgcagaaggctcgtaccaagtgcgcacgaaaaagccggcttaaggagaagaagaaggaaaaagatatatgtagcagctccaaacgacggttccaaaagaacatccaccggagaggcaagcccaaaagtgatacagtcgactttcattgcagcaagttaccggtaacctgtggtgaagcaaaagggatactgtacaaaaagaagatgaagcacggctccagtgtgaagtgcatcaggaatgaggatggcacctggctgacccctaacgagttcgaggtagaaggcaaggggcgaaatgccaagaactggaaacgtaacatccggtgtgaggggatgactctgggcgagttgctgaagtccggtctgttgctatgtccaccaagaattaacttaaagcgcgaactaaattccaagtag

SEQ ID NO: 242002 - DNA, 2346 bp, synthetic construct
  misc_feature 1..2346: note = Description of Artificial Sequence: Synthetic coding sequence
  source 1..2346: mol_type = other DNA
atgaccgcacccgagaaaccagtgaagcaggaagaaatggcagccttggatgtggattccgggggtgggggaggcggagggggtggacatggtgagtatcttcagcagcaacagcagcatggtaatggagctgttgctgcggcagctgctgcccaagatactcagccctccccattggctctgctcgccgctacttgctcaaagatcggcccaccctctccaggagatgatgaagaagaagctgctgcggctgccggagcccctgctgcagctggggcaacaggagacttggcgtcggcacagctgggcggtgcccctaaccggtgggaggtgctcagtgccacacccactaccattaaggacgaagccggaaatctggttcagatcccatctgccgcaacttcctcaggccaatatgtgcttcctttgcagaacttgcagaaccagcagatattcagtgtggctccagggtctgactcaagtaatgggaccgtatcgtctgtccagtaccaggtgattcctcagatccaaagcgccgatggtcagcaagtccaaattggctttaccggctcttccgataacggagggattaaccaagagagcagccagattcagatcatacccggaagtaaccagacactattagctagcgggacaccttcggctaacatccaaaatcttatcccacagaccggccaggtgcaggttcaaggtgtggccattggaggtagctccttcccaggtcaaacacaggtcgtggctaacgtacctctgggcctgcctggtaacattacattcgttccaatcaatagtgttgacctggacagccttggcctgagtgggagttcacagaccatgacagcaggaattaacgctgacgggcatttgattaacaccggacaggcaatggattcttccgacaacagcgaacggacaggcgagagagtgagccccgacattaatgagaccaatacagatacagacctgttcgtgcctacctcctctagttcacagttgccggtgaccatagacagcacggggattctgcaacagaatacgaatagcctcaccacttcatccggccaggtccacagctctgacctccagggtaactatatccagagcccagtgtctgaggaaacacaggcccagaatattcaagtgtctaccgctcaacctgtagtccagcatctccaattgcaggagtcccagcagcctacttcccaggctcagatcgtgcaggggataaccccccagacaatccacggagtccaggcgagcggacagaacatttctcagcaggctttgcagaacctgcagctgcagctgaatccaggaacctttctgatacaggcccagacagtgacccccagcggccaggtcacttggcagacgtttcaagtgcagggggttcaaaacctgcagaacctgcaaattcagaacaccgccgcacaacagattactctgacccccgtgcagaccttgactctcggtcaggtagctgccggtggtgccttcacctccactccagtctctttatctacaggccagttaccaaatctccagaccgtaacagtgaattccatagacagcgctggaatccagctgcatcctggagaaaacgccgacagtcccgctgacatccgcattaaggaagaagagcccgatccggaagagtggcagttatcaggggacagtactctgaataccaatgacctgacccatctgcgggtacaggtggttgacgaagagggcgatcagcagcatcaggaagggaaaagacttcgccgagtcgcctgtacctgcccaaactgtaaggaagggggaggccgtggaaccaatctgggcaagaaaaagcagcacatatgtcacatcccgggttgcggaaaagtatatggaaagaccagccacctaagggctcacctccgttggcacagtggagaaagaccatttgtgtgcaactggatgtactgtgggaagagatttacccgatcggacgagctgcagagacatagaaggacacacactggggaaaagaagtttgtgtgtcctgagtgtagcaaacgtttcatgcggtctgatcatctggccaagcatataaaaacccaccagaacaagaagggaatacattccagcagtaccgtgctagccagcgttgaggctgcacgagatgataccctgatcacggcaggcggaacaacactcatcctcgctaatattcagcagggctccgtgtcgggcatcgggactgttaacacaagcgccacaagcaatcaggacatcctgaccaacacagaaatcccactgcaactggtgactgtgtccggtaatgagactatggagtag

SEQ ID NO: 242003 - DNA, 2217 bp, synthetic construct
  misc_feature 1..2217: note = Description of Artificial Sequence: Synthetic coding sequence
  source 1..2217: mol_type = other DNA
taacccgagaaaccagtgaaacaagaagagatggctgccttggatgtagacagcggcggaggtggcggtggtgggggaggacacggggagtatcttcaacagcagcaacagcacggcaacggggcagtggctgcagctgcagcagcacaaactggagacctggcctctgctcagctgggaggtgcccctaatagatgggaggtgttatccgctactcctactaccattaaggacgaagcaggtaacctggtgcagatcccttcagctgccacatcctccggccaatatgttcttcctttgcagaacctgcagaaccaacagatcttctctgtcgccccaggtagtgacagttcaaatggcaccgtgtcttcagttcaataccaagtgataccccagattcagtccgctgacggccagcaagtccagatcggctttaccggcagtagcgacaatggcggaattaatcaggaatcctcccagatccaaatcatcccaggctctaatcagaccctcctggccagtggcaccccatccgctaatattcagaacctgatcccacagactggacaagtgcaggtgcagggggtcgcgatcgggggaagcagtttccccggacaaacacaggtggtggccaatgtgccgttaggactgcccggtaatatcacatttgttcctattaactccgtcgacctggatagtctggggctgtccggctcctcccagaccatgactgctggtatcaacgcggacggacacctgattaacacgggccaggccatggatagcagcgacaattcagaacgcacaggggaaagagttagtccggatatcaacgagacaaataccgataccgatttgttcgttccaacatctagtagtagccagttaccagtgaccatcgactccaccggaatcctgcaacagaatactaatagtttaaccacctcttcaggtcaagtgcacagcagtgatcttcaaggaaactacatacaatctcccgtgtctgaggagacccaagcacagaacatccaggtgtccaccgcccagcctgtggtgcagcacttacaactgcaagagagccagcagccaacctcccaggcacagatagtccagggaattacaccgcagacaattcacggtgtgcaggcttctggtcaaaacatttcccagcaggcgctgcagaatctccaactccaattgaaccccggaacattcctgatacaggcacaaaccgtgacaccgagcggacaagtaacctggcagacgtttcaggtccagggcgtgcagaacctgcagaacctgcagatccagaacacagcggctcagcaaatcaccctgacccctgtgcagactttaacactgggacaagtcgccgcaggaggcgctttcacaagtactcccgtttctttgtccaccgggcagttgcccaacctgcagactgtaacggttaattctattgatagcgcagggattcagctacaccccggagaaaacgctgattctcccgctgacatccgcataaaggaagaggagccagaccccgaggaatggcaacttagcggcgattctacgcttaacactaacgatctgacacacctccgcgtccaggtggttgacgaggaaggggatcaacagcaccaggaaggaaagcggctgcgaagagtggcctgtacttgcccaaattgtaaggaaggtggaggcagagggaccaatcttgggaaaaagaaacaacatatctgccacattccgggatgtggtaaggtttacggaaaaacgtcacacctcagggcccatttaaggtggcatagcggagagcggccatttgtttgcaactggatgtactgtgggaagagatttaccaggtccgatgaactccaacggcatagaagaactcacacaggcgaaaagaaatttgtttgccccgaatgttctaagcgcttcatgcgatccgaccatctcgccaaacacatcaagacccaccagaacaagaagggcattcatagctctagcacagtcctggcgtccgtggaggcagcacgagacgacactctcatcaccgcgggtggtactacactaatcctcgctaatatccagcagggatcggtgagcgggattggtacagtgaacacctccgcaacctctaatcaagatatcctgaccaacaccgaaattcccctgcaactcgtgaccgtctcggggaatgagacaatggaatag

SEQ ID NO: 242004 - DNA, 2142 bp, synthetic construct
  misc_feature 1..2142: note = Description of Artificial Sequence: Synthetic coding sequence
  source 1..2142: mol_type = other DNA
ataggtccaccctccccaggagacgacgaagaagaagctgctgctgccgcaggtgccccagcggcagccggagcgaccggggatctggctagtgcgcagttaggcggtgccccaaaccgctgggaggtccttagtgctactccaaccacaattaaagatgaggccggaaacttggtccagatcccctccgccgctacttcaagcggccagtatgtcctgcctcttcagaatctacagaatcaacagatttttagcgtggcacccggtagcgattctagcaacgggacagtgtcatctgtgcagtatcaggttattcctcagatccagagcgccgatggtcagcaggtccagatcggattcacgggatcctccgacaacgggggtataaatcaggagagttctcagatccagattatcccaggttccaatcaaacacttctggctagtggcactcctagcgcgaatatacagaatctgattcctcagaccgggcaggtacaggtgcagggcgtggccatcgggggatctagcttcccaggtcagactcaggtggttgctaacgtgcccctgggactgccagggaacataacttttgtgccaatcaactccgtagacctcgatagccttggactaagcggctcctcacagacaatgaccgccggaatcaacgccgatggccacctgatcaataccggacaggctatggactcatcagacaattctgagcgaaccggcgaaagagtgtcaccggatattaatgagaccaataccgataccgacctatttgttcccacttcaagcagtagtcaactgcctgtgaccatcgactccactggtatcctccagcagaacacgaatagtttgaccactagttccggtcaggtgcactcaagcgatctgcagggaaattacatccagtctccagtgtcagaggagacacaagctcagaatatccaggtcagcaccgctcagcctgtggtgcagcacctccagttgcaggagagccaacagccaacatcacaagctcagattgttcagggtattactccgcaaaccatccacggcgttcaggcttcaggccagaatatctctcagcaagcactacaaaacctgcaactgcagctgaatcctggtacttttctgattcaggcgcagacagtgaccccctctggacaggtgacttggcaaacgttccaggtgcagggcgttcagaacctgcagaacctgcagatccagaacaccgcagctcaacaaatcacccttactcctgtgcagacccttacccttggccaggtggctgctggcggagcttttacatctacgcccgtcagcctcagcactggacagctaccaaacctccaaacagtcaccgtgaattcgatagactccgccggtatccagctacacccaggagagaatgcggacagccctgcggacataagaatcaaggaggaagaacccgaccctgaggaatggcagctgagtggcgacagcaccctcaatactaacgacttgactcacctaagggtccaggtggtggacgaggagggggaccagcaacaccaggaaggcaagcggctgcggagggtggcgtgtacatgccccaactgtaaagaggggggaggcaggggcacaaatctgggtaagaaaaaacagcacatttgccacataccaggctgcgggaaggtctatgggaagaccagtcacctgagagcacacctgagatggcactccggagaacggccatttgtgtgcaattggatgtattgcggcaagagatttacaagatccgatgagctccagcggcatcgcaggacacacacgggcgagaagaagttcgtgtgccccgaatgttcaaagcgctttatgcgatctgaccatctcgcgaagcacattaagacgcatcaaaacaagaagggaatacactcttcaagtactgttctggcaagcgtggaggctgccagggatgatacccttatcaccgccggtggtaccactctaattcttgccaacatccagcagggctcagtgagcggcattgggaccgtgaataccagcgccacatctaaccaggacattcttaccaacaccgaaataccattacaactggttaccgttagtggaaatgaaacgatggagtag

SEQ ID NO: 242005 - DNA, 2187 bp, synthetic construct
  misc_feature 1..2187: note = Description of Artificial Sequence: Synthetic coding sequence
  source 1..2187: mol_type = other DNA
atggccgctctcgacgtcgacagtggcggaggtggcggtggcggaggcggtcacggagagtatttgcagcagcagcagcaacacggaaacggagccgttgccgctgccgctgctgcccaaactggggatctggcgtccgcccagttgggcggtgcaccaaaccgctgggaggtcctgtccgccacacccaccaccatcaaagatgaggcgggtaacttagttcagatcccttcagccgctaccagcagtgggcaatatgtgctgcctctgcagaacctccagaaccaacagattttttcggtggctcctggatcggacagttcaaatggaacggtcagcagtgtgcaataccaggtcattccgcaaattcaaagcgccgatggacagcaagtacagatcggtttcactggttccagtgataacggtggaatcaaccaggagagtagtcaaatacaaatcatccccggtagcaaccagacactactggcctcgggaacaccttccgccaacattcaaaacctgataccacaaaccggccaggtgcaagtgcaaggcgtcgccatagggggatcaagctttcccggacagacccaggtagtggctaacgtaccccttggcctaccaggcaatatcaccttcgtcccaatcaattccgtcgatttagattccctgggattgtctgggtcaagccagacgatgaccgctggtatcaacgctgatggccacctaattaacacagggcaggctatggattcctctgataactctgaaagaaccggtgagcgggtatcgcctgatatcaacgagaccaacaccgacaccgatctgtttgtgcctacttcctcctcttcacagcttcccgtcaccatcgactccacaggaattctccagcagaataccaactcattaacaacttcaagcggtcaagtacacagtagcgatctgcaggggaattatatccaatctcctgtcagtgaggagacacaggcccagaatatccaagtgtctacagcccagcccgtggtgcagcatttacagctccaggagtcccagcagcccaccagccaggcccagattgtacagggaataactccccagactatccatggagtccaggcttctggacaaaacatttctcagcaggctctgcagaatctgcagctgcagctcaaccccggaaccttcctgattcaggcccagactgtaacgcccagcgggcaggttacatggcagacgttccaggtgcaaggcgtgcagaacctccagaacttgcagattcagaatacagcagcacagcagatcacactcacacctgtacagactctcacactcgggcaggtcgccgctgggggagcatttacctctacgcctgtatccctgagtaccggacagctgcccaacctccagaccgtgacggttaactccatagattccgctgggattcagctgcaccccggtgaaaacgccgacagccccgctgacatccgcatcaaggaggaggagcccgatcctgaggaatggcaattgtctggagacagcacactgaatactaacgacctgacacatctgagagtgcaggtggttgacgaagagggcgatcaacagcaccaggagggcaagcgactgcgaagagtagcttgcacgtgtcccaattgcaaagagggaggcggtaggggtacaaatttggggaaaaagaaacagcacatttgtcacattcccggatgcggtaaagtttacggaaaaaccagccacctcagagcgcacttgagatggcacagcggcgagcgcccttttgtgtgtaactggatgtactgcggcaaaaggttcacacgaagcgacgaattgcaacgacacagaagaacacatacaggtgagaaaaagtttgtatgtccagagtgctctaagcgcttcatgagatcggatcacctggccaagcatattaagacgcatcagaacaagaagggaattcactcatcctccactgtgctcgcttccgtggaggcagcaagagacgacacattgatcacagccggaggtacaacattaatcctggccaacatccagcagggatccgtaagtggcattggaaccgtgaacacatctgcaacaagcaatcaggatattttaaccaatactgagattccacttcagcttgtcactgtttccgggaacgagaccatggaatag

SEQ ID NO: 242006 - DNA, 1545 bp, synthetic construct
  misc_feature 1..1545: note = Description of Artificial Sequence: Synthetic coding sequence
  source 1..1545: mol_type = other DNA
atggtgtgggaagtcaaaactaaccagatgcctaacgccgtgcagaaacttctgctggtgatggacaaacgggcaagtggaatgaatgacagccttgaacttctccagtgcaacgaaaacctcccatcatctcccggatacaatagttgtgatgagcatatggagctggacgaccttccagaattgcaggccgtgcagtcggacccgactcagagcggaatgtaccaactttcaagcgacgtgagccaccaggagtatccacgatcaagctggaatcagaataccagcgatatcccagaaacaacctatcgcgaaaacgaagttgactggctcacagagttagccaacatcgccacctcacctcagtcacccctgatgcagtgctctttctacaaccgctcctctcctgtccacattatagctacgagcaaatctttgcacagctatgctagaccacctccagtatctagctcatccaagtctgaacctgcttttccacaccaccattggaaggaagagactcccgtgcggcacgaacgcgcaaacagtgagagcgagagcgggattttctgcatgtcctcgctgtctgacgatgacgacctcgggtggtgcaactcttggccttctacagtgtggcattgtttcctgaaaggaaccaggctgtgcttccacaagggctccaacaaagagtggcaggacgtggaggattttgccagggcggagggatgcgataatgaggaggacctgcagatgggcattcataaggggtacggatccgacggccttaagctgctgagccacgaagaaagtgtgtccttcggggagtccgtgttaaaactcacatttgaccctggtacagtagaggacggccttttgacagtcgagtgtaagctcgaccaccctttttatgtgaaaaacaaaggttggtcaagcttttacccttctctgacggtagtgcagcatggaataccatgttgtgaagtgcacatcggagacgtttgcttgcctccgggacatccggacgctattaattttgatgactctggggtatttgatacatttaagtcctacgactttacgcccatggatagcagtgctgtttacgtcctcagtagcatggcgaggcagagaagggcctcactgtcttgtggtggcccaggcggtcaggatttcgccaggagtggattctccaaaaattgcggctctcccggttcaagccagctttcatcaaatagtctctacgccaaggccgtgaagaaccatagttccgggactgtctcagccacgtccccaaacaagtgcaaaagacctatgaatgccttcatgctgtttgctaagaagtatcgagttgaatacacgcagatgtatccaggcaaggataatcgtgctatctccgtcatactaggagaccgatggaagaaaatgaagaacgaggaacgtagaatgtacacgctggaggcaaaagcccttgctgaggagcaaaaacggttaaaccccgattgctggaagagaaagcgcaccaactcggggtcgcagcagcactag

SEQ ID NO: 242007 - DNA, 432 bp, synthetic construct
  misc_feature 1..432: note = Description of Artificial Sequence: Synthetic coding sequence
  source 1..432: mol_type = other DNA
atgagtgaccagaagaaagaggaggaagaagaggcggcagcagcagctgctatggcgactgagggaggtaaaacctcggaacctgaaaataataacaaaaagccgaagacctcaggaagccaagactcacagccaagccctctggcattgctggctgcgacatgctcaaagattgggacccccggtgaaaaccaggccaccggacagcagcaaaggaatctccttgagacccttggaaacctgctccccccattgctgctgctgcaaaagcggattactttccttaaccagccgttggttcggctggtccttccggctgtaatcaccggagtccacctgttacagaaactcaaccaggtgatcctgccacccctcgtaaacttcaaatcctacaaatacaagatccaggtcgtcgtctactctactaaatag

SEQ ID NO: 242008 - DNA, 1296 bp, synthetic construct
  misc_feature 1..1296: note = Description of Artificial Sequence: Synthetic coding sequence
  source 1..1296: mol_type = other DNA
atggcttcatccttgctggaggaggaagtgcactacggttcttctcctctggcaatgctcaccgccgcttgctctaagtttggtggcagctcgccgctgcgcgacagtacaacgttaggcaaggcgggaacaaaaaagccttatagcgtcggttcagatctgtccgcttcaaaaacaatgggggatgcatatccagcgccttttacatctaccaatggtctcctgagtccggctggatctccacccgcaccgacaagtggctatgctaatgactacccacctttctcccatagttttcccggacctaccgggacacaggatccgggtcttcttgtgcctaaagggcactcctcttctgattgtcttcccagtgtttatacttccctcgacatgacccatccctatggaagctggtacaaagcaggcattcacgcaggaatcagccctggacctggtaatacccccaccccttggtgggacatgcatcctggcggaaattggctgggcggtgggcaggggcagggtgatgggctccagggaacgcttccgacagggcctgctcagccacctttgaatcctcagcttcctacgtacccttcggatttcgctcccctgaatcccgcaccatatcctgctccgcacctccttcagcccggacctcagcacgtgctacctcaagatgtatacaagcctaaggcggtgggtaactcagggcagctagagggctccgggggagccaagccccctagaggggcatctacaggagggtccggtgggtacggtggctccggagcaggaagaagtagttgtgactgtccgaattgccaggaactggagaggctgggggcagcagcagcaggactgagaaaaaagcctattcactcttgccatattccgggatgcgggaaggtttacggcaaggccagccacttaaaggctcatctgcgttggcacaccggagagcgccctttcgtgtgcaactggctcttctgtggcaagagatttacccgatccgacgaactggagagacacgtgcgcacacatacacgagagaaaaaattcacttgcctgctctgcagcaagcggtttacaaggtctgaccacctgtctaagcaccagaggacacatggagaaccaggacccggacctcccccaagcggccctaaagagctaggggagggacgatcgactggggaggaggaagcaagccagacgcccagaccatcagcatcccccgcaactccagagaaggcccctggcggtagcccagaacaatccaatctgctcgagatctag

SEQ ID NO: 242009 - DNA, 1296 bp, synthetic construct
  misc_feature 1..1296: note = Description of Artificial Sequence: Synthetic coding sequence
  source 1..1296: mol_type = other DNA
atggccagtagtctacttgaggaagaagtgcattatgggagttcgcccctagccatgttaacagctgcatgtagcaaattcggcggtagttctcccttgagggattccacaactttgggtaaggcaggaacgaagaagccatactctgtagggtctgatctttctgcctctaaaactatgggggacgcttacccagcacccttcacttctacaaacggcctgctcagtcctgcaggcagtccgccagctccgacatccggatatgccaacgactaccctcccttttcacattcatttccaggccctaccggaacacaagacccgggactcctggtgcctaaaggccacagtagctcggattgcctgccctccgtgtacacctctctcgatatgacacatccctacgggtcctggtacaaagccggtatccacgccggtatctccccagggccaggcaacacccccacgccttggtgggatatgcaccccggaggcaattggctgggaggtgggcagggccaaggggacgggcttcagggcacgctccctaccggccctgcacaaccaccgctgaatccacagctgcctacctatcctagcgatttcgccccattaaaccccgcaccatatccagccccacatctcctacagcccggaccccaacatgtcctcccacaggatgtttataaacctaaagcggtcggaaactcgggccagctggagggaagcgggggtgctaagccccctcggggtgcctctaccgggggtagcggcggatatggaggaagcggagccggtaggtcgagctgcgattgcccaaactgccaggagctggagagactcggcgctgctgcagctggtcttcggaaaaagcctattcactcctgccacattcccggatgcggaaaggtgtacggaaaagcctcccacctgaaggcacacctccgctggcacaccggcgaaagaccttttgtgtgcaattggctcttctgtggcaaaagatttacccgtagcgacgagttggagcgccacgtacgcacccacacccgggaaaaaaaattcacgtgtctgctgtgctcaaagagatttacgcgcagtgatcaccttagcaagcaccagcgcacccacggtgagccaggcccaggacctcctccttctggcccaaaagagctcggggagggacgctccaccggagaggaggaggccagtcagacacctcgcccaagtgccagtccagccacacccgaaaaggcacccggtgggagccccgagcagtctaatctgttagagatctag

SEQ ID NO: 242010 - DNA, 1242 bp, synthetic construct
  misc_feature 1..1242: note = Description of Artificial Sequence: Synthetic coding sequence
  source 1..1242: mol_type = other DNA
atgctcacagccgcatgttcaaagtttggcggatcctcgcctttacgtgactctaccaccttgggtaaagccggtaccaaaaagccatacagtgtcggcagtgacttgagcgcttctaagaccatgggggatgcctatcccgcaccctttacctcaactaacggtcttctcagccccgcaggttcccctcctgcaccaactagcggttatgcaaatgattacccccctttttcccactcatttcctggcccaacaggaacacaggatccaggactgctcgtgccgaaaggtcactcttccagcgattgtctgccttccgtgtacacttccttagacatgacacacccttatggtagttggtacaaagcgggaatccatgccggtatttctcccggtcccggtaatacccccacaccttggtgggacatgcatccaggcggtaactggcttggaggaggccaggggcagggagacggactgcaaggcaccctgcccactgggccagctcaaccacccctgaaccctcagctgccaacttatccgagcgattttgcgccactcaatcctgcaccgtatcccgctcctcaccttcttcagcctggcccacagcacgtcctgcctcaggacgtgtacaagcctaaggccgtcggcaacagcggccagttagaaggctctggcggagcaaagccccctagaggtgcgtctacaggtgggtctggcggatacggcggatctggggcaggtcgatcctcatgtgactgcccgaactgtcaagagctagagcggctaggtgctgctgccgctgggctgagaaagaagcccatccactcctgtcatatccctggctgcgggaaagtctacggaaaagcatctcatctgaaggcccacctgaggtggcatactggcgagaggccatttgtatgtaactggttgttctgcggtaaaagattcactagatctgatgagctcgaacgccatgttcgcactcataccagagaaaaaaagtttacttgcctgctctgttctaagcggtttacacggtcggaccacctgagcaagcaccagaggacccacggcgaaccgggaccaggtccaccaccttctgggccaaaggagttgggcgaaggccgttctaccggcgaggaggaagcatcacagaccccccgaccatcagcctcacctgctacacctgagaaggctccagggggaagtcccgaacagtcgaacttgctggagatttag

SEQ ID NO: 242011 - DNA, 1401 bp, synthetic construct
  misc_feature 1..1401: note = Description of Artificial Sequence: Synthetic coding sequence
  source 1..1401: mol_type = other DNA
atggccacatccctcttgggcgaagaaccacggcttggctctaccccattggctatgctggcggcaacatgtaataagatcgggtccccaagtccctcccccagcagcttgagcgactcctctagctcctttggcaaagggtttcacccatggaagaggtccagttcctcttcctcggcctcctgtaatgttgtgggaagctccctgtcttccttcggggtaagcggggctagccggaatgggggttccagcagcgctgcggcagctgccgctgctgcagctgctgctgccgcagccttggtgagtgactccttcagctgcggcggatcgcctggctctagtgctttcagcctgactagttcagggggttccagcgctcatagtcaagacggatctcaccagccggtttttattagcaaggtgcatacttctgtggatgggctgcaaggtatttacccgagggtggggatggcccacccgtacgaaagctggttcaaaccgagccacccaggattgggagccgctggcgaggtggggtccgccggagccagctcatggtgggacgtgggcgctggctggatcgacgtgcagaatccaaattcggcggctgccctcccgggatccctacatcccgctgccggtggactacagaccagcctccactcaccgctcggtgggtacaatagtgactactccgggcttagtcatagcgccttctcctcaggggcatctagccatcttttgtctcccgcaggtcaacatctcatggacggattcaagccagtattgccgggttcgtatcctgatagcgcgccaagccctctggctggggcaggtggcagcatgcttagtgccggtccttccgcccctctcggcggttccccaaggtcgtccgcacgccgatactctgggcgtgcgacatgtgattgtcctaactgccaggaagccgagcggcttgggccagcgggagccagtctgaggaggaagggcctgcattcgtgtcatatccctgggtgcggaaaagtgtacgggaagacctctcatttaaaagcccacctgaggtggcataccggtgagcgaccatttgtatgcaactggctgttctgcgggaagagattcactcgaagcgatgaactacagaggcatttacgcacacataccggagagaagcgttttgcatgtccggtctgcaacaaaagatttatgaggtcagaccacctctccaagcacgtcaagactcactctggcggagggggtgggggagggtcggcaggctccggttccgggggtaaaaaggggtctgatactgacagtgagcactcagcagcaggtagccctccttgtcactcgcccgaattacttcagccaccggagcctggccaccgaaacggactcgagtag

SEQ ID NO: 242012 - DNA, 1473 bp, synthetic construct
  misc_feature 1..1473: note = Description of Artificial Sequence: Synthetic coding sequence
  source 1..1473: mol_type = other DNA
atgttggctgctacatgcaacaaaatcgggtccccaagtccatctccctcgagtctatcagatagctccagcagtttcggaaaaggatttcatccctggaaacgttcatcttcatcctccagcgcctcctgcaatgtggttggcagcagcctgagcagcttcggggtatcaggcgcaagtagaaatgggggatctagctctgctgccgctgcggctgctgctgctgctgctgccgcagctgccctggtgtcggacagcttcagctgtggtgggtcgccaggctcctctgcttttagcctcacatccagcagcgccgctgcggcagcagccgctgccgctgccgctgctagcagtagtccctttgcaaatgattacagtgtgtttcaggcccctggcgtaagtggaggtagtggtggcggaggaggcggtggaggcggaggatccagcgcccatagccaagacggatctcatcagccagtgtttatatcaaaagtccacaccagcgtggatggcttgcagggaatctaccctcgcgttggcatggcccacccatatgagtcctggttcaagccatcccacccaggcctaggcgcagctggagaggttggttctgccggtgcgagctcttggtgggatgtaggagccggttggatcgatgtccaaaaccccaatagcgctgccgcactgccaggatctcttcaccctgcggctgggggtctgcaaacatcccttcactcacccctcggagggtacaattctgattatagcggcctgagtcactcagcattttcatccggtgcgtctagccacctgcttagcccggcaggccagcatcttatggatggcttcaagcctgtcctgccagggagttatcctgactccgctccaagccctctcgcgggagcgggagggagcatgttgagcgcaggaccaagcgctccactagggggaagccctaggagttccgcaaggagatactccggcagagctacctgtgactgcccgaactgccaagaggccgaacgtctcggacctgccggtgcaagtctgagacgtaagggcctacactcatgtcacattcctgggtgtggcaaagtgtatggcaagacctcccacttaaaggcccatctgcgatggcacacaggagagcgaccttttgtctgcaactggcttttttgcggcaagcggttcacgcggtctgacgagctgcaacgacacctgagaacccacactggcgagaagcgctttgcatgccccgtgtgtaataagcggttcatgcgtagcgatcatttaagcaaacatgtgaagactcatagtgggggaggcggtggaggaggctccgccggatccgggtctgggggaaagaaggggtccgacacagatagcgagcacagtgccgctggctccccaccgtgccattcgccagagttgctccaaccccctgaacccggacatcggaatggccttgagtag

SEQ ID NO: 242013 - DNA, 1527 bp, synthetic construct
  misc_feature 1..1527: note = Description of Artificial Sequence: Synthetic coding sequence
  source 1..1527: mol_type = other DNA
atggcgacatcgctgctgggagaggagccccgtctcggctcaacaccactggctatgctggcagcaacatgcaacaaaatcggctcgccaagtccttccccttcctctctgtcagacagttctagctccttcggcaagggatttcacccctggaagcggtcatcttcctcctcctcagcatcctgcaacgtcgtgggctcttctcttagctcctttggtgtaagcggtgccagccgcaacggaggcagctcaagcgccgctgccgctgcagctgctgcagccgctgctgctgccgcattggtcagtgactcttttagctgtggaggatctccaggttcaagcgccttttccctgactagtagctctgcagcggcagcggcagcagccgcagcggctgccgcttcatcgagccctttcgctaacgattacagcgtttttcaagcgcctggtgtttccggaggatccggcggtggtggcggagggggaggtgggggatctagtgcacattcacaggacggatctcaccaacctgtgtttatatccaaggtccatacatctgtcgacggcttacagggcatctatcccagagtcggtatggcgcacccctacgaatcctggtttaagccctcccaccccggtcttggtgcagctggtgaagtgggtagcgccggagcgagctcctggtgggatgtcggtgctggctggattgacgttcaaaatccaaactccgcagcagccctccccggatcgctgcatcccgctgcaggcggactccagacatccctgcatagtccattaggaggttataactctgactattctgggctttctcattcagcctttagcagtggagcaagttcacacctgcttagtccagcaggtcagcacctcatggacggcttcaagcccgtgctcccgggtagttacccagattcagccccatcacctttagccggtgcgggaggatcaatgctgtctgcgggaccctctgctcctctcggtggcagcccaagaagttccgcaaggcgttactcagggagggccacctgcgattgtcctaattgccaagaagcggaaagacttgggccagccggtgcatctctgcgccgtaagggactacattcttgccatatccctggatgtgggaaagtgtacggcaagacttcccacctgaaagctcacctgagatggcataccggcgagcgcccatttgtgtgtaactggctgttttgcgggaaacgatttacgcgctcagacgagttgcagcggcatctccgcacgcatacaggagaaaagaggttcgcctgcccagtgtgcaacaaaagatttatgagaagtgatcatctgagcaagcatgtcaagactcactctggtgggggaggcggaggcggatcagccggtagcggaagtggtggtaaaaaagggtctgacacagacagtgagcactctgccgcaggcagtcccccttgtcactcacccgaactgctccaaccacctgagccaggccatcgtaatgggctggagtag

SEQ ID NO: 242014 - DNA, 294 bp, synthetic construct
  misc_feature 1..294: note = Description of Artificial Sequence: Synthetic coding sequence
  source 1..294: mol_type = other DNA
atggacaaacaatcctccgctggtggcgtgaagaggtcagttccgtgtgactctaatgaggcgaatgagatgatgccagagacacccacgggagactccgatcctcaacccgcaccaaagaagatgaaaactagtgagtcaagtacaattctggtggttcgatatagacggaactttaagagaaccagcccagaggaactactaaatgaccatgccagagaaaatcgaattaaccctctccagatggaagaagaggaattcatggagatcatggtcgagattcctgctaaatag

SEQ ID NO: 242015 - DNA, 294 bp, synthetic construct
  misc_feature 1..294: note = Description of Artificial Sequence: Synthetic coding sequence
  source 1..294: mol_type = other DNA
atggacaaacaaagttccgcgggaggcgtcaaacgaagtgtgccttgtgagtctaacgaggtgaacgaaactatgcctgagacccccactggagactccgatccccaacctgctcccaagaagatgaagaccagtgagtccagtacaattctcgttgtccgctaccggagaaatgtgaagaggacctctcctgaagaactgctcaacgatcacgcgagagagaaccggataaacccactccagatggaagaagaagaattcatggagattatggtcgaaattcctgcaaagtag

SEQ ID NO: 242016 - DNA, 1308 bp, synthetic construct
  misc_feature 1..1308: note = Description of Artificial Sequence: Synthetic coding sequence
  source 1..1308: mol_type = other DNA
atgctgcctgcacgatgcgcacggctgctgacccctcatctcctgctggtactggtccaattgtctcctgccaggggccaccgaactacaggccctcgctttttgatctctgacagagacccacagtgtaatttgcactgttcccgcactcagcccaaaccgatctgtgcctccgatggcaggtcttacgagtccatgtgcgagtaccagagagctaagtgcagggacccaacccttggggtggtacatcgcggtcggtgcaaggatgccggtcaatctaagtgtcggctggagagggctcaggcccttgaacaggccaaaaagccacaggaggccgtattcgtgccagagtgcggagaagacggcagtttcactcaggtgcagtgccacacatacaccgggtactgttggtgcgtgaccccagacggtaaaccaatatctgggtcttcagtccaaaataagacgccagtgtgttctggcagtgtaaccgacaagcccctgtcacagggaaactcgggtagaaaagatgacgggtctaagcccacacccaccatggaaacccagccggtgttcgacggggacgagatcaccgctcctactctctggattaagcatcttgttattaaggactctaagctgaataacaccaatattcggaattctgagaaggtctactcgtgtgatcaagaacggcagtcagctcttgaggaagcccagcagaacccacgcgaagggattgtgattccggagtgtgccccagggggactctacaaacccgttcaatgccaccaatcaactgggtattgttggtgtgtgctcgtagacacaggtcgaccccttcctggtacatccacaaggtatgtaatgccctcctgcgaatctgacgccagagccaagactaccgaggccgacgatcccttcaaggatagagaattgccaggatgcccagaggggaagaagatggagttcataaccagcctgctcgatgctctgactacagacatggtgcaggctattaactctgcagccccaaccggcggaggacggttctccgagcccgatccctctcacacattggaagagagggtcgtgcattggtacttcagccagctggatagcaatagcagcaacgatatcaataagcgtgaaatgaaacccttcaagcgatacgtgaaaaaaaaggctaagcccaaaaagtgcgcacgacgtttcaccgattactgtgacctgaacaaggacaaagtgattagccttcccgaattgaaaggctgcttaggagtgtctaaagaagtagggaggttggtgtag

SEQ ID NO: 242017 - DNA, 1305 bp, synthetic construct
  misc_feature 1..1305: note = Description of Artificial Sequence: Synthetic coding sequence
  source 1..1305: mol_type = other DNA
atgctgccagcacgctgcgcaagactcctgactcctcacttgctgctggtgctggtgcaattgagccccgctaggggtcatcggaccaccggcccacgtttcctcatcagcgacagggatcctcagtgcaaccttcattgttcacgtacacagccgaaaccaatttgtgccagtgacggtagatcctacgaaagcatgtgcgagtatcaacgcgcaaagtgccgcgacccgaccctgggggttgtgcataggggaaggtgcaaagacgccggacagtccaagtgccggctggagcgggcacaggccctggaacaggctaagaagccccaggaggctgtttttgtccccgagtgcggcgaggatggttcctttacacaggtgcaatgccacacctacactggctattgttggtgcgtgactcctgacggcaagcccatctcaggatcctcagtgcagaacaagaccccagtatgtagcggctccgtaacggataagcctttgagtcagggtaacagcgggaggaaagatgatgggtcaaaaccgaccccgaccatggagacccagcccgtctttgatggcgatgagattaccgccccaactctctggatcaaacacctcgtgatcaaggactctaaactcaataatacaaacattagaaactcagaaaaagtttactcatgtgaccaggagagacagtccgcactggaggaggcacagcagaatcctagggaaggtatcgtgatcccagagtgcgcaccaggaggattgtacaaacccgtccagtgccatcagagtacaggctattgctggtgcgtgctggtggatacaggtcgcccattgcccggaacctccacgcgctacgtgatgcctagctgtgaatccgatgccagagctaaaacaacagaagctgacgacccgttcaaggatcgggaacttcccggatgcccggaaggtaagaagatggagtttataacgagcctgttagacgctcttacgacagatatggttcaagccatcaattctgctgcgccaactgggggaggtcgcttcagcgaacccgatccctctcacacactggaggaacgtgtggtccactggtatttcagccagctcgattctaattcgagcaatgacattaacaagagggaaatgaaaccattcaaaaggtacgtgaaaaagaaggcgaagccgaagaaatgcgcgagacgattcacggactactgtgatctgaataaggacaaagtcatttccctccccgagctgaaagggtgtcttggagtttcaaaagaagggcgactcgtttag

SEQ ID NO: 242018 - DNA, 1374 bp, synthetic construct
  misc_feature 1..1374: note = Description of Artificial Sequence: Synthetic coding sequence
  source 1..1374: mol_type = other DNA
atgttgctcccacagctgtgttggttaccattgttggccggactgcttccacccgtgcccgctcagaaatttagcgccctcacctttctgagggtggaccaggataaggacaaagattgcagtctagattgcgcgggttccccccaaaagcctctgtgcgcctcagatggtcgaaccttcttgtcgcgttgtgagtttcagcgagctaaatgtaaagatcctcaacttgagatcgcttacaggggtaactgcaaggacgtgagtaggtgcgttgcagaacggaagtacacccaggaacaggcgcgtaaagagttccaacaggtattcattcccgaatgcaatgatgacggaacctattcacaggttcagtgccattcttacacgggatactgttggtgcgtgaccccaaatggcaggcccatcagtggaaccgccgtggctcataaaaccccgcgttgtccaggatctgttaacgaaaagctaccgcagcgagaaggtacgggaaaaaccgtaagcctacagattttttcagtgctaaactctgatgacgccgcagctccagccctggaaacacaaccacaaggagacgaagaagatattgccagtcggtaccctacactgtggacggagcaggtgaagtcaaggcagaataagaccaataagaactctgtgtccagctgcgaccaggaacaccagagtgctttagaagaagcgaagcagcccaaaaacgataacgtcgtgattcctgagtgtgcccacggcggtctctataaacctgtacagtgccaccccagcacaggttactgctggtgtgtgctggttgatacaggccgaccaataccaggtacatctacccggtatgagcagccaaaatgtgacaatacggcccgagctcacccagctaaagctcgagatctttacaaaggacgacagctgcaggggtgccccggagcaaaaaagcacgaattcctaaccagcgtcttggacgctttaagcactgatatggttcatgctgctagtgatcctagttcgagttctggaagattatcggagcccgatcctagtcatactctggaggagcgggtggtccactggtattttaaactactggataaaaacagtagcggggatataggtaaaaaagagatcaaacccttcaagaggtttttgagaaaaaaatctaaacccaagaaatgtgtgaagaagtttgtcgaatattgcgatgtgaacaatgataagagtatcagcgtccaagagctgatgggctgtctgggcgtcgccaaggaggacgggaaggcagacacaaaaaaaaggcatactccaagaggacatgctgaaagtacaagcaaccgccaacctcggaagcagggatag

SEQ ID NO: 242019 - DNA, 1341 bp, synthetic construct
  misc_feature 1..1341: note = Description of Artificial Sequence: Synthetic coding sequence
  source 1..1341: mol_type = other DNA
atgctccttccccaactgtgttggttacccctccttgcgggtttactaccaccagtaccagcccagaagttttccgctttaacatttctccgcgtagaccaggacaaagacaaggattgcagtttagactgtgctggaagcccccagaaacctctgtgcgcatctgacggaaggaccttcctgagccgttgcgaatttcagcgggctaagtgtaaggatccgcagctggagatcgcctacagaggtaattgtaaggatgtctctcgttgcgtggctgaacggaagtatacacaggagcaagctagaaaggagttccagcaggtgtttataccagaatgtaacgacgacggcacatactctcaggtgcagtgccacagttacactggctattgttggtgcgtcactcctaacggccgaccaatcagcggaacagctgtcgcacacaagacgccgcgttgcccagggtcagtcaacgaaaagctgccacaaagggaagggaccgggaagactgatgacgcagcagccccagccctggaaacccagcctcagggggacgaagaggatatagcatccaggtacccaactttatggacagagcaggtaaagagtcgacagaacaagacaaataagaattctgtatcatcttgcgaccaggagcaccagtctgctttggaggaagctaaacagcccaaaaacgataatgtggtcattcctgaatgtgcgcacgggggactctacaagccggtgcagtgtcacccaagtactggctactgctggtgcgtcttggtagataccggacggcctattcctggcactagcacccgctacgagcagcctaaatgtgacaatactgcaagagcgcatccagctaaagccagggacctgtataagggaagacagttgcaaggctgtccaggggctaaaaagcacgaatttctcacgagcgtgttagacgccctgtctactgatatggttcatgcagccagtgacccgtcctcctcaagtgggagactgtccgaacccgatccttctcatacactcgaagagcgtgtcgtccattggtactttaagctgctcgacaagaactcctctggcgacattggcaaaaaggaaatcaagccattcaagagattcctgcggaaaaagtctaagccaaaaaaatgtgtgaaaaaatttgtcgagtactgcgacgtgaacaatgacaaatccatttctgtgcaagagcttatgggctgcctcggagtcgccaaggaggacggcaaggcggacactaagaagcgacacacacctagaggccacgccgaatctacatcaaatcgtcagcctcggaagcagggctag

SEQ ID NO: 242020 - DNA, 1347 bp, synthetic construct
  misc_feature 1..1347: note = Description of Artificial Sequence: Synthetic coding sequence
  source 1..1347: mol_type = other DNA
atgctcctcccgcaattgtgttggctgccgctgctggcgggtcttctccctccagtacctgcacagaaattttcggccctgacctttctgagagttgaccaggacaaagacaaggactgctctctcgactgtgctggcagccctcagaagcctctttgcgcatccgacgggaggaccttcctctctcggtgtgaattccagcgcgctaaatgtaaggacccccagctggaaattgcctataggggtaattgtaaagatgtgagtagatgtgtcgccgagaggaaatatacacaggagcaggccagaaaagagttccaacaggtgttcattcctgagtgtaatgacgacggaacctattcacaggtgcagtgtcattcctatactggttactgttggtgtgttacacccaatgggagaccaataagcggcactgccgtggcccacaaaacccctcgttgtcccggttcagtgaatgaaaagttgccccaaagagagggaacgggcaaaactgacgacgctgctgcccctgctttagaaacccagcctcaaggtgatgaggaagatatcgcatcccggtaccctacactctggacagagcaggtgaaatctcggcaaaacaagacgaacaaaaactctgttagttcgtgcgaccaggaacatcagagtgcccttgaggaggccaaacagcccaaaaatgacaacgttgtaataccggagtgcgctcacggcggactgtataagcctgtacagtgtcacccttccactggctattgctggtgcgtccttgtggatacaggcaggccaatccctggaacctccactaggtacgaacagcctaagtgtgataataccgcccgagcacatccagccaaggcgcgagacctctacaaggggagacagctccagggctgccctggggctaagaaacacgagttcctcacatcagtgctggacgcgttgagtactgatatggtgcatgcggcttccgaccccagtagctcttccggacgacttagcgagcctgatcccagccataccctggaggaaagagtggtacattggtacttcaagttgctggacaaaaactccagcggcgatatcggcaagaaagaaattaaaccgtttaagcgcttcctcagaaagaaaagcaagccaaagaagtgcgttaaaaagttcgtagaatactgtgacgtcaacaatgacaaaagcatcagtgtacaggagctgatgggctgcctgggggtggccaaggaagatggcaaggcagacactaaaaagcgtcatacccccagggggcacgccgaatcaacaagcaatcgacaggagaatccacgaaaggagggctag

SEQ ID NO: 242021 - DNA, 255 bp, synthetic construct
  misc_feature 1..255: note = Description of Artificial Sequence: Synthetic coding sequence
  source 1..255: mol_type = other DNA
aagaagagtaagccaaaaaagtgcgtcaaaaaattcgtcgagtactgcgacgtaaataatgacaaatctatctccgttcaggaactcatgggctgtctaggagtggccaaggaagacggaaaagcagacactaaaaaacgccacacacccagaggccatgctgaatcaacctcgaacaggcaggacgccatggtggtgtcatccaggcctaaagccacaacacaccgaaagagtagaaccttatctcggcgatag

SEQ ID NO: 242022 - DNA, 1275 bp, synthetic construct
  misc_feature 1..1275: note = Description of Artificial Sequence: Synthetic coding sequence
  source 1..1275: mol_type = other DNA
atgcgagctcccggttgtggtcgcctggtgctccctctgctgctccttgccgctgcggctctggctgagggagatgctaaagggcttaaggaaggtgaaactcctggcaattttatggaagacgaacagtggcttagttccattagtcagtacagtggcaaaattaagcactggaatagattcagggatgaagtggaggacgactacattaagtcatgggaagataaccaacagggagacgaagccctggataccacaaaggatccgtgtcagaaagtcaagtgttcgaggcataaggtgtgtatcgcccaggggtaccaacgcgcaatgtgtatcagtcggaaaaagctggagcataggatcaagcagcctaccgtcaagttacatggcaataaagattcaatctgcaaaccatgtcacatggctcaattggcttcggtgtgtgggtccgatgggcacacctatagtagcgtgtgcaaactggagcagcaggcttgcctgtcttccaagcagcttgccgtgagatgtgagggaccttgtccctgtccaacagagcaggccgcaacttccaccgccgatggcaaacctgagacttgtactggacaggatctggcggatttgggggatcgactgagagattggtttcaattactccatgagaacagtaaacagaacggtagtgcatccagcgtagctgggccagcctctgggctcgacaagagtttgggagcgtcgtgtaaagactccattgggtggatgttcagtaaattggacacctcggccgatctcttcctggatcagaccgaacttgccgcaattaacttggataaatacgaagtgtgtattaggcccttttttaatagctgtgacacctacaaagacgggcgagtcagcacagctgaatggtgtttttgcttctggcgcgaaaagcctccctgtctcgccgagctggagcggattcagattcaagaggctgccaaaaaaaagccaggcatcttcattccatcatgcgatgaggacgggtactaccggaaaatgcagtgcgaccagtctagtggcgactgttggtgcgtggatcagttggggctagagctgacggggacaaggacccacggttctcccgactgcgatgatatcgtcggcttttcaggcgacttcgggtctggggtgggctgggaggacgaggaggaaaaagagaccgaagaggcaggtgaagaggccgaggaggaggagggtgaagctggcgaagctgacgatggaggatacatctggtag

SEQ ID NO: 242023 - DNA, 1266 bp, synthetic construct
  misc_feature 1..1266: note = Description of Artificial Sequence: Synthetic coding sequence
  source 1..1266: mol_type = other DNA
atgcgagctcctgggtgtggcaggttagtacttcctctgcttctgttagccgcagccgctctggccgaaggcgacgcaaaaggactgaaggaaggggagactcctgggaatttcatggaagacgagcagtggctgtcatccatcagccagtacagtgggaagatcaaacattggaatcggttccgcgatgacgactacatcaaatcttgggaggacaatcagcagggggacgaggcattagacactacaaaagacccgtgtcaaaaggtgaagtgttctagacacaaggtgtgtattgctcaaggataccagagggcgatgtgtatttctaggaagaagctcgagcatcgcatcaagcaacccacagtgaagctacacggaaataaagactcaatttgtaagccttgccatatggcacaattagcatctgtgtgcgggtctgatgggcatacttattctagcgtctgtaagttggagcaacaggcatgcctttctagcaaacagctggctgtcagatgcgagggcccttgtccatgccccactgaacaggccgctacttccaccgccgacggtaagccagagacgtgcaccggccaggacctcgcagaccttggtgatagactgcgggattggttccagctgttgcatgagaattccaagcagaacggctccgcaagttcagtggcaggtccagcttccggactggataaaagcctgggcgcttcttgtaaagacagcattggctggatgttttcgaaactggacacctccgctgacctgtttctcgatcaaacggaattggcagccattaatctcgacaaatatgaagtgtgcatccgcccattttttaactcttgtgacacatacaaagatggacgggtgagtactgccgagtggtgcttctgcttctggcgagaaaaaccgccttgtctcgctgagctggagcgtatccagattcaggaggcggctaaaaagaaacctggaatcttcatcccatcttgcgacgaggacggctattacaggaaaatgcaatgtgatcagagctctggagactgctggtgtgtggatcaattgggattggagctcaccgggaccaggactcacggaagcccagactgcgacgacattgtgggtttctctggggattttggcagcggtgtcgggtgggaggatgaagaagagaaagagacagaggaagccggtgaagaagcagaagaggaagaaggtgaggccggagaggctgacgacggcggatatatttggtag

SEQ ID NO: 242024 - DNA, 234 bp, synthetic construct
  misc_feature 1..234: note = Description of Artificial Sequence: Synthetic coding sequence
  source 1..234: mol_type = other DNA
atgagagccccaggatgcgggcgactcgtcctgcctctgttactactcgccgcagcagctctcgcagaaggtgacgccaagggcctgaaggagggagaaactcccggaaattttatggaagacgaacagtggctgtcttccatatcacagtactcaggcaaaattaagcactggaaccggttcagagatgtcccatcctccgatccaccatccaccactcaggccactccgtag

SEQ ID NO: 242025 - DNA, 1275 bp, synthetic construct
  misc_feature 1..1275: note = Description of Artificial Sequence: Synthetic coding sequence
  source 1..1275: mol_type = other DNA
atgcgtgcccctggctgtggcagactcgtgttgccactcttgctattagccgctgccgctttagctgagggcgatgcaaaaggactgaaagagggggaaactcccggaaacttcatggaggacgagcagtggctttcttcaatttcccaatattctggcaaaataaaacattggaaccgattccgggacggcattgaagacgattatattaagagttgggaagacaatcagcagggagatgaagccttggacacaacaaaagatccttgccagaaagtgaagtgcagccgtcacaaggtttgcatcgcacaagggtaccagcgtgctatgtgcatttctagaaagaagcttgagcatcggatcaagcagcccactgtgaagttacacggcaacaaagatagtatttgtaagccatgccatatggcacagctggcatccgtctgcggatccgatggacacacttacagctctgtgtgtaaactggaacagcaagcttgcctgtcatcgaagcagcttgccgtgcgttgtgaggggccatgtccctgtcccacagagcaggctgcaacttccaccgctgatggcaagccagaaacttgtaccggacaggatcttgccgacttgggggacagactgcgcgactggtttcagctgctgcacgaaaattccaaacagaatggctctgcatcctctgtcgctgggccagcctccggtctggacaagtctttaggagcaagttgcaaggatagcataggatggatgttttctaagctcgacacctccgccgatctctttttagatcagactgagctcgcagccatcaacctggacaaatatgaggtgtgtatcagaccattcttcaatagctgtgatacatacaaagacggtcgcgtgtctaccgctgaatggtgcttctgcttttggcgggagaagcctccttgtctggccgaactggaacgaatccagattcaggaggctgcgaagaaaaagcccggaatcttcattccatcttgcgatgaagatgggtattatcgtaagatgcagtgtgaccagagctctggcgactgttggtgcgtagaccagctgggactcgaactgaccggcactcgcacccatgggtccccagattgtgatgacattgtaggtttttccggggattttggtagtggcgtcgggtgggaagacgaggaagaaaaagagacagaagaagccggtgaggaggcagaagaagaggagggcgaggcaggtgaggccgatgatggaggctacatctggtag

SEQ ID NO: 242026 - DNA, 1311 bp, synthetic construct
  misc_feature 1..1311: note = Description of Artificial Sequence: Synthetic coding sequence
  source 1..1311: mol_type = other DNA
atgctcaaggtttctgcagtgttatgtgtgtgtgccgctgcctggtgctcacagagtctggcagcagctgccgctgtcgcagctgcgggagggaggtcagatggtgggaatttcttggatgataagcagtggttaaccaccatcagccagtatgataaagaggtaggtcagtggaataaattcagggatgaagttgaggacgactacttccggacctggtctcccggtaagcctttcgatcaggccctagacccagccaaagatccctgtctgaagatgaaatgttccagacataaagtgtgcatcgcccaagactcccagaccgctgtgtgcattagccaccggaggctgacacacaggatgaaagaggcaggcgttgaccacagacagtggcgcggtccaattctcagtacctgcaaacaatgtcctgtggtatatcccagccccgtgtgtgggtctgatggccacacgtacagcttccagtgtaagctagagtatcaggcctgtgtacttggtaagcagataagcgtgaagtgcgagggccactgcccctgcccgtccgataaaccaacaagcacaagccgcaatgtgaagcgtgcctgcagcgacctggagttccgcgaggtcgctaacagactgcgcgattggtttaaagccttgcatgagtccggttcccagaacaaaaaaaccaagaccctcttgcgtccagagagaagtcggtttgacacatcgatactaccaatttgcaaagacagcttgggttggatgtttaacagacttgataccaactatgaccttctactggaccaaagtgaactccggtcaatctacctggataagaatgagcagtgcacaaaggccttctttaatagctgcgacacctacaaagacagtctgattagtaacaacgagtggtgttattgctttcaaaggcagcaggaccctccttgtcagacagagctttcgaacattcagaagcggcagggcgtcaagaaattgttaggacaatacattcccctctgcgacgaagatggctactacaagcctactcagtgccatggttcagtgggtcagtgttggtgcgtggacaggtacggaaacgaggtcatgggtagtaggattaacggagtcgccgactgcgccatcgatttcgaaattagcggagactttgcaagtggtgattttcatgaatggaccgacgacgaagacgacgaagatgatataatgaacgacgaagacgagattgaagatgatgatgaggatgaaggggatgacgacgatggaggcgacgaccacgatgtgtacatttag

SEQ ID NO: 242027 - DNA, 1302 bp, synthetic construct
  misc_feature 1..1302: note = Description of Artificial Sequence: Synthetic coding sequence
  source 1..1302: mol_type = other DNA
atgctgaaggtctctgccgtcctgtgtgtgtgtgcggcagcctggtgcagccagtctctggctgccgcagcagccgtggcggctgcaggtgggagatccgatggaggtaacttcctggatgataaacaatggctgacaactattagccaatatgataaagaggtcgggcagtggaataaatttagagatgacgattactttcggacatggagccctggtaaaccgtttgaccaggccctggacccagctaaagacccctgtttgaaaatgaaatgctccaggcataaggtttgtatcgctcaggactctcagacagccgtgtgtataagccaccggagacttacacacaggatgaaggaagcaggcgtcgatcacagacagtggagaggcccaatattaagcacctgcaaacagtgcccagtggtctatcctagccccgtctgtggctctgatggacacacttactccttccagtgcaagctggaataccaagcttgcgtcttaggtaagcagatctccgtgaagtgtgaggggcattgcccctgccccagtgataaaccgacctcaacttcaagaaacgtgaagcgcgcatgctccgacctagagttcagagaggttgcaaataggttgagagattggtttaaagcactccacgaatctggttctcagaacaaaaagaccaagacccttctcaggcctgagcgctcaaggttcgacacctcaatcctccctatttgcaaagactcgcttggctggatgttcaacagacttgacaccaattacgatttactactggatcagtctgaacttaggagtatttatctcgataagaatgaacaatgcactaaggcattctttaatagctgtgacacctataaagattccctcatttccaataacgaatggtgctactgctttcagagacaacaagatcctccatgtcagactgaactgtcaaatatccaaaagagacaaggggtgaaaaagctgcttggtcagtacattcccctgtgtgatgaagatggctactacaaacctacgcagtgtcatggctctgtcggacagtgttggtgtgtggatagatatggaaacgaggtgatgggatccagaatcaacggcgttgctgattgtgctatagactttgaaatctccggcgactttgcatccggtgatttccatgagtggacggatgatgaagatgacgaagacgacattatgaacgacgaggatgagattgaggacgacgatgaagatgaaggtgacgacgatgatggcggagacgatcatgatgtgtatatctag

SEQ ID NO: 242028 - DNA, 1158 bp, synthetic construct
  misc_feature 1..1158: note = Description of Artificial Sequence: Synthetic coding sequence
  source 1..1158: mol_type = other DNA
atgatcacccaggatcatatccacatgagctccggtctctcgcaggacgactactttcgtacttggtcacccggtaagcccttcgaccaagcactggatccggctaaggacccatgtcttaagatgaagtgcagccgtcacaaggtttgtatagctcaggattcccagacggctgtgtgtatttctcaccgaaggctcacgcataggatgaaggaggctggagtggatcatagacagtggcggggaccaattctgtccacctgcaagcagtgtccagtggtgtacccttcccccgtctgtggcagcgacggtcatacttacagctttcagtgcaagcttgagtatcaggcttgtgttcttgggaaacagatctccgtgaagtgcgaaggccattgtccctgccctagtgacaagcctactagtacttctcgaaatgtcaagagagcatgttctgatctggaattccgagaggtggctaataggctgcgcgactggtttaaagccctgcacgagtccggctctcaaaataagaagacgaagacattgctgcggccagagagatctcggtttgatacatccatcctgccaatttgtaaggactccttgggttggatgttcaatcgcttggacaccaactacgacctgttgctcgatcagtccgaactacggtccatctaccttgataagaatgaacagtgcaccaaagcatttttcaacagctgcgacacgtataaagatagcctcatctcaaataatgagtggtgttactgctttcagagacaacaggaccctccctgtcagactgagctgagtaacattcagaaaagacagggggtcaagaagttactaggtcagtatatccctctatgtgatgaggacggatattacaagccaacacagtgccacggcagcgtgggccagtgttggtgtgtggataggtacgggaacgaggttatgggcagccggatcaacggggtggccgattgcgcgatcgactttgaaatctcaggggatttcgcctctggtgactttcacgagtggacagatgatgaagacgatgaggatgacatcatgaatgacgaagatgagatagaagatgacgacgaggacgaaggtgacgatgacgacggcggtgacgaccacgatgtatatatctag

SEQ ID NO: 242029 - DNA, 1311 bp, synthetic construct
  misc_feature 1..1311: note = Description of Artificial Sequence: Synthetic coding sequence
  source 1..1311: mol_type = other DNA
atgctgaaagttagcgctgtcctgtgcgtgtgcgccgcagcctggtgttcacagtcgctggccgcagctgcggcagttgccgcagctggcggacgaagtgatgggggtaatttccttgatgataaacaatggctgaccacaatttcacagtatgacaaagaggttgggcaatggaacaaatttagggacgaagtagaggacgattacttccgcacttggtctccaggaaaaccttttgatcaagctctcgatcctgctaaagacccctgtcttaagatgaaatgcagccgtcacaaggtttgcatcgcacaagactctcagaccgcagtgtgcatatcccaccggcgtcttacacatcgcatgaaggaggccggtgtggaccaccgtcagtggagaggccctatcctgtcaacatgcaagcagtgcccagtcgtatatccgagtccagtgtgcggttcagatggccacacttacagcttccagtgcaaattggagtatcaggcgtgtgttctggggaagcagataagtgtcaaatgtgagggacactgcccatgcccttctgataagcctacttctacttcccggaacgttaagcgtgcctgtagtgatctagagttccgggaggttgccaatcgcttgcgggactggtttaaggccctgcacgagtcagggagccagaacaagaaaactaaaactctgttgaggccagaaagaagtcgcttcgataccagtattctcccaatctgtaaagacagtttagggtggatgtttaatcgcctcgacaccaactatgatctgctgctcgaccagtcagaactgcgttctatctatctagacaagaacgaacagtgtaccaaggccttcttcaacagttgcgacacgtacaaagattctctgataagcaataacgaatggtgttactgcttccaacggcagcaggaccctccatgtcagacagagttgtccaacattcagaaacgacagggcgtgaagaagctgctggggcagtatatccccctctgcgacgaagatggctactacaagccaactcagtgccacgggtctgtgggtcaatgctggtgtgtggaccggtatgggaatgaggtgatgggaagtaggatcaatggggttgctgattgtgcgattgattttgagatttcaggagacttcgcatcaggtgactttcatgagtggacagacgatgaggatgacgaagacgatattatgaacgatgaggatgagatagaggacgacgatgaggacgagggtgacgatgacgacggaggagacgaccatgatgtgtacatctag

SEQ ID NO: 242030 - DNA, 1302 bp, synthetic construct
  misc_feature 1..1302: note = Description of Artificial Sequence: Synthetic coding sequence
  source 1..1302: mol_type = other DNA
atgctcaaagtctccgcagtgctgtgtgtgtgtgctgccgcttggtgctcacagtctctggctgccgcagcggcagtggctgcagcaggtggtcggagtgacggcggaaactttctggatgataaacaatggctaacaaccattagccagtacgacaaggaagtgggccagtggaataagttccgggacgatgattatttccggacctggagcccagggaagcctttcgaccaggcgctggatcctgcgaaggatccttgcttaaagatgaagtgttcacggcacaaggtgtgcatcgcccaggacagtcagaccgccgtttgcattagccatcggaggctcactcatcgcatgaaggaggccggtgtcgaccatagacagtggcgcggaccaatactcagtacatgcaaacagtgcccagtcgtatacccttcgccagtctgcggatcggatggtcacacctactcctttcagtgtaagctggagtaccaggcttgtgtccttgggaagcagatttccgtgaaatgtgagggacattgcccctgtccttccgacaagccaacatcgaccagtcgcaatgttaaaagggcgtgttctgaccttgaattccgcgaagttgccaataggctgagggattggtttaaggctctccatgaatccggcagccagaataagaaaaccaaaaccctgctgcggcctgaacgcagtcgtttcgacacaagcatcctgccaatctgtaaagacagtttaggatggatgtttaatagactggacacgaattacgacctccttctcgaccagtctgagctgcggtctatatatcttgataaaaatgagcagtgcacgaaagccttctttaacagctgcgacacttataaggacagcttgatttccaataacgagtggtgttactgtttccaacgtcaacaggaccctccttgtcagactgaactgagcaacatccagaagcgccaaggcgtcaagaagttgctggggcagtacatccctctatgcgatgaggatgggtactataaaccaacccagtgtcacgggagcgtcggacagtgctggtgtgtcgacagatacggaaatgaggtgatgggatcccgcatcaatggggtggctgactgtgccatcgacttcgagatctcaggtgattttgcctccggcgacttccatgagtggacagatgatgaggacgacgaagatgacatcatgaacgacgaggacgaaatcgaggacgacgacgaagatgaaggagacgacgacgatggcggtgatgatcatgacgtttatatctag

SEQ ID NO: 242031 - DNA, 348 bp, synthetic construct
  misc_feature 1..348: note = Description of Artificial Sequence: Synthetic coding sequence
  source 1..348: mol_type = other DNA
atgctgaaagtgtctgctgtgttgtgcgtctgtgcagccgcttggtgctctcagtctttggcagccgcagcagcagtcgctgccgctgggggtagatccgatggcggtaattttctcgacgataagcagtggctgaccacaatctcccagtacgacaaagaagtcggtcagtggaataaattcagagacgaggtcgaagatgactacttcagaacatggtctcctggcaaaccatttgatcaggcactagatccagccaaggacccctgtctcaagatgaaatgctcacgacacaaggtgtgtattgcccaggacagccaaaccgctgtctgcatctctcatcgctag

SEQ ID NO: 242032 - DNA, 1311 bp, synthetic construct
  misc_feature 1..1311: note = Description of Artificial Sequence: Synthetic coding sequence
  source 1..1311: mol_type = other DNA
atgttgaaggtgtcagccgttctctgcgtttgcgcagctgcttggtgttctcagagtctggcagccgcagctgccgtcgcggctgccggagggagatccgatggaggtaatttcctcgacgacaaacagtggcttactaccatttcgcaatacgacaaggaggttggtcaatggaataaatttcgtgatgaagtggaagatgactattttaggacatggtctcctgggaagccgttcgaccaggcgctcgacccggcaaaggacccctgcctcaaaatgaaatgcagtcgacataaggtgtgtatcgcacaggatagccagactgccgtatgtatttcccatagaagattgacccaccgcatgaaggaggcaggcgtcgatcaccgtcaatggcgtggcccaatcttatccacttgcaaacaatgcccagtcgtgtatccctctcccgtgtgtggttctgatggtcatacttactccttccagtgcaagcttgaatatcaggcctgtgtcctgggtaagcagatcagtgtaaaatgtgagggtcactgtccatgcccttctgataaacctacaagtacaagccgcaatgtcaagcgcgcttgcagtgatcttgaatttcgggaagtcgcaaacagactacgcgattggttcaaagcccttcacgagtccggatcccagaataagaaaaccaagacactgctcaggcctgagcgcagccgcttcgacaccagcatactgcctatttgcaaagactcacttggttggatgttcaaccgacttgatacgaattacgacttactactagaccaaagcgaactgcgtagtatatatctggacaagaatgaacagtgcaccaaggctttcttcaacagctgtgacacgtacaaagatagcctgatatctaataacgagtggtgctactgctttcagcggcagcaggacccaccctgccaaacagaactcagcaacattcaaaagaggcagggggtcaagaagctgctgggtcaatacatacccctgtgtgacgaggatgggtattacaagcctacccaatgtcacgggtccgtgggtcagtgctggtgcgtggatagatacggtaatgaggttatgggcagccggataaacggcgtcgccgactgtgcaatcgacttcgaaataagtggagactttgctagtggcgattttcatgagtggacagacgacgaggacgacgaggatgatattatgaacgacgaggatgagattgaagacgacgacgaggatgagggcgacgacgacgatggcggtgacgatcacgatgtgtatatctag

SEQ ID NO: 242033 - DNA, 486 bp, synthetic construct
  misc_feature 1..486: note = Description of Artificial Sequence: Synthetic coding sequence
  source 1..486: mol_type = other DNA
atgctcaaagtgagcgcagtgctctgtgtctgcgccgctgcttggtgctcccagtccctcgccgctgccgcagcggtcgcagccgcaggaggcagaagcgacggcggtaacttccttgatgacaagcaatggttgaccacaattagccagtacgacaaggaagtggggcagtggaataagttcagagatgacgattattttagaacatggagcccaggaaaaccttttgaccaggcactggaccctgcaaaggacccttgtttgaagatgaagtgctccaggcataaggtgtgtattgcccaagattcgcagactgcagtgtgcattagccacagacggttgacccaccgaatgaaagaggcgggtgtggatcacagacagtggaggggaccgatcttatctacctgtaagcagtgtcctgtcgtctaccctagtccagtgtgtgggagcgacggtcacacatattcttttcaatgtaagctttag

SEQ ID NO: 242034 - DNA, 522 bp, synthetic construct
  misc_feature 1..522: note = Description of Artificial Sequence: Synthetic coding sequence
  source 1..522: mol_type = other DNA
atgttaaaagtgagtgcggtcttgtgtgtttgtgcggctgcttggtgttctcagtctctggcagccgcagcagccgtggcagcagccggtgggagaagtgatggtggtaactttcttgatgacaaacagtggctgacaaccattagccagtacgacaaagaggtaggccagtggaataaatttagagatgatgattacttccggacatggtccccgggaaagcctttcgaccaggcatgcagcgatttggaattccgggaggttgctaacaggctgcgcgattggttcaaggccctgcacgagtctggcagccaaaacaaaaagacaaagaccctcctcagaccagagcgatcaagatttgatacctcaattttaccaatctgcaaagactccctcggatggatgttcaatcgactggacacaaactatgacctgctcctggaccagtcggagctccggtccatttacctcgataaaaacgagcagtgcacaaaggcttttttcaacagctgtgacacctag

SEQ ID NO: 242035 - DNA, 1182 bp, synthetic construct
  misc_feature 1..1182: note = Description of Artificial Sequence: Synthetic coding sequence
  source 1..1182: mol_type = other DNA
atgctcaaggtctcagctgtgctttgtgtgtgtgcggctgcttggtgcagtcagtcattagcggcagccgcagcagttgcagctgctggtggcagatccgatggcggtaactttctggatgacaagcaatggctcaccactatatcccagtacgataaggaggtagggcaatggaacaaattcagagacgacgattacttcaggacctggagtcctgggaagccattcgatcaagcattagacccagccaaggatccttgcttaaaaatgaagtgctcacgccacaaggtgtgtatagcccaggatagtcagaccgctgtttgcatctcgcatcggagactgacccacagaatgaaggaggctggcgtagatcacagacagtggaggggtcctatcttatcaacttgcaaacagtgcccagtcgtctacccgtcaccagtttgtggctccgacggacatacgtatagcttccagtgtaagctcgagtatcaggcgtgcgtgctgggcaaacaaatttctgtcaaatgcgaaggacattgtccttgcccgagcgataaacccacctctacatctcgcaacgtcaagaggggtttcgatacatccatccttccaatttgcaaagattccttaggctggatgttcaatagactcgacactaactacgacctccttttggaccagtccgagctgaggtccatttatctcgacaagaacgaacagtgtacgaaagcgttcttcaactcctgcgatacctacaaggatagtttaatctccaataacgaatggtgttactgcttccagcggcagcaagaccctccctgccagacagaactcagcaacattcaaaagagacagggcgtgaagaagctactgggccagtacatacctctgtgtgacgaagatgggtattataaacctacccagtgccacggatccgtaggccagtgttggtgcgtagatcggtacggcaatgaggtgatgggaagcagaattaacggagttgctgattgtgccattgacttcgaaatctctggagactttgccagtggagattttcatgaatggacagatgatgaggacgatgaagacgacatcatgaacgatgaggacgaaattgaggatgatgatgaagacgagggcgacgacgacgatggaggcgatgaccacgacgtatatatatag

SEQ ID NO: 242036 - DNA, 1302 bp, synthetic construct
  misc_feature 1..1302: note = Description of Artificial Sequence: Synthetic coding sequence
  source 1..1302: mol_type = other DNA
atgctcaaagtcagcgctgtgctgtgcgtgtgcgctgcagcttggtgtagccagtccctcgctgccgcagccgctgttgccgcagctggagggagatccgacgggggtaactttcttgacgataaacaatggctgacaactatttcacagtacgataaagaggtcggtcagtggaataaattccgggacgatgactacttcagaacttggagtccaggcaaaccttttgaccaggccctggatcccgctaaggacccatgcctaaagatgaagtgtagtagacacaaagtttgcatcgcccaggactcacagaccgcagtgtgcatctctcatcggagattgacgcatcggatgaaggaggccggagtagatcacagacagtggcgtgggcctatcctatcaacatgcaaacaatgccccgtcgtgtacccgtccccagtgtgtgggtccgatggtcacacctacagcttccagtgcaaactggaataccaagcttgcgtcctgggaaagcagataagtgtgaagtgtgaaggccactgcccctgtccaagtgacaaaccgacatctacatcgagaaatgtcaaacgtgcttgctcagacctggagtttcgcgaggttgcgaaccgcctccgcgactggttcaaagcactgcatgagtcagggagccagaataagaagacaaaaaccttactcagaccggagaggagccggtttgacacaagtatcctaccaatctgtaaggattcattaggttggatgttcaatcgcctggacaccaactatgatctattactcgatcagtcagaactcaggagcatatatctggacaagaatgaacagtgtaccaaagcgttctttaattcttgcgatacctataaagattcactgatctccaataacgagtggtgttactgtttccaaaggcaacaagatcccccatgtcagaccgaacttagcaatatccaaaaacggcaaggcgtaaagaaacttttaggacagtatatacccttatgcgacgaggacgggtactacaaacccacacagtgccacggttccgtgggtcagtgctggtgtgtggatagatacgggaatgaagtgatgggttctcgaattaacggcgtggctgattgcgcaatcgacttcgaaatatccggagatttcgcctccggcgattttcacgaatggacagacgatgaagacgatgaggacgacattatgaatgacgaggacgaaatcgaggacgacgatgaggatgagggggatgatgacgacggcggagacgaccacgacgtgtacatttag

SEQ ID NO: 242037 - DNA, 1311 bp, synthetic construct
  misc_feature 1..1311: note = Description of Artificial Sequence: Synthetic coding sequence
  source 1..1311: mol_type = other DNA
atgctcaaggtgtctgctgtgctgtgcgtgtgcgccgctgcctggtgcagccagagtttggctgccgctgctgcagttgcggcagctggaggaaggtccgacggtggcaatttcctggacgacaagcagtggctgactaccatatcacagtacgacaaagaagtcggccagtggaacaaatttcgcgatgaagtggaggatgactactttcgtacttggagccctgggaagccatttgatcaagctctggacccggctaaggacccctgcttgaagatgaagtgcagcaggcacaaggtctgcattgcgcaagactcacagacagctgtgtgcatcagccatcgcagactgactcaccggatgaaggaggccggagttgaccacaggcagtggcgcggacctatactatccacctgcaagcaatgcccagttgtctatccttctccagtgtgtggcagtgatggccatacttactccttccagtgtaagctggagtaccaagcctgcgtactgggaaagcagatctcagtgaagtgcgagggccactgtccatgcccttctgacaagcccacctctaccagtagaaacgtaaagagggcttgcagcgatttggagttccgagaggtggccaatagattacgtgattggttcaaagccctgcacgaatccggaagtcaaaacaaaaagaccaagacattgctgcggccagagcggtctcggttcgatacatcaatccttcctatatgtaaagactcccttggctggatgtttaatagactcgatacgaactatgacctgctcctggatcagtccgaactccgtagtatatatctggataagaatgaacaatgcaccaaagccttcttcaatagttgcgatacctacaaggattctctaatttcaaacaacgaatggtgctactgcttccagcgccagcaggaccccccatgccagaccgagctgagtaacatacagaaacgccagggcgtcaaaaagctactgggtcaatacattcctctgtgcgacgaagacggctactacaaacccacccaatgtcatggatccgttggccaatgttggtgcgtcgaccggtacggtaacgaggtgatggggtccagaattaatggcgttgctgattgtgccatcgattttgagatttctggcgacttcgcatccggtgactttcacgagtggactgacgatgaggatgacgaagatgatatcatgaacgatgaagatgaaattgaggatgatgatgaggatgagggcgatgacgatgacggcggagacgatcacgacgtctatatctag

SEQ ID NO: 242038 - DNA, 348 bp, synthetic construct
  misc_feature 1..348: note = Description of Artificial Sequence: Synthetic coding sequence
  source 1..348: mol_type = other DNA
atgctgaaggtcagcgccgtgttatgcgtgtgtgctgccgcttggtgttcccagtctctggccgctgccgcagctgtagcggctgctgggggacgatccgatggaggtaactttctggatgacaagcagtggctgactacaatcagccagtacgacaaagaagtgggacaatggaacaagttcagagacgaggtggaagatgactatttccgcacttggtctcccggaaagccgtttgatcaggccttggatcctgcaaaagatccctgcctgaagatgaaatgctctcgccacaaggtgtgcatcgcacaggactctcagaccgccgtttgtatatctcatagatag

SEQ ID NO: 242039 - DNA, 942 bp, synthetic construct
  misc_feature 1..942: note = Description of Artificial Sequence: Synthetic coding sequence
  source 1..942: mol_type = other DNA
atgctgaaagtgagcgccgtcctctgtgtctgcgcagccgcttggtgctctcagtcactggccgctgctgctgctgtggccgctgctggtggcaggtcagacggagggaacttcctcgacgataagcagtggctcactaccatctcacagtacgacaaggaagtcggtcagtggaacaaattcagagacgacgattacttcaggacttggagccctggtaagccattcgaccaggctctggatcccgctaaggacccgtgtctgaaaatgaagtgctctcgccataaggtgtgcattgctcaggacagtcagacggccgtctgcatctctcacaggcggctgactcatcgaatgaaagaggcaggggtcgaccaccggcaatggcggggaccaatactgtccacctgtaaacagtgtccggtcgtctacccatctccggtatgcggaagtgacggccacacatactctttccaatgtaagcttgaatatcaggcctgtgtcttaggcaagcagatttccgtgaagtgtgagggtcactgcccatgcccatccgataagcctacatcgacatcccggaacgtcaagagggcatgttctgacctcgagtttagagaagtggccaacagacttagagactggtttaaagccctgcatgaaagtgggtcacagaataagaaaacgaaaacactgttacgacctgagaggtcacgttttgatacaagcatcctgccaatttgcaaagacagccttggttggatgttcaacagactcgacaccaattacgacctgcttctcgaccagtccgagcttcgatccatatacctcgacaaaaatgaacagtgtaccaaggcattctttaattcgtgtgatacttacaaggattcactcatctctaacaacgaatggtgctattgctttcagaggcagcagggcaagagatag

SEQ ID NO: 242040 - DNA, 1017 bp, synthetic construct
  misc_feature 1..1017: note = Description of Artificial Sequence: Synthetic coding sequence
  source 1..1017: mol_type = other DNA
atgctgaaggtttccgcagtgctgtgcgtgtgcgcagctgcctggtgttcgcagtccctggccgctgccgctgctgtggccgcagccggaggacggagtgacggaggtaactttctggatgacaagcagtggctcaccacaattagtcaatacgacaaagaagtcggtcagtggaacaagttccgtgattgtaagctcgagtatcaagcctgcgtcctgggtaaacagatatccgtgaagtgtgagggccactgtccttgcccctctgataagcccacgtcaacctcgcgcaacgtgaaaagggcctgtagcgatctggagtttagggaagtggctaatcgcttgcgggactggttcaaggcgctgcacgagtctggctctcagaacaagaagaccaagacactcttacggcctgagagaagcagatttgatacatcaatccttccaatttgcaaagattctttaggctggatgttcaatcgattagatactaactacgacctgcttctggaccaatccgagctccgcagcatatatctcgacaagaacgaacagtgtactaaggccttcttcaactcatgtgacacctataaggattccctgatctctaataacgaatggtgctattgtttccagaggcagcaagacccaccctgtcagaccgagctttccaacatccagaagagacagggggttaaaaagctgttggggcagtacatcccactttgcgatgaggacgggtactataagccaacacaatgtcacggctctgtgggacagtgttggtgcgtggatcggtatgggaatgaagtgatgggctccaggatcaatggggttgcagattgtgcaatcgattttgagatctcaggggatttcgcttccggagactttcacgaatggacagacgatgaagacgatgaagatgatattatgaacgatgaggacgagatcgaggacgatgacgaagatgaaggtgatgacgatgacgggggagacgaccacgatgtctatatttag

SEQ ID NO: 242041 - DNA, 1023 bp, synthetic construct
  misc_feature 1..1023: note = Description of Artificial Sequence: Synthetic coding sequence
  source 1..1023: mol_type = other DNA
atgatcaacaacgggtccccccagagcctctcaatgactcgcaaatctgatagtgggaccaatagtgaaacaatgaaagaagccggagttgatcaccgccaatggagaggacctatcctgtccacttgtaagcagtgccctgttgtctacccctcgccggtgtgcggcagcgacggccacacgtacagttttcagtgcaagctggagtatcaggcatgcgtcctcggtaagcaaattagcgtgaagtgcgaagggcactgcccatgtccatccgataagcctacctcgacctccagaaatgttaaaagagcctgctccgatctggagttccgtgaggtagcaaatagactccgtgactggttcaaagcactgcacgaatccggtagccagaataaaaaaaccaagacgctattgcgacccgaaagatcaagattcgacactagtattcttcctatctgtaaggattcactaggatggatgttcaacagattagacaccaattacgatttgcttttggatcagtctgagctacggagtatctacctggataaaaacgagcagtgcaccaaagcttttttcaacagctgtgacacatacaaagacagtctcatctccaacaacgaatggtgttactgcttccagcggcaacaagatcccccttgtcagacagagcttagcaatatccagaaacggcagggagtcaagaagcttctgggccaatatatcccgttatgtgacgaggatggatattacaagcctacgcaatgtcatggtagtgtcggccagtgctggtgtgtggataggtatgggaacgaggttatgggctctcgaatcaatggggtggcagactgcgctattgactttgagatcagcggcgattttgcctccggagactttcacgaatggacagatgacgaggacgacgaggatgatatcatgaatgacgaagacgagatcgaggacgatgatgaggacgaaggggatgatgatgacggtggagacgatcacgatgtgtacatttag

SEQ ID NO: 242042 - DNA, 915 bp, synthetic construct
  misc_feature 1..915: note = Description of Artificial Sequence: Synthetic coding sequence
  source 1..915: mol_type = other DNA
atgaaatgtagccgtcacaaggtctgcatcgcccaggactcacagactgcagtctgcatatcacaccgccgattgactcacaggatgaaggaagcgggagtggaccataggcaatggcggggacctatattatccacctgcaagcagtgtcccgtagtgtacccttccccagtttgcggaagcgatggacacacttactcttttcaatgtaagctggagtatcaggcatgcgtgctcggcaagcagatttcagtgaaatgcgaaggacactgtccgtgcccaagcgataagcccaccagcaccagcagaaatgtcaagcggggatttgacacctctattctgccgatctgcaaggactctttgggctggatgtttaacaggttggatacaaattacgacctgctacttgaccagtctgagctgagaagcatttacctggacaagaatgagcagtgcaccaaggctttctttaattcatgtgacacatacaaggactccctaatcagcaacaatgagtggtgttactgtttccagagacagcaggatccaccatgccaaaccgaattgagcaacatccagaagcggcaaggcgtaaagaaactgctgggacaatatatacccctgtgcgatgaggacggctactataagcccacccagtgccacggttcggtcggtcaatgttggtgtgttgaccgttacgggaacgaagtcatgggttctaggatcaacggcgtcgctgactgtgccatcgatttcgagatctcaggcgactttgccagtggcgacttccatgaatggactgacgacgaggatgatgaggatgacattatgaatgacgaagacgagatcgaggatgacgacgaggatgagggagacgacgatgatggaggcgacgaccacgacgtgtacatctag

SEQ ID NO: 242043 - DNA, 951 bp, synthetic construct
  misc_feature 1..951: note = Description of Artificial Sequence: Synthetic coding sequence
  source 1..951: mol_type = other DNA
atgaaagaagctggggtcgatcacagacagtggaggggcccaatactctctacttgcaagcagtgccctgtggtgtacccctcccccgtgtgcgggtcagacggccacacgtactcctttcagtgtaagttagagtatcaggcctgtgtcttgggcaagcagataagcgtgaaatgtgaagggcactgtccttgcccctcagataaacccaccagtacgagcaggaatgtgaagcgcgcatgttccgacctcgagtttcgggaggtggccaatcggctgcgagattggttcaaggcactccacgaatccggttctcagaataagaagactaagacgttattgagaccagaaaggtccagattcgataccagcattttgccaatctgcaaggactccctaggatggatgttcaaccgcctggataccaactatgacctgctcctggatcagagcgaattgagatctatctaccttgataaaaatgagcaatgcaccaaggcatttttcaactcctgtgacacgtataaggattcattgattagtaataatgaatggtgttactgcttccaaaggcagcaggatcccccttgtcagacagagctgtctaatatccagaagcggcagggcgtcaaaaagctgctgggccaatacatccctctgtgcgacgaggacggctactacaaaccaacacagtgtcatgggtctgtgggacaatgctggtgcgtcgaccgctacgggaatgaagtaatgggtagtagaatcaacggggtcgcggattgcgcgattgatttcgaaatttctggcgacttcgcttctggagattttcatgagtggaccgacgatgaagatgatgaggatgacattatgaatgatgaagatgaaatcgaggatgatgacgaggatgaaggggacgacgacgatgggggtgatgatcacgacgtgtatatttag

SEQ ID NO: 242044 - DNA, 1017 bp, synthetic construct
  misc_feature 1..1017: note = Description of Artificial Sequence: Synthetic coding sequence
  source 1..1017: mol_type = other DNA
atgctcaaagtcagcgcagttctgtgcgtgtgtgcagcagcctggtgttcccaaagtttggccgcagctgcagctgttgccgcagcaggtggcaggtcagatggcggtaacttcctggatgataaacagtggctgaccacaatttcgcaatatgacaaagaggtgggccagtggaacaaattccgggattgcaaactggagtaccaggcctgcgtgttgggcaaacaaattagcgtgaagtgcgaggggcattgtccatgtccatctgataaaccaacttccacctcaaggaacgtgaagcgcgcttgcagtgatctggagtttcgggaagttgccaatcggctccgggactggttcaaggccttgcacgagtctggcagtcaaaacaaaaagaccaagaccctccttcggccagagcgcagcagattcgatacatccatacttcctatttgcaaggattcattagggtggatgttcaacaggctggacacaaattatgacctgttgctcgaccagtcagagcttagaagtatctacttagacaaaaacgaacaatgtactaaggctttcttcaatagctgcgacacgtataaagattctttgatctcaaacaatgagtggtgctactgctttcaaagacagcaagaccctccttgccagaccgagttgtccaacatacagaagcggcagggagtaaaaaagctgcttgggcagtacattcctctttgcgatgaagacggctactataagcccacacagtgccatggctccgtgggccaatgctggtgcgttgaccgctatggcaatgaggtaatgggatctcggattaacggtgtagctgactgtgctatcgacttcgagatatccggggactttgcttccggcgattttcatgaatggaccgatgatgaggatgatgaggatgacatcatgaatgacgaagatgagattgaggatgacgacgaggacgaaggggatgacgacgatggaggggacgaccatgatgtatatatctag

SEQ ID NO: 242045 - DNA, 13740 bp, synthetic construct
  misc_feature 1..13740: note = Description of Artificial Sequence: Synthetic coding sequence
  source 1..13740: mol_type = other DNA
atggagactaaggaaaatagatgggtgcctgttaccgtcttaccgggttgcgtcgggtgcagaacggttgctgctctggcttcgtggacagtgagagacgtgaaggaaaggatcttcgctgagacagggtttccggtctctgaacagaggttatggagaggcggaagagaactctcggattggatcaaaattggggacctgacctccaaaaactgccacctttttgtcaacctgcaatccaagggccttaagggaggaggcaggtttggacagaccacacccccactggtggacttccttaaagacatcttaaggaggtatcctgaaggcggacagatcttgaaagaactgatccagaatgccgaagacgctggagccacagaggtgaagtttctctacgatgagactcaatacggcactgagaccttgtggtcaaaagatatggcaccatatcaggggcctgccctatacgtgtacaataacgcagtttttaccccagaggactggcacggaatccaggaaattgctagaagccggaaaaaggacgaccccttgaaagtgggacggtttgggataggatttaatagcgtgtatcatatcaccgacgttccctgcattttttctggcgaccagataggcatgcttgatccacatcagaccctttttggacctcacgagtccggccagtgttggaacctgaaggacgacagcaaggaaatttctgaactttcagaccagtttgccccttttgtcggcatctttggatcgacaaaagagactttcataaacggaaatttccccggaacattcttcaggtttcccctgagacttcagccatctcagctgagcagcaacctctataacaaacagaaagtgcttgagttgttcgagtcatttcgggctgatgctgatactgtgcttctcttccttaaaagtgtacaagacgtgtcgctgtacgtccgagaagccgacggcaccgaaaagcttgtgtttcgggttaccagtagcgagtctaaggccttgaagcacgagcgccctaactccatcaaaattttgggaactgcaattagtaattactgtaaaaaaacacccagtaataatattacttgtgttacctatcacgtcaatatcgtgctcgaagaggagagtactaaggacgctcagaaaactagctggctggtatgcaattcggttggcggtcggggaattagctccaaactggactcgctggcggacgaattgaagtttgtccccatcattggaattgccatgcccctgtctagccgggatgatgaagccaaaggggcaaccagtgatttcagcggaaaggctttttgcttcctcccactaccgcctggcgaggaatcaagcaccggcctgccggtgcatatctccggattctttggactgacagataaccggcgatccattaagtggcgagagctggatcagtggcgggatcccgctgccctctggaatgagtttttagtcatgaacgtcgtaccaaaggcatatgctaccttaattttggactccatcaaaagactggagatggagaagagctctgactttccactgagcgtcgacgtgatctacaagctgtggcccgaggcatccaaggttaaggtgcactggcagcccgtgctggagccccttttcagcgagctcctccaaaacgccgtgatctattccattagttgcgattgggtgaggctggagcaagtatacttttccgaactggatgaaaatctggaatatactaagaccgttctaaactacctccaatcgtccggaaagcagatcgctaaggtgccaggcaatgtcgacgcggctgtccagctgaccgctgcatctggaactacacccgtaagaaaagtcacacccgcttgggtccgacaagttctgaggaagtgtgctcaccttggctgtgctgaagaaaagctacatctactcgaatttgtgctgtcagatcaggcctacagcgaattgctggggctcgagcttctacctctccaaaacggcaactttgtacctttctcttctagtgtatcagaccaagatgtaatctatataaccagcgccgagtatccacggtcccttttcccctctctggagggccgattcatcttggacaacctcaagccacacttggttgcggctctgaaggaggccgctcaaacccggggacggccttgcacccagctgcagctacttaatcccgagcgatttgctcgcctgattaaggaggtgatgaacaccttctggccgggtcgcgaactgattgtgcaatggtacccatttgatgaaaaccgtaaccacccatcagtgtcttggctgaagatggtatggaagaatttgtatatacacttttctgaggacctgaccttatttgatgagatgcccctgatccctcgaactatattagaggaggggcaaacctgtgtcgaattaatacgtctgagaatcccttctctggtgattctcgatgacgaaagtgaagcccaactgcccgaatttttggctgacatcgttcagaagctggggggatttgttctgaagaagctcgatgcctctatacaacaccctttaataaagaaatacattcattccccactcccatcggccgtattacaaattatggagaaaatgccgctgcagaagctgtgcaatcaaattacctcgctcctccccacccacaaggacgcactcaggaaatttctggcaagcttaacggattcgagcgaaaaggaaaaacggatcatacaggaattggctatcttcaagagaataaatcactcgtcagaccagggcatttcttcatatactaaactaaagggctgcaaagttctccaccacacagctaaacttcccgcagatttgcggctctccatatcagtgatcgatagttccgatgaggctacgatccggttggcaaacatgttaaaaattgagcaacttaaaactacttcctgtttaaaactggtgctgaaggatatcgagaatgcattttactctcacgaggaagtaacacagcttatgctctgggtgcttgagaacttatcgtcgctgaagaatgaaaaccctaacgtgctcgagtggctaaccccattgaaattcatccagatctcacaagagcagatggttagtgctggtgagctcttcgaccccgacatcgaagtacttaaagatcttttctgtaacgaagagggcacttatttccctccgagtgtttttaccagtcctgatatactccattctttgcggcagattggactaaaaaacgaggccagcctgaaggaaaaagatgtcgtgcaggtggccaaaaagatcgaggctctgcaggtaggcgcttgccctgaccaggatgttcttttgaaaaaagcaaagactctgctactggtccttaacaagaaccacacactgcttcagagttctgaaggcaagatgactctcaaaaagatcaagtgggtgcccgcttgtaaagagcgccctcccaactatccagggtcgttggtgtggaagggcgatctttgtaatctgtgtgcgccaccagatatgtgtgatgtgggacacgcgatactcataggaagtagtcttcccctggtcgagagcatacacgtaaatctcgagaaagcgctcgggattttcaccaagccctctctgagcgctgtcctgaaacatttcaaaatcgtggtggattggtattcatccaagacctttagtgatgaggactactaccagtttcagcacatactgctggaaatctacggttttatgcatgaccacctaaacgagggtaaagactcctttagagcactgaaatttccatgggtctggactggcaaaaagttctgccccctggcccaggccgttatcaaacccatccacgatctggatttgcagccgtatttgcacaatgtccctaaaacaatggccaaatttcaccagctctttaaggtatgtggaagcattgaagagctcacctcagaccacatctctatggtgattcagaaaatttatcttaagtccgatcaggatcttagtgaacaggaaagcaaacagaacctgcatttaatgctaaacataatcaggtggctctattcaaatcagatacccgcttcccccaatacacccgtcccgatccaccattctaagaacccctccaaacttattatgaagcccatacacgagtgttgttactgcgatattaaagtggacgacctaaatgatctgttggaggattctgtggagcctattattctggtccatgaggatatcccaatgaaaaccgccgaatggctgaaggtaccttgccttagtactagactgatcaaccccgagaatatgggcttcgagcaatctggccagagagaacccttaaccgtccgtataaaaaatattctcgaagaataccccagcgtgtcagacattttcaaagaactgctccaaaatgccgacgacgccaacgcaactgagtgcagttttctgattgacatgcgaaggaatatggacattcgggagaatctgctggatccgggtatggctgcgtgtcatggacccgcactctggtctttcaacaacagccagttctcagactcagactttgtgaatatcacccgactgggcgagagtctgaagcgtggcgaggtagataaggtggggaagtttggcctgggctttaactcagtctatcacatcactgacattcccattattatgtcaagagaatttatgatcatgtttgaccctaatatcaaccatatcagcaagcacatcaaagataagagtaatccaggcatcaaaattaactggagcaagcagcaaaagagactgagaaaattccctaaccagttcaagccctttatagatgtttttggatgtcagttaccgctgacggttgaagctccatactcctacaatggtacattgttcaggcttagtttccggactcagcaggaagccaaggttagtgaggtgtccagcacctgctacaacaccgctgatatttatagtttggtcgatgagttttctttatgtgggcaccgactgatcatcttcacacagagtgtgaaatccatgtaccttaaatacctgaaaattgaggagactaacccaagtttagctcaagatacagtgataatcaagaaaaagtcatgctcatccaaggcactgaacacacccgttttgtctgtgctgaaggaggccgcaaagctaatgaagacgtgttctagctccaacaagaagttgccctccgatgagcccaagagtagttgcatcctacagatcaccgtggaggagttccaccatgtcttcaggcggatcgcagacctacagtcacccctgttcagagggcctgacgacgaccccgctgcattgttcgaaatggcaaaatccgggcaatccaaaaagccctccgatgagctgagtcaaaagacagtggaatgtactacatggctgctgtgtacgtgtatggacaccggggaagctctgaagttttcactgagcgagtctgggaggcgtcttggattagtgccctgcggcgctgtaggcgttcagctctcagagatccaagaccagaagtggaccgtgaaaccacatataggcgaagttttctgctacctgcccttgcggataaagaccggcctcccggtgcacattaatggatgtttcgccgtgacctccaaccgcaaagagatctggaagactgacactaaagggcgatggaatactacctttatgcgccacgtgatcgtgaaggcatatttgcaggtgctgtccgtcctgagggaccttgccacctctggagaactgatggactatacctattatgctgtgtggccggatcccgacctggtgcatgatgacttttctgtgatctgtcagggcttctatgaggatatagctcacgggaaggggaaggagttgacaaaagtcttttcagatggaagcacctgggtcagcatgaaaaatgtgaggtttttagacgattctatcctcaaacgtcgtgacgtcgggtccgccgctttcaaaatatttttaaagtacctcaaaaagacaggctccaaaaacctgtgtgctgtggagctgccctcttcagttaaactgggctttgaagaggccggatgcaagcagattctgctcgagaacaccttcagcgaaaagcagtttttctctgaagttttttttccaaatattcaggagattgaagctgaattgagagaccctctgatgatctttgtactaaacgagaaggtggatgagttctctggcgttctccgagtgactccatgtatcccctgcagcctggagggacaccccctggtcctacctagtcgactgattcatcccgaagggagagtggccaagttgttcgacatcaaagacggtagatttccatatggatctacacaggactatctcaaccccattattctcataaaactggtgcagctgggcatggccaaagacgacatcctatgggatgacatgctcgagagggccgtgagtgtggccgagatcaataaatccgatcatgtggccgcatgtcttaggtcaagtatccttctctcactcattgacgagaagcttaagattagagatcccagagctaaagatttcgccgcaaagtaccagacaatcaggttcctaccgtttttgacaaagcccgctggtttcagtctggactggaagggcaacagctttaagcctgagactatgttcgctgctactgatctgtatacagctgaacaccaggatattgtttgccttctgcaacctatcctgaacgaaaatagccactcgtttaggggctgtggaagcgttagcctggccgtaaaggagttcctagggcttctgaaaaagcccaccgtggacttagttatcaaccaactcaaagaagtcgctaaatccgtggatgatggcatcactctgtaccaggaaaacatcactaatgcttgttacaagtatttgcacgaggccctgatgcagaatgagatcactaagatgtccatcatagacaaacttaagcctttttctttcattctggttgaaaatgcctacgtggattccgagaaggtgagtttccacctgaatttcgaagcagccccttacctgtaccagctaccaaacaagtacaagaataatttccgtgagctgtttgaaactgtcggtgtgcggcaatcatgcaccgttgaggacttcgccctcgttctggagtccatcgaccaggagagagggaccaaacaaattacagaggagaatttccaattatgccgaagaatcatttcggaaggtatttggagcctgattagagagaagaagcaagagttctgcgaaaaaaattatgggaaaatattactacccgatacaaacttgatgcttttgcccgctaagagtttgtgttataatgactgtccctggattaaagtcaaggacactaccgttaaatactgccacgccgatattccacgcgaagttgctgtgaagcttggagcagtgcctaagagacataaggcattggaaagatatgctagcaatgtgtgcttcacaaccctcggcaccgaatttgggcaaaaagaaaaattgacctcaaggataaagagtatcctgaacgcttaccccagcgaaaaggaaatgctgaaggagcttctgcagaatgccgacgacgccaaggctaccgaaatctgcttcgtgttcgaccctcggcagcatccagtggataggatctttgacgataagtgggcaccactgcaaggaccagcactctgcgtatacaacaaccaaccatttacggaggacgacgtcagaggaattcagaacctgggcaagggcaccaaagagggcaacccctacaagaccggccagtatggtataggttttaactccgtatatcacatcaccgactgccccagcttcattagcggcaacgacattctttgcatattcgatccccacgccagatacgccccaggtgccacaagtatcagccctggcagaatgtttcgagatcttgacgccgattttagaactcagtttagtgatgtgctggacctgtatctgggaactcattttaaattggataactgtaccatgtttcggttcccattgcgtaatgccgagatggctaaggtttccgagatatcatccgttccagcgagtgacaggatggtacagaacctgctggacaagttacgtagcgatggcgctgagctactcatgttcctgaaccacatggagaagatttccatttgtgaaatagacaagtcgacaggggctctgaacgttttgtactcagtgaaaggtaagattaccgatggagatcggctgaagcggaaacagttccacgcttcagttatcgactcagtgactaaaaaaaggcagctgaaagatattccggtgcagcagatcacgtacaccatggacactgaggattccgagggaaacctgaccacttggctgatttgcaacaggagtggattcagctctatggaaaaagtttcaaagtccgtaattagtgctcacaaaaatcaggatatcaccctgttccccagaggtggtgtcgctgcctgtatcactcataactacaagaaaccgcacagagccttttgttttctcccactgagccttgaaactggtctacctttccatgtgaatggacatttcgctcttgattccgctaggcggaacctttggcgggatgacaatggagtaggcgtacggagcgattggaataattcacttatgactgcgctgatagcaccggcatacgtcgaacttttgatccagctgaaaaagcgctatttccctggctccgatcctactctcagcgtcctccagaataccccaattcatgttgtgaaggacaccttgaaaaaatttctgtccttcttccctgtcaacagactggatctgcagccagatctttactgtctggtgaaagccttgtataactgtatacatgaggacatgaagcggctcctgcctgtggtccgcgctcctaacattgacgggtcagatcttcactccgccgtgatcattacgtggataaatatgtccacctcaaacaaaactcgaccattcttcgataatctcctgcaggatgaactccagcatctgaagaacgcggactacaacatcactactaggaagaccgtagcagagaacgtgtaccgccttaagcatctgcttcttgaaattggattcaacctcgtatacaactgtgacgagacagctaacctgtatcactgccttatcgacgctgacattccagtgtcttatgtcacgcctgccgatatacgttcttttcttatgacctttagcagcccggatactaactgccatatcgggaaactaccttgtagactgcagcaaaccaatttgaaactgttccactccctgaagctgcttgtggattattgcttcaaggatgccgaggaaaatgagattgaagtggagggccttccactcctcatcaccctggactccgtgctgcagacttttgatgcgaagcggcctaagtttctcactacataccatgaactgatcccttcccggaaggacctatttatgaacactctatatctaaagtatagtaacattctcctgaattgtaaggtggccaaggtgttcgacatatcaagcttcgctgaccttctgagttcagtgctccccagggaatataaaaccaaatcctgcacgaagtggaaagacaacttcgcttccgagtcttggcttaaaaacgcgtggcatttcatatcggaaagcgtttccgttaaggaggaccaggaggaaaccaagccaacgttcgacattgtggtggacacgttaaaagactgggccctactaccaggtactaagtttacagtgtcggctaatcagctggtcgtgccagaaggggacgttctgcttcctctcagcctaatgcacattgctgtgttccctaacgctcagagtgacaaggtcttccacgccctgatgaaagcaggctgtatccagcttgccctgaataaaatttgcagcaaggattccgctttcgtgcctttattgtcatgccacacagccaacattgagagccctacctctattctgaaggctttgcattacatggtccagaccagcacatttcgggctgaaaagctggtagaaaatgatttcgaggccctgcttatgtactttaattgtaacctgaatcatcttatgtcacaagacgatatcaaaatactgaagagtctcccatgttataaatcaatatctggcaggtacgtgtccattggcaagttcggcacctgctacgtgctgactaaaagcatcccatcagccgaggtggaaaaatggacacagtcctcttcatccgcttttctggaagaaaagattcacttaaaggagctgtatgaagtcataggctgtgtgccagtcgatgatctggaggtgtacttgaagcacttgctgcctaaaatcgagaatctgagctatgatgccaagctggaacaccttatatacctgaaaaatagactgtcctccgccgaggagctgtccgaaatcaaggaacagctattcgagaagctggagagtctgctgataatccatgacgcaaattctaggctgaagcaggcaaaacatttctacgataggaccgtgcgagtatttgaggtgatgctgccagaaaagttattcattcctaatgattttttcaaaaagctggagcagttaataaagccgaagaatcacgtaacgtttatgaccagctgggtggagtttctacggaacatcggcttgaaatacattctctcacagcagcagctgttgcagtttgccaaagaaatatccgtccgcgcaaataccgagaactggtcaaaagaaacgttgcaaaataccgtcgatatcttattgcatcacatcttccaagaacgtatggaccttttatctggcaatttcttgaaagaactctctttaattcccttcctgtgcccggagcgtgctcctgcagagttcatccgctttcatccccagtaccaagaggtcaacggaacactgccactcatcaaatttaacggtgcgcaagttaacccgaagttcaagcagtgcgatgtgctacagttgctttggacgagctgtccaatcctgcccgagaaagctactcctttgtcgatcaaggaacaggagggttcggacctgggacctcaggagcaactggaacaggtcctgaacatgctgaatgtgaatctggatcccccacttgataaagtgatcaacaactgcagaaacatttgcaatatcaccacgctggacgaggagatggtaaagaccagggccaaagtactgcgcagcatatacgagttcctgagcgccgagaagcgggagttccgcttccagttaagaggagtggccttcgtgatggtcgaggacggctggaagctgcttaaaccggaagaggtggtaattaaccttgaatatgaaagtgactttaagccgtacctttacaagcttcccctggagttagggacatttcatcaactattcaagcaccttggcaccgaggacattatctccaccaaacaatatgttgaggtcctgtcaagaattttcaaaaattcagaaggaaagcagctagacccgaacgagatgaggaccgtcaagcgcgtcgtctccggcctctttcgatctctccagaatgactcagtcaaggtaagatctgatctggagaacgtacgagatttggccctgtatctgcctagccaggacggcaggctcgtcaagtccagtattctcgtgtttgatgacgctccacactacaaaagtcgcatacagggaaacattggggtacagatgttggttgatctgtcgcagtgttacctcgggaaagaccatggattccacactaagctgatcatgctgttcccccaaaagctccgcccaaggctgctatcaagcatcctggaggagcaattagacgaggaaactccaaaagtctgccaatttggagccctatgttccctgcagggcaggttacagctcctcctatcatctgagcagtttatcaccgggctgattagaatcatgaagcatgaaaatgacaatgcctttctggctaatgaggaaaaagccatcaggctctgcaaggcactcagggaaggactcaaagtgagttgtttcgagaagcttcagaccacgttgcgagtgaaagggtttaatccaattcctcacagcagaagtgagacttttgcctttctaaagcgatttggtaacgccgtcattctgctgtacatccaacactccgactctaaggatatcaacttcttgttagcccttgcgatgaccctaaaaagcgccaccgataaccttatctctgatacctcttacctgattgcaatgctggggtgcaatgatatatacaggatcggcgagaagctggattccctgggcgtcaagtacgacagttccgaacctagcaaactagaattgccaatgccgggaactcccattcctgctgaaatccattacacactgctgatggatccaatgaatgtgttttatcctggggaatacgtgggttacctggtcgatgcggagggcggagatatttatggcagctaccagcccacatatacgtacgcgattatagtgcaggaggtggagagggaggacgccgacaacagctccttcctcggcaaaatctaccagatcgacattggatactccgaatacaagatagtgagctctctagacctctacaagttctcacggccagaagagtcctctcagtcaagggactcggccccatctacacccactagccccacagaattcctgacaccaggcctaagaagtataccccctctcttttccgggagagagtcacacaagacttctagcaagcaccagtcccctaaaaagttgaaggtgaatagcctgcctgaaattctcaaagaggtgacgtcagttgtcgaacaggcctggaagctcccggagagcgagaggaagaagatcatccggagactatatctcaaatggcacccggataaaaatcctgagaatcatgatatcgccaatgaagtgtttaagcatctccagaatgaaattaaccgccttgagaaacaggcgtttttagaccagaacgcggacagagcatccaggcgaacgtttagcacttctgcttcgcgtttccagagcgataaatactcttttcagagattttatacctcttggaaccaggaggctacgtcacacaagagcgagaggcagcagcaaaataaagagaaatgcccgccaagcgctggtcaaacctattcacagcgcttctttgtgcctccgacctttaaaagcgtggggaatccagtcgaagcgcgtaggtggcttcgacaggcccgtgccaatttctccgccgcacgaaacgacctgcacaagaacgcaaacgaatgggtatgctttaagtgctatctttccaccaagctggcactcatagcggcagactacgcagttcgcggtaaatccgacaaggatgttaaaccaaccgcactggcccagaagatagaggagtacagccagcagctggaggggctaaccaatgacgtgcataccttagaagcatacggagttgattctctgaaaaccagataccccgatctgttgccctttccacaaattcccaacgaccggtttacaagcgaagttgcgatgcgggttatggaatgtacagcatgtataattattaagcttgagaatttcatgcaacagaaggtgtac

SEQ ID NO: 242046 - DNA, 13740 bp, synthetic construct
  misc_feature 1..13740: note = Description of Artificial Sequence: Synthetic coding sequence
  source 1..13740: mol_type = other DNA
atggaaaccaaagagaacagatgggtacccgtgaccgtgctgccagggtgtgtgggatgcaggaccgtcgctgcgctggcatcttggacggtccgcgacgtgaaggagaggatattcgccgagacaggatttccagtctccgagcagcgattgtggcgtgggggtcgcgaactgtccgactggatcaagatcggagatctgacttcaaagaattgccacctattcgtaaatttgcagagcaaaggactgaagggtggcggtcggtttggtcagactactccgcctctcgtcgatttcctgaaagatattctgagaagataccccgaagggggacagattctgaaagaactgatacaaaacgccgaagatgcgggagcaacagaggtcaagttcctctacgacgaaactcagtacgggacagagaccctgtggagtaaggatatggcaccctaccagggcccagctctgtacgtgtacaataatgcagtgttcaccccagaagattggcatggcatacaggaaatcgccaggtctcggaaaaaggacgatcccctgaaggtgggtcgattcggtatcggctttaattccgtttatcatattacggacgtgccttgtatttttagtggagatcagattggcatgctcgacccgcaccagacgctctttggtccacacgagtccggccagtgttggaatctcaaggatgactctaaggagattagtgaactttctgaccagttcgccccattcgtgggcatttttggcagtacaaaagaaacgttcattaatggaaatttccctggtactttcttcaggttcccactacgcttgcagcctagccagctgagctccaacctgtacaacaagcaaaaagtgttggaactgttcgagtcattcagggccgacgctgataccgtgctgctgttcctgaaaagtgtccaggacgtaagcctgtacgttcgggaggcagacggaacagagaaactggtgtttcgtgtgaccagttccgaaagcaaggccctgaaacatgaaaggcccaattctatcaagatcctaggaactgccatcagtaattattgtaagaagactccttccaacaacattacttgcgtaacgtaccacgtcaatatagtgctggaagaagagagcaccaaggatgcgcagaagacatcatggcttgtgtgtaacagcgtgggaggaaggggaatatcttctaaattggattccttagccgacgaactcaagtttgtaccaattatcggcattgccatgcctctgtctagccgagacgatgaagccaagggtgccacttctgatttcagcgggaaggctttctgttttcttcccctgccaccgggagaagagagctctaccggactaccggtccatataagcgggttcttcggccttacagacaacagacgcagtatcaagtggagagagctcgatcaatggagagatccggcagccctgtggaatgaatttcttgtgatgaacgtagttccaaaagcctacgcgaccttgattctggacagtataaaacgccttgaaatggaaaaatcttcagactttcccctgtctgtcgatgtcatctataaactatggccagaagctagcaaagttaaggtgcattggcagcccgttctcgaaccactcttcagcgagctgctccagaacgctgtgatttattcaataagctgcgactgggtgcggttggaacaagtatatttttcagagcttgatgagaacttggaatacactaaaaccgttctcaactacttgcagtcttcaggaaagcagattgctaaagtaccaggcaacgtagatgccgcagtgcagttgaccgccgctagcggcaccacaccggtgaggaaggtcacccccgcttgggtgaggcaggtcctccgcaaatgtgcacaccttgggtgcgcagaggaaaagttacacctgttagagtttgtgctcagcgaccaggcatatagcgaactgctcggcctggagctcttgccactgcagaacggaaatttcgtgcccttcagttcatccgtatctgaccaagacgtcatctatattaccagcgccgaatatccacgcagcctgtttccttcgctggaagggaggtttatactcgacaacttgaaaccccaccttgtggctgcattgaaggaggccgctcagaccaggggcaggccttgtacccagctgcagttgttaaaccccgagcgcttcgctcgcctgataaaggaggtgatgaacactttttggcctgggagagagttgatcgttcagtggtatcctttcgacgaaaaccgcaatcacccttccgtatcctggctgaagatggtatggaaaaatctctacatccactttagcgaagatctcacactctttgacgagatgccgctgattcctcgtactatcttagaggaggggcagacatgtgttgagttaattaggttacgcattccctcactggtgattttggacgatgaaagcgaggcacagttgcctgagttcttagctgacatagtgcagaagctcgggggattcgtgctgaagaagctggatgctagcattcagcatccgctgattaaaaagtatattcatagccccctccctagcgccgttctgcaaatcatggagaaaatgccattacagaagctgtgcaaccaaataactagtctcctgcctactcacaaagatgcgctccgcaaattcctggcttcactaaccgatagtagtgagaaagagaagcgcatcatccaggagcttgccatttttaaacgcatcaatcacagtagcgatcagggtatcagctcttatactaaattaaagggttgtaaggtcctacatcacacggcaaagttgcccgctgatctcaggctaagtatcagtgtcattgactcgagcgacgaggctacaataagactcgccaatatgctgaagatcgagcagttaaagaccaccagctgtctgaagttggtgttgaaagatatcgagaacgcattctattcccacgaggaagtaacgcagctgatgctttgggttttggaaaacctatccagtctgaagaatgaaaaccctaatgttctcgagtggctcacaccgctcaagttcatccagatctcccaggagcagatggtctcggccggagagctattcgacccagatatagaggtgctcaaggatttattctgcaacgaggagggcacatattttcctcccagtgtgtttaccagtcctgacatcctgcattccctgaggcaaattggcctcaaaaacgaagcaagcctaaaagaaaaggatgttgtgcaagtggccaaaaagatagaggccctgcaagtaggggcatgtccggatcaggacgtcttactgaagaaagcgaagacgctgctccttgttctaaacaagaatcacactctcctgcagagtagtgagggcaaaatgacccttaagaaaattaagtgggtccctgcatgtaaagagaggcctcccaattaccccggtagtctggtgtggaagggcgacctgtgtaatttgtgtgcccctcccgatatgtgtgacgtggggcacgctatcctgattggcagcagtctccctttggttgagtcaattcacgtaaacctggagaaggccttggggatcttcactaaaccatccctttccgcggttcttaaacacttcaagatcgtggttgactggtactcttcaaagaccttctctgatgaggattattaccagtttcaacacatcctactggaaatctacgggtttatgcacgatcacctgaatgagggaaaggatagtttccgggcactgaagttcccttgggtgtggaccggaaagaagttctgcccactggctcaggcagtaattaagccgatccatgatctcgacctgcaaccatatcttcacaacgtcccaaagacaatggctaagttccaccagctgttcaaagtctgcggctccattgaggagctgaccagtgaccatatttctatggtgatccaaaagatctaccttaagtcagatcaggacctctccgaacaggagtcaaaacagaatttgcatttgatgctgaacatcatccggtggttgtacagcaaccagatccctgcttcgccaaacacgcctgtgccaattcatcattcgaaaaaccccagcaagttgatcatgaagccaattcacgagtgttgctactgtgatattaaagtggacgacttaaacgaccttcttgaagatagtgtggaaccgataatcttagtgcacgaggatattcccatgaagaccgctgaatggctcaaggtaccctgcctatctaccaggcttataaacccggagaatatgggtttcgagcagtccggacaacgcgaacccctgactgtgcggattaagaacattctggaggaatacccatccgtgagcgacatcttcaaggaattgctgcagaacgccgacgacgcgaatgccaccgaatgctcattcctgatcgatatgcggagaaatatggatatccgagaaaatttgctagacccaggcatggctgcctgccatggacccgcactgtggtcatttaataacagccagtttagtgattccgactttgtcaacatcactcggttgggggagagcctgaaacgcggagaggtggataaggttggcaaattcggcctgggcttcaattccgtctatcacatcaccgatatacctatcataatgagtcgcgaattcatgattatgtttgaccccaacataaaccacatttctaaacatatcaaggataagtccaacccgggaatcaagatcaattggagtaaacagcagaagaggctgaggaagttcccaaaccagtttaagccctttatcgacgtgtttggatgccaactgcccttaacggtggaggccccttactcatataacgggaccctgtttcgcctcagtttcaggactcagcaggaggccaaggtgtctgaggtgagcagtacttgttacaatacagcagatatttactcacttgtcgacgaattttccctctgtgggcatagactgatcatttttacccaaagtgtaaaatctatgtaccttaagtatcttaagatcgaggagactaacccatcattagcccaggacacagtgataataaaaaagaaaagctgctcttctaaggctttaaacacaccagttctctcagtcctgaaagaggctgccaaactcatgaaaacttgctcatcttcgaacaagaagctccctagcgatgagcccaaatcttcttgtatcctacagatcactgttgaggaatttcatcatgtctttaggcgaatcgcagacctgcaaagtccactcttccgcggaccagacgacgatcctgcagcactatttgagatggccaagtcaggacagagtaagaaaccctccgatgagctcagccaaaagacagtggaatgtacaacctggttgctgtgcacctgtatggacaccggcgaggctttgaagttttcacttagtgagtccggtcgcaggctgggcttggtgccctgtggagctgtgggcgtccagctatcagagatacaggatcagaaatggactgttaaaccgcatattggggaggtgttttgctacctgccattgagaattaagaccggactgccggtgcacatcaatggttgtttcgctgtgactagcaaccggaaagagatttggaagactgataccaagggtcgatggaatactacatttatgaggcatgtgattgttaaagcgtacctgcaggtgctctccgtcctccgggatctggctacgagtggggagctgatggattacacctactatgctgtatggcctgaccctgaccttgtgcacgatgacttcagtgtgatctgccaaggattttatgaggatatcgcacacgggaaaggcaaggagctcactaaggtgttttctgatggaagtacttgggtttctatgaaaaacgtcagatttctcgatgactccatcctaaagaggcgtgacgtcggtagcgctgcatttaagattttcttgaaatacctgaaaaaaacagggtctaagaatctctgtgctgtcgagttgccctcaagtgttaagctggggtttgaagaagctggatgcaagcagatcttactggaaaatacattttctgaaaagcagtttttttcagaagtattcttcccaaacatccaggaaatagaggccgagctacgtgatcccttgatgattttcgtcttgaatgagaaggtggacgagtttagcggtgtcttaagggttaccccttgtatcccctgctccctggaggggcacccactagtgttgccatctaggttgatacacccagaaggaagggtagctaaactctttgacattaaagatggcaggtttccatatggttctacacaggactacctgaacccaatcatactcattaagttagttcagttagggatggcaaaagacgacattctgtgggatgacatgctcgaaagggccgtgtctgttgcagaaatcaataagagtgatcacgtggccgcatgtttgcggtcctccattctgctgagcttaatagatgagaaactgaaaatacgggaccccagagcaaaggactttgctgccaagtatcaaactataagatttctgcctttccttaccaaacccgctggattttccctcgactggaagggcaactctttcaaaccagaaaccatgttcgccgcaacagatctgtatactgccgagcaccaagacattgtttgtctgttacagccgattttaaatgagaacagccatagctttagaggatgcggcagcgtgagtcttgccgtgaaagagtttctaggcctcctcaagaaacccaccgtggacctcgttatcaatcagctcaaggaagttgccaaatcagtcgatgacggcattacattataccaggaaaatatcacaaatgcatgctacaagtatctccacgaggccctcatgcaaaacgaaatcacgaagatgagcattatcgataagttaaaaccatttagcttcattctggtcgagaatgcctacgtggactcagaaaaagtcagcttccacttgaattttgaagcggcaccctatctgtaccagttaccaaataagtataagaataactttcgtgagctcttcgaaaccgtgggcgtgcgacagagctgcactgtggaggattttgcacttgttctggagagtatcgatcaagaacggggaaccaagcaaattacagaagaaaatttccaactttgccgcaggattatctcagaaggaatctggtcactgattcgggaaaaaaaacaagaattttgcgagaagaactatggtaaaatcctgcttcccgataccaatttgatgctgcttccagcaaaatctctctgttataatgactgtccgtggatcaaagtcaaggacacaactgttaagtattgtcacgctgacatcccacgggaggtcgcggtgaagctcggggctgtccccaagcggcacaaggccttggaaaggtacgcttctaacgtctgcttcactacactcggtacagaattcggtcaaaaagagaaactgacgtctagaattaaatccatccttaacgcttatccatcagagaaagaaatgctaaaggagctgttgcagaatgccgacgacgctaaggctaccgaaatttgtttcgtgttcgaccccaggcagcacccagttgaccgcattttcgacgacaagtgggcacctctgcagggacccgctttgtgtgtttataataaccagcccttcacggaggatgatgtgaggggcatccagaacctcggtaaaggaactaaggagggaaacccctacaagacaggccagtatgggattggatttaactcggtgtaccacatcaccgattgtccaagctttataagtggcaacgacattctgtgtattttcgacccgcatgctagatatgccccaggcgcaacatctatcagccctggcagaatgttcagggacctggacgctgactttaggacacagttctctgacgtcctcgatctgtatctgggtactcactttaaactggataattgtaccatgttccgctttcctctccgaaatgccgagatggcaaaagtgtctgaaatctcctccgtgcccgcatccgacagaatggtccagaacttacttgataaactgcggagtgacggtgcagagctcctgatgtttctgaaccacatggaaaaaatcagcatatgtgagatagacaagagcaccggggcactgaacgtcttgtattccgtcaaaggaaagattacagacggcgatagactgaagcgcaagcagtttcatgcaagtgtgatagatagtgtgacaaaaaagaggcagctcaaggacatccccgttcagcagatcacttacaccatggatacagaagattctgaagggaacctcactacgtggttgatttgtaacaggtcagggttctcctcaatggagaaggtgtctaagtctgtcatctctgctcacaagaatcaggatatcacgctctttccaagaggcggagtggccgcatgcataacacacaactacaagaaacctcacagggccttttgtttcctgcccctatcacttgagacggggttgcccttccacgtcaatggtcactttgcgctggatagcgcgagacgaaatctgtggcgcgatgacaacggggtgggcgtccggtcagattggaataattcactaatgaccgcccttatcgcaccggcttatgtggaactgctgatacaactgaaaaagcgatattttcctgggagcgatcctaccctgagcgtgctccaaaacacgcccatacacgtggtcaaagacacgctcaaaaagttcctgtccttctttcctgtcaatcgtttggatttacagcctgacctctactgtctggtgaaagccctatataattgtattcacgaggacatgaagcggctgctacccgtggtgcgggcaccgaacatcgatggaagcgacctgcactcagctgtcataattacatggatcaatatgagcacctccaacaaaacgcgcccattcttcgataatcttctgcaggatgaattgcaacacctgaaaaacgcggattacaatattaccaccaggaagacagtcgccgaaaacgtctacagactgaaacacctgttgctggaaattgggttcaacctggtttacaattgtgacgaaacagccaatctctatcactgtttaatcgatgcggatattcccgtctcctacgtgactcctgccgatattcgtagtttcctgatgactttctccagccctgatactaactgtcatatcggcaaactgccctgccgactgcagcagacaaaccttaagctctttcactccttgaagctgctagtagactattgttttaaggatgcagaagagaacgagattgaggtcgaaggactgcctctgctgatcacactggattccgtgctgcagacttttgacgccaagcgcccaaagtttcttacaacgtatcacgaattgattccaagccggaaagacctgtttatgaacaccctttaccttaagtacagcaatattttgctgaactgcaaagtcgcaaaagtgtttgatatttctagctttgccgaccttctctccagtgttctccccagagagtataagactaaatcctgcactaagtggaaagataacttcgccagtgaatcctggttgaagaacgcttggcacttcatttctgagtcagtgtccgtgaaagaggaccaagaagagaccaaacctacctttgatatcgtcgttgacaccttgaaagactgggctttgctccccggtaccaagtttaccgtctcagccaaccagctagtcgtgccagaaggcgatgtgctgcttcccctgtctctaatgcacatcgcagtgtttcctaacgcgcagtcagacaaagtctttcatgccctaatgaaggcaggctgcatacagctggctctgaataagatctgctcaaaggactctgcgtttgtaccccttctgagctgccacaccgccaacatcgaatcccccaccagcattctcaaggccctccactacatggtacaaaccagtaccttccgggcagagaagctggtcgaaaacgattttgaggccctattgatgtattttaattgtaatctgaaccaccttatgtcacaagacgacattaaaatcctaaagtcgctaccgtgttataagtccatctctggccgttacgtcagtatcggaaaattcggtacttgttacgtgcttacaaaaagcattccctccgctgaggtggagaagtggactcagtcaagctcttcagcatttctggaagaaaaaatccacctaaaggagctgtatgaggttatcgggtgtgtccctgttgacgatctggaggtgtatctgaaacatctgctcccaaagattgaaaacctgtcctatgacgccaagctggaacacctgatatatctcaaaaaccgtttaagtagcgctgaggagttgagcgaaattaaggagcagctgttcgagaagctagagtctttacttatcattcacgatgccaactcacgactgaagcaggccaagcacttttatgatagaaccgtcagagtcttcgaggttatgcttcctgaaaaactcttcatacctaatgatttcttcaagaagctagagcagctgatcaagcccaaaaatcacgtcacgtttatgacttcctgggtcgagtttttgcgaaatatcggcctgaagtacattctgtctcagcagcagctcttgcagtttgccaaagagatctccgtgcgcgctaacactgagaactggtctaaggaaacccttcagaataccgtggacatcctccttcatcatatatttcaggagagaatggatctgctcagcgggaactttttgaaggagctatccttgattccgttcttatgtccagagagggcgcctgcagaattcatccggttccacccccaatatcaggaggttaacgggaccctaccactgataaagttcaacggagcccaggtgaacccgaaattcaagcagtgtgatgtgcttcagttgttgtggacctcctgcccaatcctgcccgagaaagcaacgcccctgagcataaaggagcaggagggctctgatctggggcctcaggaacagctcgagcaggtcctcaacatgctgaacgtcaatctcgacccgccactcgataaggtgattaacaattgccggaacatttgtaatataactacgttggacgaagagatggtgaaaacgagagccaaggtcctgcggtcaatctatgaatttctgtcagccgagaagcgcgaattcaggttccagctgcgcggagtggcattcgtaatggtggaagatgggtggaaacttctcaaacccgaggaggtggtaattaatttggagtacgaatccgacttcaaaccttacttgtataaacttcctctcgagttgggaacatttcaccaactgttcaagcacctcggtactgaagacattatctccaccaaacagtatgtagaggtgttgagtcgaatttttaaaaattctgagggcaagcagctggacccaaatgaaatgcggacagtgaagcgggtggtaagcggcttgttcagaagcctgcaaaacgattcagtaaaagtcaggtccgacctggaaaacgtcagagacttggccctgtatctgccgagccaagatggaagattggtgaagtcatctatccttgtgtttgacgatgctccgcactataaatccagaattcagggaaatatcggagtgcagatgttggttgaccttagtcagtgctacttgggaaaagaccatggctttcacactaagcttattatgttgtttccccaaaagctcagacccaggctgctgagtagcatactcgaagaacagctcgacgaagagactcctaaagtgtgtcaattcggagcgctctgctcattacaaggccgtctgcagcttctgctgtctagtgagcagttcattaccggcctgattcggataatgaaacatgagaatgacaatgcatttttagcaaacgaagaaaaagctatacgcctttgcaaagccctcagagaagggctaaaggtatcctgctttgagaagctgcagaccactctgcgagttaaaggctttaacccaatcccccattctcggagtgaaacctttgcattcctaaagcgctttggcaatgctgtcatcttgctgtatatacaacattcagactctaaggacatcaactttcttctcgccctggccatgaccttgaagtctgctacagacaatttaattagcgacactagttaccttatcgctatgctgggttgcaacgacatttacagaatcggcgagaaactggactcactcggggtgaagtacgatagttctgagccgtccaaactggagctccctatgcccggtactccaatacccgcagagattcattataccctgttgatggatccaatgaacgtcttttaccctggggagtacgtgggctatctggtcgatgccgaagggggagacatatatggatcctaccagcctacctacacctatgcaataatcgtacaggaggtggagagagaggacgcagataactctagctttctcggcaaaatttaccaaattgacattgggtacagtgaatataagattgtttcttctctggacctctacaaattcagtcggccagaggaaagctcccagtcacgcgactcagccccatcaacacccacttctccgacagaatttctgaccccgggtctgcgatccatcccaccgctcttttctggcagagaatctcacaaaacatcttctaagcaccagagcccaaaaaaactgaaagtgaattctctcccagaaatcctcaaggaggtgactagcgtagtcgagcaggcttggaagctcccggagagcgagcggaagaagatcattagacgcctgtacttgaagtggcatccagataagaatcccgagaaccacgatattgccaacgaggtattcaagcatctccaaaacgagatcaaccggctggagaagcaggcgttcttagaccagaatgcagaccgggcttcaagaaggacattttccacatccgctagtcgctttcagagtgacaagtattcattccagcgtttttacacctcttggaatcaggaagccacatcgcacaagagcgagcgccaacaacagaataaagagaaatgcccccctagcgctgggcagacctacagtcagagattcttcgtgccccctacctttaagagcgtgggcaatcctgtcgaagccagacgctggctgcgtcaggcacgggctaatttcagtgcagccagaaatgacctgcacaagaacgcaaatgaatgggtgtgttttaagtgttatctcagcacaaagttagctctgatagccgctgattatgcagttcgtgggaagagtgacaaggacgtcaaacctacagctctggcacagaagatcgaggaatattcccagcagctggaggggctgactaatgacgttcatactctcgaggcgtacggtgtggacagtctgaaaacccgctaccccgacctgctcccttttccgcagatccccaatgaccgtttcacaagtgaggtcgctatgagggtaatggaatgtacagcatgcatcatcatcaagttggaaaattttatgcagcaaaaagtctac

SEQ ID NO: 242047 - DNA, 11490 bp, synthetic construct
  misc_feature 1..11490: note = Description of Artificial Sequence: Synthetic coding sequence
  source 1..11490: mol_type = other DNA
atgaatacattctggcccggtcgcgaactgatagtccagtggtaccccttcgacgaaaatcggaaccacccttccgtgtcctggttgaagatggtgtggaagaatctgtatattcatttttctgaggatctgaccctgtttgatgaaatgccacttatccctcgaacgattctggaggaggggcagacttgtgtagagctgattcgcctgaggatccctagcctggtcatcctggacgacgaaagtgaagcccaactgcctgaattcttggcagacatagttcagaaactaggcggatttgttttgaaaaagctcgacgcttctattcagcaccctttgatcaagaagtacattcatagccctctgccatctgcggttctgcagatcatggagaaaatgcccctgcaaaaactgtgcaatcagatcacctcactgttaccgacccataaggatgcgttgcgtaagttcttggcctccctgaccgattcttcagaaaaagagaagagaatcattcaggagctggccatttttaagcgaatcaatcatagcagcgatcaaggcattagctcatacactaaattaaaaggctgtaaagtgctgcaccataccgccaagctgccagctgatctcaggctaagcattagcgtgattgactccagcgatgaggctacaataaggcttgcaaacatgctgaaaattgagcagctgaaaacaacctcctgcttaaaactggtgctcaaggacattgaaaacgctttctactcccatgaagaagtgacacaactgatgctctgggtgctcgagaatttgtcatctttgaagaacgagaaccccaacgtgctggagtggctaaccccgctgaaattcatccaaattagtcaggaacagatggtgagtgctggagagctgttcgacccagacatagaagttctcaaagacttgttctgcaacgaggaggggacttactttcctcccagtgtgttcacgagtcctgatatccttcacagccttaggcagatagggctcaagaacgaggccagccttaaggagaaggacgtggttcaggttgccaagaaaatcgaggccctgcaggtcggggcttgcccagaccaggatgttctgttgaaaaaagccaaaacattgctcctggtgctcaacaaaaatcacacactattgcagagctctgaggggaagatgacactgaaaaagattaagtgggtccccgcatgcaaagaaaggcccccaaattaccccggaagcctggtatggaagggggatctgtgcaatctgtgcgctcccccagacatgtgcgacgtagggcacgccatcttgatcggttcttccctgcccctggttgagagtattcatgtcaaccttgagaaggcgctcggaatattcaccaaaccatcgttgtcagctgtgctcaagcactttaaaatagtggttgattggtactctagcaagacattcagcgatgaggattattatcagtttcagcatatactgttggaaatttacggcttcatgcacgaccaccttaatgaagggaaggactcgtttcgggctctcaagtttccttgggtctggaccggaaagaagttctgtcccctggcccaggctgtcattaaaccgatccacgacctggacctgcagccttatctacacaacgtgcctaaaacgatggctaagttccatcaattgttcaaggtctgtggctccatcgaagagttaacatctgaccatatatcaatggtgatccaaaagatttatctgaagtctgaccaggatctgtccgagcaagagagcaagcaaaacctgcaccttatgttgaacatcatccgctggctctactccaaccagattcccgctagccccaataccccagtgcccatccaccactcaaagaacccttctaagctgatcatgaagccaattcatgaatgctgttattgcgacatcaaagttgacgacctgaatgacttgctcgaagattcggtcgagcccattattctagtgcacgaagatatccccatgaaaactgccgagtggctgaaggttccgtgcctgtcgacccggctcataaacccagaaaatatgggatttgaacagtccggacagcgggagccactgactgtgcggatcaagaacatcctggaggagtacccctccgtatcggacatttttaaggaactgctccaaaatgccgatgatgctaacgcaaccgagtgtagttttttaatcgatatgcgcagaaatatggacatcagagagaatctcctggatcctgggatggccgcttgtcacggccctgccctctggagctttaacaactctcagttctctgactctgactttgtgaatataactagactgggagaatctttgaaacgcggagaagtagataaagtgggtaaattcgggctcggcttcaactccgtttaccacattacagatatccctatcattatgagtcgagagtttatgattatgttcgatcctaatattaaccatatctccaagcacatcaaggataagtccaaccctgggataaagataaattggagcaagcagcagaaacgcctcagaaagttccctaaccagttcaaaccctttatagacgtatttggttgtcagttgccactgacagtggaagcaccttattcctacaacggcactctctttcgactgagcttccgtacgcaacaggaagccaaggtatctgaagtgagcagtacgtgttataacaccgccgatatctactccctggtcgatgagttttctttgtgcggtcacaggctgataatctttacacaatcagttaagtcaatgtacctgaaatacctgaaaattgaggaaactaaccccagcctagcccaggacactgtgataatcaaaaagaagagctgttcctcaaaagccttgaacactcctgtgttgtctgtgctgaaggaagctgcaaagctcatgaagacttgttcttcaagcaacaagaagctcccgtcagatgagcccaaatcgagttgcatcctccagattaccgtagaggagtttcatcatgtttttcggaggatcgccgatctgcaatcaccactgtttagggggcctgatgatgaccctgctgccctgtttgagatggctaaatccgggcagagcaagaagccatccgatgagttgtctcagaagaccgtggagtgcactacatggctgctctgtacttgcatggacaccggggaggccttgaaattttcactgtcagaaagtggcagacgcctggggctcgtgccctgcggcgcagtaggagtgcagttgtcggaaattcaggaccagaaatggacggttaaaccgcatatcggagaggtattctgttatttgcccctgagaattaaaaccggcctgccagtgcatatcaacggttgctttgcagttacctccaaccggaaggaaatttggaaaaccgacaccaaaggtcgctggaacacaacatttatgcggcatgtgatcgtgaaagcttacttgcaggtcctgtcagtgttacgggacctagcgacatccggggaactgatggactatacctactatgcggtttggcccgaccctgacctagtccacgacgactttagcgtgatttgccagggtttttatgaggacatcgcgcatgggaagggaaaagaattgacaaaagtgtttagcgacggctccacctgggtctccatgaaaaacgtgagattcctggatgactctatcttaaaaaggcgtgacgtgggaagcgctgcttttaagattttcctgaaatacctgaagaaaaccgggtccaagaacctgtgtgctgtagagttaccatcctccgtgaagttaggctttgaggaggcagggtgcaaacaaattttactggagaacacctttagcgaaaagcaatttttctctgaggtgttttttccgaacatacaggagatcgaggctgagctgagggatccactaatgattttcgtgctgaacgaaaaggtggatgagttctccggtgttctgcgcgtcactccatgcattccatgcagtttggagggccaccccttggtgctgccatctagactgatccaccctgagggcagagtggctaaactgtttgacattaaggatggtcgatttccatatggcagcacccaggactatctgaaccccattattctcatcaagttagtccagctcggaatggctaaagatgatatcctctgggatgacatgctggagcgagccgtgtcagttgcggaaatcaacaagagcgaccatgttgccgcatgtttgcggtcttccatcttgctgtccctgatcgacgagaaacttaagatacgggaccccagggcgaaagatttcgcggcaaagtatcagaccataagatttctgcccttcttaacaaagccagcaggattcagtctggactggaagggcaacagcttcaagcccgagaccatgtttgcggcaacagatctgtacactgccgaacaccaggacattgtgtgcttgttgcaacctatcctgaacgaaaattcgcattccttcagaggctgcgggtctgtttccttggctgtgaaggagttcctgggtctgctgaagaagcctactgttgacctggttattaaccagcttaaagaggtcgctaaatccgtggacgatggcatcacactgtatcaggaaaacattacaaatgcctgctacaaatatctccacgaagcattgatgcagaacgaaattaccaaaatgagcatcattgacaagttgaaacccttcagcttcattctagtcgaaaacgcttacgtggacagcgagaaggtgtcttttcatttaaacttcgaggcagctccttatctttatcagttgcctaacaagtacaaaaataacttccgggaattgttcgagacagtgggtgtccgacagagctgcaccgtggaggattttgcactcgtactggaatccattgaccaggagcgaggtaccaagcagattacagaagagaatttccaactctgtaggagaatcatttccgaaggaatttggagcctcatccgagaaaaaaagcaggagttctgtgagaagaattacgggaagatcctgttaccagatacaaatttgatgctgcttccggctaaaagcctatgctataatgattgcccctggatcaaggtgaaagatactaccgtgaagtactgtcatgccgacatccccagagaggtggcggtgaaactgggggctgtgccaaagaggcacaaggccctggaacggtatgcatctaacgtttgtttcaccacgcttggaaccgaattcggccaaaaagaaaagttgacaagccggatcaaaagcatcctgaatgcttacccaagcgagaaagagatgctaaaagagctgctgcaaaatgccgatgacgccaaagctacagaaatttgtttcgtatttgaccccaggcaacatcctgtggatcgtattttcgacgataaatgggccccactgcagggacctgcgctctgtgtttataataatcagccattcactgaggacgacgtccgtggcattcagaatcttggaaaaggaaccaaagagggtaatccatataaaaccgggcagtacggcataggcttcaattccgtgtaccacatcacagattgtcctagtttcatcagtggcaatgatatcttgtgcatctttgacccccatgcacggtacgctcctggggctactagcatcagtccgggacgtatgttccgggacctggatgctgacttccggacacagtttagtgacgtgcttgacctttatctagggacccattttaaactggataattgcacaatgtttagattcccattgcgtaatgctgaaatggccaaggttagcgagatttcctctgtgccggcaagcgataggatggtgcagaatctgcttgacaaactgcgatctgacggggctgaactgttaatgttccttaaccacatggagaagataagcatttgcgaaatcgacaagtccaccggagctttgaatgtgctgtattctgtgaaaggaaaaatcaccgacggcgatagactgaagcgcaagcagtttcacgcatccgtaatagacagtgttaccaagaagagacagctcaaggatatcccggttcagcagatcacttacaccatggatacggaggacagcgagggaaatttgactacatggcttatatgcaatcgatctggattcagctccatggagaaggtcagtaagtccgtgatctctgcccacaagaatcaagatataactctgttccctcgcggtggtgtggcagcatgtattactcacaactacaagaagccacatagggctttctgctttttgcctctctctctcgaaacgggtctgcccttccacgtgaacggccactttgcccttgattcggctagaaggaatttatggcgcgacgataacggtgtgggtgtcagatcggactggaataattccctgatgactgccttaattgctcccgcttacgtagagctcctgatccagcttaaaaaaaggtactttccaggatcggatcccactctctcagttctgcagaatacaccaatacacgtagtgaaagacaccctcaaaaagtttctgtccttcttccctgtgaatagattggatcttcagcctgacctctattgcttagtcaaagctttgtacaattgcatccacgaagacatgaaacggcttctacctgttgtgcgagcacctaacattgacggcagtgatctccatagtgccgtgattatcacctggataaatatgtcaacgagcaataagacacggccttttttcgataacctgctccaggatgaattgcagcacctgaaaaacgctgactataatattactacacgaaaaaccgtggccgaaaatgtgtatcgtcttaagcacctcttgcttgaaattggttttaatctggtctacaactgcgatgagacagctaacctctatcactgtttgatcgatgcggatattcccgtcagctatgtcacacctgctgatattcgatcgttcctgatgacgttctcaagtcccgacaccaattgtcatattggcaaacttccctgtaggctgcaacagaccaatctaaagctcttccattccctgaaactcctggtagactactgcttcaaggatgcggaagaaaatgaaattgaagtagagggactgcctttactcatcactcttgacagtgtgctgcagacatttgatgcaaaacggcctaagttcctgaccacctatcatgaacttatcccctcccgcaaagatctcttcatgaataccttgtacctgaagtacagcaacatattactcaattgtaaggtggctaaagtttttgatatttcaagctttgctgacctgctcagctcggtgctgcccagagagtataagacaaagtcctgcaccaagtggaaagacaacttcgcatcagagtcctggcttaaaaacgcttggcatttcatttccgaatccgtatctgtaaaggaagaccaagaggaaaccaaaccaaccttcgacattgtcgtggatactctgaaagattgggctttgctcccaggaacaaagtttacggtgtctgccaaccagctggtggtgccagaaggcgatgttctgctccccttgtcacttatgcatatcgcagtgtttcccaacgcacagtcagacaaagtattccacgccctgatgaaagctgggtgcattcagttagccttaaataagatctgttcgaaagacagcgcattcgtgccattgttgagctgccacaccgccaatatagagtcaccgacttcaattcttaaagcacttcactatatggtgcagacaagtactttcagggccgaaaagttagtcgaaaatgacttcgaggctctccttatgtacttcaattgcaatctcaaccatctgatgtctcaggacgatataaagatcttgaagtcactgccatgctataagtccattagtggtaggtacgtcagcatcgggaagttcgggacatgttatgtgctgaccaaatccatccccagcgccgaagtggaaaaatggacccagtcctctagctccgcttttctggaagaaaagatccacctcaaggaactctatgaagttatcggttgtgtgcctgtcgatgatttggaggtgtaccttaagcaccttcttcccaaaatcgagaacttgtcctacgatgctaaactagaacatctcatctacctcaagaatcgcctatcctcagccgaggagctgagcgagataaaagagcaattattcgagaagctcgagagtctgttgatcattcatgacgccaacagcagactcaagcaggcaaagcacttctatgatcgaacagtaagggtgtttgaggtcatgttgccagaaaagttgtttatccctaatgatttctttaagaagttggagcagctcattaagcctaaaaatcatgttacatttatgaccagttgggtggagtttctgcggaatatcggactcaaatacatcctcagtcagcagcagctccttcaatttgctaaagaaatctctgtcagagccaatactgaaaattggtccaaggaaaccctgcagaatactgtcgacatcctgctgcaccatatcttccaggaacggatggatctactgtcagggaatttcttgaaagaattaagcctcatcccgtttctgtgccccgaaagagcaccagccgaatttatccgctttcacccacagtaccaggaggttaacgggactctgcccttaatcaagttcaatggcgctcaggttaatcccaagtttaaacagtgtgatgtactgcagctcctttggacctcttgcccaatcctgcccgaaaaggccactcctctgtcaatcaaggagcaagaaggcagtgatcttggccctcaggagcagctggagcaggttctgaacatgctcaatgtgaatctggatccccctcttgacaaagtaatcaataactgcagaaacatctgcaacatcaccactctcgacgaagaaatggtaaagactcgggctaaggtgctgcgctctatatatgagtttctctccgcagaaaagcgggagtttaggttccagctgaggggcgtagcttttgtgatggtagaggacggctggaagctgctgaaaccagaggaggtagtgatcaacttagagtacgaatctgattttaagccgtatctttacaaattgccactggagctgggcactttccaccagctgttcaagcacctcggaacagaggatattatttcaacaaaacagtatgttgaagtgctgagcagaatattcaagaatagcgaaggtaagcagttggacccaaacgaaatgcgcacagtcaaacgagttgtcagtggtctctttcgcagccttcagaatgactccgttaaggttcgatccgacctcgaaaacgttagggatcttgccctttatctgccatctcaggacggtaggttagtgaaaagcagcatcctcgttttcgacgatgctcctcactataaatctcggatccaagggaacatcggagtgcagatgcttgtggacctatctcagtgttacctcggcaaggaccatggcttccacaccaaactgatcatgctcttcccgcagaagctccgcccacggcttctgtcttccattctggaggagcagctggacgaagagactcctaaggtttgtcagtttggggctctctgttctcttcagggcagacttcagttgttactttcatccgagcagtttattacaggtctgattagaatcatgaagcatgagaatgacaacgcttttctcgcaaatgaggaaaaagccattcgcttgtgtaaagcactgagggaggggctgaaggtgtcttgctttgaaaagttacagaccactctgagggtgaaggggttcaatccaatcccccactcgcgaagtgaaacatttgctttcctcaagaggtttggaaatgctgtgatcctcttgtacatccagcactccgactctaaagacattaacttcctgctcgcactcgcgatgacgcttaaatccgcgactgacaatctgatatccgatacctcatatctgattgctatgttaggatgcaatgatatttaccgcatcggggaaaagttggactccttaggagtgaaatacgattcgagtgagccatcaaagctggagttgccaatgcctggcactcccattcccgcagagatccactacactctcctcatggatccaatgaacgttttctacccgggtgagtacgtgggttacttagttgatgccgagggcggagacatttatgggtcatatcagcccacttatacctatgctattatagtccaggaagttgagagagaggatgccgacaactcttcctttctaggaaaaatttaccagatcgatattggatactcagaatataaaatcgtgagcagcctggacctttacaaatttagcagaccagaagagtctagtcaatcccgcgacagcgctccctctacccctaccagccctactgagtttcttacacccggactgcgcagcattccccctctcttctctgggcgagagtcccataagacctcttccaagcatcagagtcctaagaaactgaaagtcaatagcttaccggagatcctcaaagaagtgacatcagtggtagaacaagcctggaagctgcctgagtccgagagaaaaaaaattatcaggcgtctgtatctgaagtggcaccctgacaagaatcccgagaaccatgatatcgcaaatgaagtctttaaacatctgcagaacgaaattaaccgcctggagaagcaagccttcttagatcagaacgctgatagggcttccagaagaacttttagcacttcagcctcacgatttcagagcgataaatatagcttccagagattctacacatcatggaaccaggaggcaacgagccataagtctgagcgtcagcagcaaaataaagagaagtgtcccccatctgccggacaaacttactcacagaggttctttgtgcctcctacgtttaagagcgtcgggaacccagtggaggcgagacgatggctcaggcaggcccgagctaatttctcagcagcaagaaacgacctgcacaaaaatgcaaatgagtgggtctgctttaagtgttacctgagcactaagcttgccctcatcgcagctgactatgcagttcggggaaaatctgacaaggatgtaaaacctaccgctctggcccagaagatagaggaatacagtcagcagctggaagggttaacaaatgatgtccacacactcgaagcctatggagtggattcattgaagacccggtaccctgatctgcttcccttcccccagatccctaatgataggttcacgagcgaagtcgccatgcgggtcatggaatgcacagcctgcatcatcattaaactcgagaacttcatgcagcagaaggtgtac

SEQ ID NO: 242048 - DNA, 7331 bp, synthetic construct
  misc_feature 1..7331: note = Description of Artificial Sequence: Synthetic coding sequence
  source 1..7331: mol_type = other DNA
atggccgctgaggaaggcgttgcgagcgctgctagcgctggaggcagctggggcacggcggctatggggagagtattgcccatgttgctggtgccagtgcccgctgaggctatgggacagctggggagtcgggcacaactacggacccagcccgaggccctaggatccctgacagcagcagggagtttacaagtcctgtccctgacgcccggttcacgcggtggtgggcgatgttgccttgaaggtcccttctggcattttctctgggaggactcccgaaactcctcaaccccaacagagaagcccaaactgctcgctctgggggaaaattacgaactgctgatctacgagttcaatttgaaagacggacgctgtgatgctaccattctgtactcatgttcgcgcgaagctctccagaagttgatagatgatcaggatatatcaatatctctgttatccctgagaatcctgtcgtttcacaataatacgtccctgctcttcattaacaaatgtgtgattctgcacatcatatttcctgaacgagacgcggctatcagggtgttgaactgcttcaccctccctcttccggctcaggctgtggacatgattattgatacacagctgtgtcgcggtatactctttgtcctttcctcccttggctggatctacattttcgatgttgtcgatggcacctatgtggcccacgttgacctcgccctccataaagaggacatgtgcaacgagcagcagcaggagcccgctaaaatctcgagtttcacctctttaaaagtcagtcaggatctggacgtggccgtcatcgttagcagtagcaacagtgcagtggcgttaaatctgaatctgtatttccgtcagcaccccggacacctgctgtgcgaaaggattttggaggatttgccgatacaaggtccaaagggagttgatgaggacgacccagtgaatagcgcatacaacatgaaactggcgaaatttagcttccagatcgaccggtcgtggaaggctcagctgagtagcctgaacgagaccatcaagaactctaaattagaagtgtcttgttgtgccccatggttccaagacattctgcacctagaatcccccgagtccggtaatcacagcaccagtgtccagagctgggcatttattcctcaggacattatgcatgggcagtacaacgtgctgcagaaggaccatgcaaaaacatcagaccccggacgttcttggaagatcatgcacatttctgaacaagaggagcccattgaactgaaatgcgtgtcggtgaccggtttcacagccctatttacatgggaggttgaacggatgggatatactataacactatgggatctggagacacaaggcatgcagtgcttcagcctggggaccaaatgtatcccagtggattcttccggggatcagcagctgtgctttgttctgacagaaaatggcctttcgctcatcctgtttggactaacacaggaggaatttctcaaccggctaatgattcacggatctgcgtccacagtcgataccctgtgtcatctgaatgggtggggcagatgttccatccccattcacgctcttgaagctggtatcgaaaatagacagctggacactgtgaacttctttctaaagagtaaggagaacttgttcaaccccagtagcaaaagctcggtgagcgaccaattcgatcacttgtcctcccatctttatttacgcaacgtagaggagctaatccccgcactagatttgttatgtagcgcaatccgtgagtcctatagcgaacctcaatcaaagcactttagcgaacaactgttgaatttaactctatcatttctgaataatcagatcaaagagctttttattcacactgaggaactggatgagcacctacaaaaaggggttaatatcctgacctcatatatcaacgagctgagaacattcatgattaagtttccttggaaacttactgacgccatcgatgagtacgatgtccacgaaaacgtccctaaggtaaaagaaagcaatatctggaagaaattgtcctttgaagaggtgattgcctcagccatactcaataataaaattcccgaggcacagaccttcttccgtattgattcccatagtgcccagaagctggaagaacttatagggatagggcttaacctcgtattcgataatttgaagaaaaacaacatcaaagaagcatctgagctgctgaaaaatatggggttcgacgttaagggtcagttactgaaaatctgcttctataccacaaacaaaaatatccgggatttccttgtcgagatattaaaagaaaaaaactatttctcggagaaagagaagaggaccattgactttgtgcatcaggtggagaagctctacctgggacactttcaggagaatatgcaaattcagagcttccctcgttactggatcaaagaacaggacttcttcaagcacaaatcagtgctggattccttcctgaaatatgactgcaaagatgagtttaacaagcaggaccatagaattgttctgaattgggcactgtggtgggatcagttgactcaggagtcaatactgctgcccaggatttctcccgaagaatacaagtcttactcgcctgaggccttgtggcgttatttgacagcgcgacatgactggttaaatatcatactttggattggagagtttcaaacccagcacagctatgcctcactgcagcaaaataagtggccacttctgaccgtggacgtcatcaatcaaaacacttcctgtaataactatatgcgaaatgagatactggacaagttggctagaaatggcgtatttctagcctcagagttggaggactttgagtgcttcctgttgcggctctcacgaattggaggtgtcatccaggacacacttcccgtacagaactacaaaactaaagaaggctgggatttccacagccaatttatcttgtactgcctggagcactctttgcagcaccttctgtacgtttatctggattgttacaagctgtcccccgagaattgccccttcctggagaaaaaagagctgcacgaagctcatccatggttcgagttccttgttcagtgccgccaggtggctagcaacctaaccgatccaaaactgatctttcaagcatctctggcaaacgctcaaatcctgatccccaccaaccaggccagtgtctcctcaatgcttctggaaggacacaccctgctggcactcgcaacaacaatgtactcccctggaggggtaagccaggtcgtacagaacgaagaaaatgagaactgcctcaaaaaggtggacccgcagctgctgaaaatggcgctgaccccttatccgaaattgaaaaccgccctattcccacaatgcactcctccaagcgtcctgccttccgatattaccatttatcacctaattcagtctctgtcccccttcgacccaagcagactgtttggctggcagtcagctaatactctcgcaattggcgatgcttggtcacatctccctcacttttcctctccggatctggtaaataagtacgccatcgtagaacgcttgaatttcgcatactatcttcacaatgggcgaccaagttttgcattcggcactttcctcgtccaggagctgataaagagcaagactcctaagcagcttatccagcaggtggggaatgaagcatatgttattggcttaagctccttccacatcccgtcgatcggggcagcatgcgtgtgcttcctcgaactcctcggacttgattcactgaagctgagggtagacatgaaagtggcgaatataatcctgagctataagtgcagaaacgaagatgcacagtacagcttcattagggagtcagtcgcagagaagctctcgaagttggccgatggagagaaaacgacaacggaggagctgcttgttctgctggaagaagggacttggaattctatccagcagcaggagatcaagcggttaagttccgaatcttcttcccaatgggcattggttgtgcagttttgtcgcctgcataacatgaaactgtccatctcctatcttcgggaatgcgctaaagccaatgactggctgcagtttatcattcatagccaactgcataactaccatccagccgaggtgaaatccctgatacaatacttcagcccagtgatccaagaccacctgcggctggctttcgagaatctgcccagcgttcctacaagtaaaatggacagcgatcaggtgtgcaataagtgcccacaagagctccagggctccaaacaggagatgacagacctgtttgagatattactacagtgttccgaggagccggatagttggcattggttactggttgaagctgtgaagcagcaggccccaatcctgtctgtgctcgcttcgtgtctgcagggggctagcgctatcagctgcctctgtgtgtggataataacttctgtagaggacaacgtggccacagaggcaatgggccacatccaggatagtaccgaggaccacacttggaacttggaggatctctccgttatttggcggacattattgacccggcagaagtccaaaacactcataagaggatttcaacttttcttcaaagacagccccctgctgctggtgatggagatgtacgagttgtgtatgtttttcaggaattataaagaagccgaagccaagctcttagagtttcagaagagcctagaaaccttgaatacagctgccaccaaagttcatcctgtgatacccgcaatgtggctggaggatcaggtgtgtttcttgctcaaactcatgttacagcaatgcaaaacccagtacgagctcggaaaacttctgcagctcttcgtggagagagagcacctgttctcagacggcccagacgtgaagaaactctgcattttatgtcaaattctgaaggacacctccatcgcaatcaaccacactattattacctcttacagcatcgaaaacctgcagcacgaatgcaggagtatcctggagcgcttgcaaacggatggtcagtttgctctggcaagaagggtcgccgagctggccgagctgccagtcgataacctcgtgatcaaggaaattactcaggaaatgcaaaccctcaaacacatagaacagtggtcattgaaacaagcccgtattgacttttggaagaagtgtcacgagaactttaagaagaactctataagctccaaagccgcaagcagcttttttagtactcaggcccatgtggcctgcgagcaccctaccggatggagcagcatggaagagcgccacctgctgttaaccctggccggtcattggctcgcccaggaggatgtggtgcctctggacaagctggaggaactggagaaacagatctggctatgtcgcatcacacagcataccctcggcaggaatcaggaagaaaccgaaccacggttttcgagacaaatctctactagtggggaactgagctttgactccctggctagcgagttttcattctctaaactcgctgctctgaatactagcaagtatttggagctcaattccttacccagcaaggagacctgcgaaaaccgcctggattggaaagaacaagagagtctgaatttcctgatcggccgtctgctggacgatggatgcgtgcacgaggcgtctagggtctgcagatatttccacttctacaatcccgatgtggccctggtgctccactgtcgggctctcgcttccggcgaagcaagtatggaggacctgcaccccgagattcatgcactgctccaaagcgccgagctgctggaggaggaagcccctgatattcccctgcggagggtgcactctacatcaagtctggatagccaaaagttcgtgaccgtcccttcgtctaacgaggtagtcactaacctcgaggtgttgacttctaagtgtttgcacggtaagaactattgccgacaggtgctttgtctctatgacttagctaaggagctggggtgtagctataccgatgtggccgcacaggatggcgaagctatgcttcgtaagattctggcctcacagcagcctgacagatgcaagagggcacaggctttcatctccacccaggggctcaaacccgacacagtcgctgaacttgtggctgaggaagtgacaagggaactcctcacttcttcacaaggcaccggccacaaacaaatgttcaaccctaccgaggagagccagacgttcctgcagttgaccactctctgccaggacagaacactggtcggaatgaaactcctcgataagatctcatctgtgccgcacggagaattgtcttgcacgactgagttactcattctagcgcaccactgctttaccctaacatgccacatggaggggattattcgagtcctgcaggcagcacacatgcttactgacaaccaccttgccccaagcgaagaatacggccttgtagttcggctcttgacaggtattgggcgatacaatgaaatgacttacatcttcgatttactccacaagaagcactactttgaagtgctgatgcgcaagaagctggacccttctggaacactgaaaaccgcgttgttagactatatcaaacgctgtcggccaggggatagcgagaagcataatatgattgccctttgtttttccatgtgcagggagattggtgaaaaccatgaggcagccgcacggattcaactcaaacttatcgaatctcagccgtgggaggattccttgaaggatggccaccagctcaaacagttgcttcttaaggctttaactctgatgctggacgcagccgaaagctatgccaaggacagctgcgtgcggcaggcccagcactgccagcgcctgaccaagctgatcacgttgcagattcactttctgaataccggccagaataccatgctgattaatctagggcgtcacaagctaatggattgtatcttagcactgccaaggttttatcaagcctcaatcgtggctgaggcatatgacttcgtcccagactgggcagagatcctgtaccagcaggtaatactgaagggtgacttcaattatttagaagaatttaaacagcagagactgcttaaatccagcatttttgaggagatttccaagaagtacaaacaacatcagcctaccgatatggttatggaaaacctaaagaagttgcttacatattgtgaggatgtgtatctttactacaagctggcatacgagcacaaattttatgagattgtcaatgtcctgctgaaagaccctcagaccggttgctgcctgaaggacatgctggctggtta

SEQ ID NO: 242049 - DNA, 6992 bp, synthetic construct
  misc_feature 1..6992: note = Description of Artificial Sequence: Synthetic coding sequence
  source 1..6992: mol_type = other DNA
atggcggcagaggagggggtagccagtgccgcatctgctggcggtagctggggtacggcggctatgggccgtgttctgcccatgctgctcgtgccggtccccgctgaagccatggggcaactgggatccagggcgcaactgaggacgcagcctgaagctctgggcagccttacagccgctggaagccttcaggtgcttagtctgacaccgggaagtagagggggagggaggtgctgtctcgaaggacctttttggcactttctctgggaggattccaggaatagctcaacacctacggagaagcccaagttgctagctttaggcgagaactacgagctcctgatatacgaattcaacctgaaggacggcagatgcgatgctacaattctgtacagttgtagcagagaagctttgcagaaactgatcgacgaccaggacattagtatcagtctcctgtcgctgaggatcctcagtttccataataacacttccctgctgttcattaacaagtgcgtgatcctgcacatcatcttcccagaacgggatgctgccattcgagtgttgaattgcttcaccttgcccctcccagctcaggcagttgatatgattattgatacacagctctgccggggtatcctgttcgtactgtcaagtctaggatggatctatatttttgatgtggtggatgggacctatgtcgctcatgtcgatctggccctccacaaggaagacatgtgtaatgagcagcagcaagaacctgcaaagatctccagtttcacatcactgaaagtgtcacaggacttggacgtcgccgtgattgttagcagctcgaactctgctgtcgcactaaatctgaatctatatttccgccagcaccccggtcacctattatgcgagcgaattctcgaggacctgcccatccagggaccaaaaggagtggacgaggacgaccccgtgaattctgcgtataacatgaaacttgcgaaatttagtttccagattgaccggagctggaaggcccagctgtcaagtcttaacgagacaattaaaaacagcaagctcgaagtgagttgttgcgccccttggttccaggatatccttcatctagagagtccagaaagcggtaatcacagtacatcagtgcagtcctgggcctttattccacaggatataatgcatgggcaatacaacgtacttcagaaagaccatgccaagacctctgaccctggcaggtcgtggaaaataatgcacatctcagaacaggaagagccaatcgagcttaaatgtgtgagtgtgactggattcaccgccctgttcacatgggaggttgaacggatgggttacacaataaccctttgggatctggaaacgcagggcatgcagtgcttcagcctaggcactaagtgtattcctgtggattcctcaggcgaccagcagctttgtttcgtgctgacggaaaatggactgtctttgatcctttttggactgacacaggaggaatttttgaaccgccttatgatacacgggagtgccagcactgtcgatacactctgtcacctgaatggctggggcaggtgttcaataccaatccacgccctggaagctggtatcgaaaacaggcagctggacacagtaaacttcttcttgaaatctaaagagaatctgttcaatccgagttccaaaagctccgtctccgaccagtttgaccatctgagctcccacctctacctgcggaacgttgaagagctgatcccggcactggacctgttgtgttccgccattcgtgagtcgtattcagagccacagtccaaacatttttctgagcagctgcttaatctgacgctgagtttcctgaataatcagattaaagaactgtttatacacaccgaggaactggatgaacacctccagaaaggagtgaacattctcacctcctatattaacgagctgagaacgtttatgatcaagtttccctggaagctcaccgacgctattgacgagtatgatgtgcacgaaaacgttcccaaagtgaaggaaagcaatatctggaagaaactgtcattcgaggaggtgattgcctcagctatcctgaataacaagatacctgaggcacaaacattctttcgcatagactcccacagcgcccaaaaactcgaggagctcattgggattggactgaatctggtatttgataatcttaagaagaacaatataaaggaagcctctgagctcttaaagaatatgggatttgacgtcaagggacagctgcttaagatatgcttctatactaccaataagaatattagagatttcctggtcgagatcctcaaagaaaaaaactatttcagcgagaaagaaaagaggaccattgactttgtgcatcaggtggaaaaattatacctcggtcactttcaggagaatatgcagatacagagcttccccaggtactggattaaagaacaggatttctttaagcacaagagcgtgcttgactcgtttttaaaatacgattgtaaggatgagttcaataagcaggatcaccgcattgttcttaattgggcgttgtggtgggatcagctgacgcaggagagtatcctgctgcctcgcatctctccagaggaatacaaatcttactccccagaggctctgtggaggtatttgaccgcgagacatgactggctaaacatcattctgtggatcggcgaattccagacccagcactcctacgcttccctgcagcagaacaaatggcccctgctgacagtcgatgtcatcaatcagaatacgtcctgtaacaattacatgaggaatgaaatccttgacaaactggccaggaatggggtgttcctggcttccgaactagaagacttcgaatgcttcctgcttagactgagtaggattggtggagtaattcaggatacgctgccagtgcaaaactacaaaaccaaagaggggtgggattttcactcccagtttattctctattgtcttgagcatagcctgcagcatcttctgtacgtttacttggactgctataaactgagccccgaaaactgcccattcctagagaaaaaggagctacatgaagcgcatccatggttcgagtttctagttcagtgtaggcaagttgcgagcaatcttacagaccccaaactcatatttcaggcttccctggcaaatgcccaaatcttgatcccaaccaaccaggccagcgtgagttcaatgctgttagaggggcatacattactcgctctggccactaccatgtactctccgggtggcgtgtcccaggttgtgcagaacgaagagaatgagaactgcctgaaaaaagtcgacccccaactattgaaaatggccctaacaccttatccaaagctaaagaccgcactatttcctcagtgcaccccacccagcgtgctgccttcagatataaccatctatcaccttatacagtcgctgtccccatttgaccccagccgcctgttcggctggcaatcagccaatactctcgcgatcggagatgcttggtcacaccttcctcatttctcttcccccgacttagtaaataagtacgcaatcgttgagaggctcaattttgcatactacctgcacaacgggagaccatcttttgccttcggcacgttcttggtacaggagcttatcaagtcaaaaaccccgaaacaactgatccagcaagtaggcaatgaggcatacgtaattggcctcagttcattccatattcctagtatcggagcagcatgcgtgtgttttctggaactccttggactcgattctcttaagttgcgcgttgacatgaaggtggcaaatatcatcctctcctataagtgtcgaaacgaggacgctcaatactcattcataagagagtctgtggcagagaaactttcaaagcttgcagatggcgaaaagacaaccacagaggagctgctggtattgttggaggagggcacatggaattccattcaacagcaagaaatcaaaagattgagcagtgagtcttcgtcccagtgggccctggtcgtgcagttttgtcggctgcataacatgaaactgtcaatctcttatctcagggaatgtgcgaaagctaacgactggctgcagtttatcatccatagtcagctgcacaattaccacccagctgaggtgaagagtttgattcagtacttcagtccagtgatacaggaccacctccggctggcgttcgagaacctgccatcagtgccgacgagcaagatggactccgaccaggtctgcaacaagtgcccccaagaactccaagggtccaagcaggaaatgacagacttgtttgagatccttcttcagtgtagtgaagagcctgactcctggcattggctccttgtggaagctgtgaagcagcaagcccctatcttatctgtgctggcttcctgtcttcagggggcatccgcgatctcctgcctttgtgtttggattattacttctgtggaggataatgtcgctaccgaggcgatgggccatattcaggatagcacagaggatcatacatggaatctcgaagacttgagcgtcatttggcggacgcttttgaccagacagaaatcgaagaccctgattcggggatttcaactattctttaaggacagtccgttgcttctggtgatggaaatgtatgagctgtgtatgtttttcaggaattacaaagaggcagaggcaaagcttctggagtttcaaaaatccctggaaactctgaatacagctgctactaaggtgcacccagtaatccccgcaatgtggttagaagaccaggtatgttttctactgaagctgatgctgcaacagtgcaaaacccagtatgaattggggaagctgctccagttgtttgtagaacgtgagcatttattttctgacggacccgatgtgaagaagctctgcattctgtgccagatactgaaggacactagcatcgcgatcaatcacactatcattactagttactccattgagaacctgcaacacgagtgtcggtccatcctggaaaggcttcaaactgacggccagttcgccctcgctcgcagagtcgcggagctggcagagcttcctgtagacaatctagttataaaggagatcacacaggagatgcagacgctgaaacatattgaacagtggtccctcaagcaggccaggatcgatttctggaaaaagtgccatgagaattttaaaaagaatagcatcagcagtaaggcagcatcttctttcttttctacgcaagctcatgtagcctgtgaacacccaaccggatggtcatccatggaggaacgccacctcctcctgaccctggccggacactggttggctcaggaagacgtggtgccattagacaagcttgaagagctagagaaacaaatctggctctgcaggattacccagcacacccttggccgtaaccaggaagaaactgaaccacggttcagtagacagatttccacttctggagagctgtcattcgactccctcgcttccgagttctcctttagcaaactagcagctctcaacactagtaagtacctggaattgaacagccttccaagcaaggagacctgcgagaaccggttggattggaaggaacaggaaagtttaaattttttaattgggcgtttgctggatgacgggtgcgtccatgaggcttcgcgggtctgtcggtactttcatttctataaccccgacgtggccctagtgttgcattgccgcgcattggcctcaggagaagcttccatggaggacctgcaccctgagatccatgccttgttgcagtccgcggaactgctggaggaggaagcaccggatattcccctgaggcgcgttcactctagacataaacagatgttcaatccaactgaggaaagccagacctttctgcagctcactactctgtgtcaggaccgaacactcgtggggatgaagctgctcgacaagatctccagtgtgccacatggcgagctctcttgcacaacggaactgctgattctcgcccaccattgctttactctaacatgtcatatggagggaatcatccgcgtgctgcaggctgcgcatatgcttacagacaaccacctggccccttccgaagaatacggcctggtggtccggctccttacgggtatcggccgttacaacgagatgacatacatcttcgatctcctccataagaagcactatttcgaagtgctcatgaggaaaaagttagacccctctggcacccttaagacagcattactggactatattaagcgctgtaggcccggtgattcagaaaaacataacatgatcgccctttgctttagcatgtgtagagaaattggggagaaccacgaagccgctgctcggatacagctgaaactgattgaaagtcagccttgggaggattccttgaaggatgggcaccagcttaagcagttgctcctgaaggcgttgacattaatgctggacgctgcggaaagttacgcaaaagattcttgtgtccgccaggcccagcactgtcagagactgactaaattgattacccttcagattcatttcctgaacactggacaaaacactatgcttatcaaccttggacgtcataagctgatggattgcatactggcccttcccaggttttatcaggcctccatcgtggctgaggcgtatgactttgtcccggattgggctgagatcttgtaccaacaggttattcttaagggtgacttcaactatctagaggagttcaagcagcaaaggctactgaaatccagcatctttgaggagatcagcaagaagtataaacagcaccaaccaacagacatggtaatggaaaacctaaagaagcttctgacttactgcgaagatgtctacctgtactacaagctggcatacgaacataagttttatgagatcgttaacgtgctcctgaaagatccccaaaccgggtgttgcctaaaagacatgttggcgggtta

SEQ ID NO: 242050 - DNA, 6239 bp, synthetic construct
  misc_feature 1..6239: note = Description of Artificial Sequence: Synthetic coding sequence
  source 1..6239: mol_type = other DNA
atggctgccgaagagggcgtagcgtcggctgcgtcagccggaggtagctggggtacagcagcgatgggacgcgtcctgccaatgttgctcgtccccgtgcctgcagaagctatggggcagttaggatccagggctcagctcagaacccagccggaagcccttggatcacttaccgcggcaggtagcctccaggttctcagcctcacccccggatcgagggggggaggtcgctgttgtttagaggggcctttctggcattttctttgggaagactccaggaactcctctacgcccactgagaaacccaaacttctcgcattgggggaaaattacgagctcctgatttatgaatttaatttgaaggacggtcggtgtgatgctaccatcctgtattcctgttctagggaggccttacagaaattaatcgacgatcaagacatttccatctcactcctgtccctgcgcatcttaagtttccacaataacacaagcctgctgtttatcaataaatgcgttattctgcacataattttcccagagagagacgctgctatccgggtcctgaactgctttacgcttcccctccccgctcaggccgtggatatgatcatcgacacacagctctgtcgtggcatccttttcgtccttagctcactcgggtggatctacatcttcgacgtcgtggacgggacctacgtggcccatgtcgacttggctctgcataaggaggatatgtgcaacgagcagcagcaggagccggcaaaaatttcatcatttacatcattgaaggtctcccaggatctcgatgttgctgtgatcgtgtcctcttccaattctgcggtggcgctgaacctgaacttatatttcaggcaacaccccggtcacctcctgtgcgaacgcatactggaggatctaccaatccaaggcccaaaaggtgtggacgaggatgatcccgttaattcggcatataacatgaagctggcgaagttctcatttcagattgacagatcctggaaagcccagctgagtagtctcaatgaaaccattaaaaactcaaagctagaggtttcttgctgtgctccctggttccaggatattctgcacctcgaaagcccggagtctgggaaccactcgacgtctgtgcagtcatgggccttcatcccacaggatatcatgcacgggcaatataacgttctacagaaagatcacgcaaagacaagtgatccagggcgatcttggaaaatcatgcatatatctgagcaggaggaaccaatcgagctcaaatgtgtgagcgtgactgggttcacagcccttttcacctgggaggtggagcgcatgggatataccatcacgctgtgggacctggaaacgcaggggatgcagtgtttttccctcggaactaagtgtattccggtggactcttcaggtgaccagcagctctgcttcgtcctcacagagaacgggctgtccctcattctgtttggacttacacaagaggagtttctcaatcgccttatgatccacgggtcagcatctaccgttgatacactttgccatctcaatgggtggggcagatgttctatcccgattcatgccctggaggccggtattgagaatcggcagttggacaccgtgaatttcttcctgaagagcaaggagaacctgttcaacccttcatccaagtccagcgtaagcgatcagtttgaccatttatctagccatctctatttacgaaatgtggaggagctgattcccgcactggatctgctgtgctccgctattagagagtcgtacagcgagccccagtccaaacacttcagcgagcaattactgaacctgaccctaagcttcctgaataatcaaattaaagagctgttcatccacaccgaagagcttgacgaacatttacagaaaggcgtaaatatactgacgtcctatatcaatgagctcaggacattcatgatcaaattcccctggaaactgaccgacgcaatcgacgagtacgatgtccatgagaatgttcctaaagtgaaagagagcaacatttggaagaaactttcttttgaggaggtaatcgcgagcgccatcctcaataacaagattcccgaggcacaaaccttttttcgtattgatagccactccgcacagaaactcgaggaattgattggcatcggcctcaatcttgtgtttgataatttaaaaaaaaacaatatcaaagaagcaagcgaactcctgaagaacatgggctttgacgtcaaagggcagctgctcaagatctgcttttatacaactaataaaaacatcagggacttcctggttgaaattctgaaggaaaagaattacttctcagaaaaagagaaaagaaccatcgattttgtccaccaagtcgagaagctgtacctgggtcatttccaagagaacatgcaaatccagagttttcccagatactggataaaggagcaggattttttcaagcacaagtcagtcctggattcattcctgaaatatgattgcaaggacgaattcaataaacaggatcaccgtattgtgttgaactgggccctgtggtgggatcagctgacgcaggagtctatactcctccctcgcatttcaccagaggagtacaaaagctacagccccgaagccctatggaggtatctcactgctcgacatgactggctgaatatcatcttgtggatcggagaattccagacacagcacagttacgcctccctgcaacagaacaaatggcctctcctgacggtggacgtgatcaatcagaatacctcctgtaacaactatatgcggaatgaaatcctagataaactcgcccgaaacggggtgttcctcgcttcggagctggaagatttcgagtgttttctgcttcggctgtctcgcattggcggagtgattcaagacacactgccagtgcaaaactacaaaacaaaggagggatgggacttccattcacagttcattctctactgcttggagcacagtctccaacaccttctttacgtctacctggattgctacaagctgagccctgagaattgcccattcttggagaagaaagagcttcatgaggcacatccttggtttgaatttctcgtgcaatgtagacaagtcgctagtaacctcacggaccctaaactgatttttcaggcgagcctggcgaacgctcaaatcctcattcctacaaaccaggcctcagtctcctcgatgctgttggaaggccacactctcctcgccctggccactacaatgtacagtcccggaggcgtgtcccaggtcgttcaaaacgaagagaacgagaattgtctgaaaaaggtcgaccctcagctcctgaaaatggcgcttaccccataccccaagttgaaaacggccctgttcccccaatgcactccaccaagcgtcttgccatctgacatcacaatttaccatctgattcaatcattaagccccttcgatcccagccggttgttcggctggcagtctgccaatactctggccattggcgacgcctggagccatttacctcacttttccagccccgacttggtaaacaagtacgctatcgtggagcggctgaatttcgcatattacctacataatggtcggcctagtttcgctttcggcacctttttggtgcaggagctgattaagtcgaaaactcccaagcaactgatccagcaggtgggaaacgaggcctacgtgattgggctctcttcttttcacatcccatcaatcggggcagcgtgtgtctgtttcctggaactactgggactagattccctcaagcttagagtggacatgaaagtagcgaatatcattctgtcttacaagtgtcggaacgaagacgcccagtattcatttatccgtgagagtgtggccgagaagttatccaaactggctgatggagagaagacaacgacagaagagctgctggtgctcttggaggaaggaacctggaacagcattcagcagcaggagattaaaaggctgagctccgagtcctcttcccaatgggccctggtggtgcagttttgtcgcctccacaacatgaaactctccatctcctacctaagagagtgcgcaaaagccaatgattggctgcagtttatcattcactcacaattgcacaattatcacccagctgaagttaaaagtttgatccagtattttagcccagtgatccaggaccacctccgcctcgctttcgaaaatctgccaagtgtaccaacttctaagatggacagcgaccaggtttgcaataaatgcccccaggagctgcaaggatctaagcaggagatgactgatctcttcgagatcttgcttcaatgtagtgaagagcccgatagctggcactggctcttagtggaagccgtgaaacagcaagctcccatactttctgtgctcgcttcatgcctgcagggtgcctctgcaatctcatgtttatgtgtgtggatcattacatctgtggaggataacgtggcgaccgaggccatgggtcacatacaggatagcacagaagaccacacatggaatctcgaggacctgtctgtgatctggaggactctactgacacgtcagaaatctaaaactttgatcagggggttccagctgttcttcaaagattctcctctcctcctcgttatggaaatgtatgaattgtgcatgtttttcaggaattataaagaggccgaggcgaagttgctcgagttccagaaaagccttgaaaccctgaataccgctgccacgaaggtgcacccagtcatacctgccatgtggctggaggaccaggtgtgtttccttctgaagctgatgctgcagcaatgcaaaactcagtatgaattgggcaagctgctgcagcttttcgtggagcgggaacacctcttctcagacggccctgacgtaaaaaaactgtgtatactctgtcagattctgaaggacactagcattgctataaatcacacaatcattaccagctatagtattgagaacctgcagcatgaatgcagaagcatccttgagaggctgcaaaccgatggtcagttcgcgctagcgagacgggttgcagaactggctgaactgcccgtggacaacttagtgatcaaagaaatcacccaggaaatgcagaccctcaagcacatcgaacagtggagcctgaaacaggccaggattgatttttggaaaaagtgtcacgaaaactttaagaagaatagcatcagcagcaaagcggctagttccttcttcagcacgcaagcccatgtagcctgcgagcacccaacagggtggagttctatggaggaaaggcacctgcttttgaccctcgccggacattggttggcccaggaggacgtggttccactggacaaactggaggaactcgaaaaacagatctggctgtgtcgtattacccaacacacacttggcagaaatcaggaagaaaccgagcctcgcttttccaggcagatttcgacatccggtgaactttcatttgattcattggcatctgagttctccttctccaaacttgccgcactaaacacgtctaagtatctagagcttaattcgctcccatccaaagagacatgcgaaaacaggctagattggaaggagcaggaatccctgaattttttgatagggagacttctagatgatgggtgtgtgcacgaggcttcaagagtgtgccgatatttccatttctacaatcccgacgtagcattggttctgcattgccgagcccttgccagcggcgaggcctccatggaggacttgcatccagagatccatgctctcttgcagtctgcagaattgctcgaagaagaggccccagacatccccctgcgacgggttcacagcaccagttccttagattcgcagaagttcgtgaccgtcccatcatcgaatgaagtggtaacaaacttagaggtactcacatccaagtgtcttcatgggaagaattattgtaggcaggtgctctgtctttatgacctggccaaagagctgggctgttcgtacaccgatgtggcagcacaggatggtgaggctatgttgaggaagattcttgcctcccaacaacccgaccggtgcaagagggcccaagcctttatttccacccaagggctcaagccagatacggtagccgagctcgtcgccgaggaggtcacccgggagcttcttacaagctctcagggcaccggcgctctgccaccgggagactcgcagcctttgta

SEQ ID NO: 242051 - DNA, 2001 bp, synthetic construct
  misc_feature 1..2001: note = Description of Artificial Sequence: Synthetic coding sequence
  source 1..2001: mol_type = other DNA
atggagcaggagcctcagaacggcgaacccgcagagatcaaaatcattcgagaggcctacaagaaagcatttctgttcgtgaataagggcttaaacaccgacgaactgggacagaaagaagaggcaaaaaactattacaagcagggaataggtcatctgctgcggggtatctcaatctcctctaaagaatcggaacatacgggtccaggctgggagagcgctcggcagatgcagcagaaaatgaaggagaccctgcaaaatgttaggactcggctcgagattcttgaaaaggggctggccacttcactgcaaaacgatctgcaagaagtaccaaaattgtatcctgaatttccacccaaagatatgtgtgaaaagctgcctgagcctcagagttttagttcagctcctcagcacgccgaggtgaatggcaacacttccacaccctccgcaggcgctgttgcagcccctgcaagtctgtctcttccctctcagtcttgtccagccgaggcacctcctgcgtatactccgcaggctgccgaagggcactatacggtgtcttacggtacagacagcggagagttttccagcgtgggcgaagaattctataggaaccactcacaaccgccacccctggaaacgttggggctcgacgccgacgagcttatcctgattcctaatggtgtccaaatcttttttgtaaatcccgcaggcgaggttagcgcgccatcgtacccgggatatctgcgcatcgtgagatttctcgacaactcgctggacacggtgctgaatcggcctccgggatttctacaagtctgcgactggttgtatcccctggtgcccgaccgctctccagtcctcaagtgtactgccggtgcgtacatgttccctgacaccatgctccaagctgccggatgttttgtgggggtggtgctttcaagtgaactgccagaggatgatcgggagctgtttgaagacctcctgaggcagatgtcggacctccggttgcaagcgaattggaatagagcggaggaggagaacgagttccagattccgggtcggactagaccctcttctgatcagcttaaggaggcaagtggcactgatgttaagcagctggaccagggtaacaaagatgtcagacataagggcaaaagaggaaagcgagctaaagacaccagcagtgaagaggtaaacttgagtcacattgtgccttgcgaacccgtgccagaggaaaagcccaaggagcttccagagtggagtgaaaaggtggctcataacatattatcaggagcctcatgggtgtcatggggccttgtgaaaggtgccgaaatcaccggaaaggccatacaaaagggagcctccaaactgagggaacgcatccaaccggaagaaaagccagtggaggtgtccccagccgtgaccaaaggtctatacatcgccaagcaggcgaccgggggagctgccaaggtttcacaattcttggtggatggcgtgtgtacagtagccaattgtgtggggaaggagctggccccacatgtcaagaagcatggttccaagctggtgcccgagagcctcaaaaaagataaggatgggaaatccccgttggacggcgcaatggtggtggccgcttcttctgtgcagggatttagcaccgtctggcagggactagaatgtgccgctaagtgcatcgtcaataacgttagcgcagaaacagtccagacggtgcggtacaagtatggctataatgccggagaagccacacaccacgccgtagacagcgcagttaacgtgggcgtgacggcctataacataaataacatcggcataaaggctatggtgaagaagacggccacacagacaggccacacactgctggaagactatcagatcgtggacaattcacaaagagaaaaccaagaaggcgcagccaacgttaacgtacgtggtgagaaagacgaacagactaaggaggtgaaagaagctaaaaagaaagacaaatag

SEQ ID NO: 242052 - DNA, 2001 bp, synthetic construct
  misc_feature 1..2001: note = Description of Artificial Sequence: Synthetic coding sequence
  source 1..2001: mol_type = other DNA
atggagcaggaacctcaaaacggcgaaccagccgagattaagatcatccgagaggcatataagaaggcttttctgtttgtcaacaagggccttaacaccgatgagctagggcaaaaggaggaggccaaaaactattacaaacagggcattggacacctactgcggggaatttcgatttcctcaaaggaaagtgaacacacaggacccggatgggaatcggcccgacagatgcaacaaaaaatgaaggaaaccctccagaatgttcggacacgccttgagattcttgagaaagggttggctacctctctgcagaatgacctgcaggaggtgcccaagttgtacccagagttcccaccgaaggacatgtgcgaaaagttgcctgaaccgcagagcttctccagtgcgccacagcacgccgaggtaaacgggaacactagtacgccttcggctggtgctgtggcagcacccgcaagcttgtctctaccatcacagtcttgccccgctgaggcccctccagcttatacacctcaggctgcagaagggcattacaccgtcagctatggcactgacagtggggaattctcgtctgtgggagaggagttttacaggaaccattctcagccgccacctttggagacactggggctggacgccgacgagctgattctgatccccaatggcgtgcagattttttttgttaaccctgccggagaggttagcgccccttcataccctgggtatcttcggatagtgcgtttcttagacaactcgctggacaccgttctgaatagaccgccaggtttcctgcaggtctgtgattggctctatcctttagtgcccgaccggtcaccagtgttaaagtgcactgctggagcttacatgtttccggatacaatgcttcaagcagccggatgcttcgtaggagtagtgctctcctccgaactgccagaggatgaccgggagctattcgaagatctcttacggcaaatgtcggatttgagactgcaggccaactggaaccgggctgaggaagagaatgaattccaaattccaggtcgcacccgccctagctccgatcagctgaaggaagcatccggaaccgatgtaaaacagctggatcagggcaataaagacgtccggcacaaagggaaaagaggtaagagagcaaaagataccagcagcgaggaggtgaacctgagccacatagttccttgtgaacccgtgcccgaggagaagccaaaagagctgcccgagtggtctgaaaaggtggctcataatattctaagcggagcctcgtgggtgtcttggggtctggttaagggggctgaaatcacaggtaaggcaatccaaaagggagcctccaagctcagggagaggatccagcctgaggaaaaaccagtcgaagtgagtcctgcggttaccaagggattatatatcgccaaacaagccaccgggggtgctgctaaggttagccagttcctggtggacggggtttgcaccgtggctaactgtgtgggaaaagaactggcaccccacgttaagaagcacggaagtaaactggttcccgagagcctgaaaaaagataaagatggaaagtcaccgctagacggggctatggtggttgccgcatctagtgtacagggatttagcaccgtctggcagggattagaatgtgccgcaaaatgcattgtgaacaacgtgtccgcagaaacagtgcagacggtaagatacaagtatggctataacgctggggaggcgacgcatcacgccgtcgactctgccgtgaacgtgggcgtgaccgcatataacataaacaacatcggaatcaaggccatggtcaagaagacagctacacaaacgggccatacacttctagaagactaccagatcgtggataactcccagagggaaaaccaggaaggggcagctaacgtaaacgtcaggggagaaaaagatgagcaaaccaaggaagtgaaagaggcaaagaaaaaagacaagtag

SEQ ID NO: 242053 - DNA, 2001 bp, synthetic construct
  misc_feature 1..2001: note = Description of Artificial Sequence: Synthetic coding sequence
  source 1..2001: mol_type = other DNA
atggagcaagaaccacagaatggagaacccgctgagatcaaaatcatccgggaagcatataagaaggccttcctgtttgtgaataagggcctgaacactgacgaattgggacagaaagaggaggccaaaaactattacaagcaaggcattggtcaccttctgcgcggtatttcaatttccagcaaggagagcgaacatacagggccaggatgggagtccgcacgccagatgcagcagaagatgaaagaaacgctgcaaaacgtcaggacccgcttggagatcctggagaagggattggccacctcactgcagaacgacctgcaggaggtcccgaagctgtaccctgaatttcccccaaaggatatgtgtgagaagctccccgagccgcagagcttcagtagcgctccgcagcatgccgaggtcaatggaaacactagcaccccctcagcaggagctgtagcagcaccagcatctctcagcctgccgtcgcagtcttgcccagccgaggctccacctgcctacactcctcaggccgctgagggccactatacagtctcgtatggaacagactcaggcgagttcagttcagtgggagaagagttttacagaaaccacagccagcctccaccattggagacactgggcctggatgccgatgagctcatattaatcccgaacggagttcagatattttttgtcaaccctgccggagaggtcagcgcaccttcataccccggttatctgagaatagtgagatttctggataactctctggacacagtactgaaccgtccccctggttttctgcaagtctgcgattggttgtatccccttgtgccagatagaagcccagttctgaagtgcacggcaggggcttacatgttcccagacacaatgctgcaagctgcaggctgtttcgtaggcgtggtcctgtcaagcgagctgcctgaggacgatagggagctgtttgaagacctgctcagacagatgtccgatctgcggctgcaggcgaattggaaccgcgctgaggaggaaaacgagttccagatcccaggacgcacccgtccttcttccgatcagctcaaagaagccagcggaacagatgtcaagcaactggatcaggggaacaaggacgtgcgccataagggtaaacggggaaaacgcgcaaaagatacctcttccgaagaggtgaacctgagtcacatcgtcccgtgcgagccagtgccggaagagaaacccaaggagctgcccgaatggtcagaaaaagttgcccacaatatcctatctggcgcaagttgggtgagttgggggctggtaaagggcgctgagatcaccgggaaggccatacagaaaggagcttcaaaattacgggagcgcatccaacctgaagagaaacccgtggaggtgtctccagccgtgactaaagggttgtatatagcgaaacaggcgacgggcggtgccgctaaagtctcacaattcctggtggacggagtctgtactgtcgctaactgcgtgggcaaagaactcgccccacacgtaaaaaagcacgggtcaaaactggtcccagaatccctgaaaaaagataaggatgggaagtctcccctcgacggcgctatggtggtggcagcttcttctgtgcagggattttctacggtgtggcagggcctggagtgcgccgcaaagtgcattgtgaacaacgtaagcgccgaaactgtacagaccgtccgatacaagtatggctacaatgcgggagaagccacccatcatgcggttgactccgctgtcaacgtgggagtgaccgcttataacattaataatatcggcatcaaggccatggtaaagaagactgccactcaaacaggtcatactctgctcgaagattatcagatcgtggacaatagtcagcgggaaaatcaagagggagctgctaatgtgaatgtgcggggagagaaagacgagcagactaaagaagtgaaggaggccaaaaagaaagataagtag

SEQ ID NO: 242054 - DNA, 2001 bp, synthetic construct
  misc_feature 1..2001: note = Description of Artificial Sequence: Synthetic coding sequence
  source 1..2001: mol_type = other DNA
atggagcaggagccacaaaacggtgaacccgcagaaatcaagattattcgcgaggcctacaaaaaggccttcctgtttgttaataaaggactcaacaccgacgagctgggacagaaagaagaagcaaaaaattattacaagcagggaatcggccacctccttaggggcataagcataagttcaaaggaatccgaacacaccggaccaggctgggaatcagcgagacagatgcaacagaaaatgaaagagactctgcagaatgtgcggactaggctggaaatactggagaagggcctggccacatctctgcaaaatgacttacaggaggttcccaagctgtaccccgagtttccaccaaaggacatgtgcgagaaattgcccgagccccagtcctttagctcagccccacagcacgcagaagttaatgggaatacttccacaccctctgcaggtgccgtagccgctcctgcctcactctcattgccgtcccagtcatgtccggcagaggcaccccctgcatatactccacaggcagccgagggtcactataccgtgtcttatggaacagattccggagagttctcctccgtgggcgaggaattctaccggaaccattctcaacccccaccgttggagactctcggcctcgatgccgacgaactgatattaattcctaacggagttcagatcttcttcgttaaccctgcaggagaagtgtccgcaccgtcatatccaggatatctacggatcgtgagatttctcgacaatagtcttgacaccgtgctcaacaggccacccggattcttacaggtttgtgattggctctacccactggtgcctgaccggtcgccagtgcttaagtgcaccgccggagcctatatgtttcctgacacgatgctgcaagctgcgggttgttttgtcggtgtggtgctttctagcgagcttccagaagatgatagagagcttttcgaggacctgctgcggcaaatgtccgacctccgcctgcaggcaaattggaaccgggcagaagaagagaatgaatttcaaatccctgggcgaacgaggccttcatccgaccaactcaaggaggccagtggtaccgacgtgaaacagctggaccagggaaataaggacgtgcggcacaagggcaaacggggtaagcgcgctaaggatacttcttcagaggaagtcaatctctcccacattgtcccttgtgagccagttccagaggagaagccaaaggaactgcccgagtggtctgagaaggtggctcacaacattttatcaggcgcttcttgggtgtcttgggggctcgttaagggagcagaaatcacaggcaaagccattcaaaagggcgcatctaagctgcgcgaaaggattcagccagaggaaaagccggtcgaagtctcaccagctgtgacaaaaggcctgtatatcgctaaacaggctactggcggagccgcaaaggtttcccagttcctcgtcgacggggtatgtacagttgccaactgtgtgggcaaagagcttgccccacacgtaaaaaaacacggctctaagctggttcctgaaagtctgaaaaaagacaaggacggcaagtctcccctagatggtgccatggtggtggcagcgagcagcgttcagggcttctcaactgtttggcaggggctcgagtgcgccgcaaagtgcattgtgaacaacgtctctgccgagactgtgcaaaccgtcagatataagtatggttacaatgccggtgaggccacacaccatgcagtggatagcgccgtgaacgtaggggtcaccgcctacaatataaataacatcggcatcaaggcaatggtgaagaaaactgccacacagacaggccacactctgctcgaggattaccagatcgttgataatagccagcgggaaaaccaggaaggagcggctaacgttaatgtgagaggagagaaggacgagcagaccaaggaagtcaaggaggctaaaaaaaaggacaagtag

SEQ ID NO: 242055 - DNA, 846 bp, synthetic construct
  misc_feature 1..846: note = Description of Artificial Sequence: Synthetic coding sequence
  source 1..846: mol_type = other DNA
atgggagagatcaaggtgtcccctgattacaactggttccggggtactgttccgctcaaaaaaatcatcgtggatgatgatgacagcaagatctggtctctttacgatgctgggcctagatctataagatgtcctctgatttttctgcctcctgtgtctggcaccgcggacgtcttcttcaggcagatcctggcactcaccggttgggggtatcgcgtcatagccgtccacttgttcggggctagcttggggggatttctcgctcagaagttcgcagaatacactcacaagagtcccagagtacattcactcatcttgtgtaatagtttctctgatacgagcatctttaatcagacgtggactgcgaacagcttctggctcatgccagcttttatgctgaagaaaatcgtcttaggcaattttagctccggcccagtggatcctatgatggccgatgccatcgactttatggttgacagactggagtcgctggggcagtctgaactcgcttctaggttaaccctgaattgtcagaactcatatgtagaaccacataagatccgggatattcccgtcactatcatggatgtgttcgatcagtccgccttgtccacggaagccaaggaggagatgtacaagctgtaccctaacgcacgcagggcgcatctcaagacaggcggtaacttcccttatttgtgtcggtcagctgaagtgaacttatacgtgcaaatccatcttctgcagtttcatggtacaaaatacgcagcaatcgatccatctatggttagtgccgaagaacttgaggtgcagaaaggatccctgggaatcagccaagaggagcaatag

SEQ ID NO: 242056 - DNA, 927 bp, synthetic construct
  misc_feature 1..927: note = Description of Artificial Sequence: Synthetic coding sequence
  source 1..927: mol_type = other DNA
atgggtgaaatcaaggtcagccctgattacaactggttcagagggaccgtcccactcaagaaaataatcgttgacgatgacgactcaaagatctggagcctctatgatgcaggaccaagatctatcaggtgtccactgatctttctgccccctgtatcagggaccgcggacgtcttcttcagacagattctggctcttactgggtggggctaccgcgtgatcgcgctgcaataccccgtgtattgggatcacctggagttttgcgacggatttcggaagctcctggatcatttgcaactcgacaaggtgcacctctttggggcttctctgggcggtttcctggcccagaaattcgcggagtacacacacaagtcacccagagtgcattcgctgatcttgtgtaactcattttccgacacgtcaattttcaaccagacgtggacagctaactctttttggctaatgccggcatttatgcttaagaagatagtacttggtaatttttccagcggcccagtggaccccatgatggcagatgccatcgacttcatggtcgacaggttggaaagcttaggccagtcagaactagcaagtcgcctcactctgaattgccagaacagctatgtggagccccataagatcagagacattccagtcaccataatggacgtgtttgaccaatcagcgctctctacggaggcaaaggaggaaatgtataagctatatcctaacgcgcgaagagcacacctgaaaacagggggtaactttccctacctatgccgctcagccgaagtaaacttgtacgttcaaattcacctgctgcaattccacgggacgaaatacgccgctatcgacccatcaatggttagcgctgaggagttagaagtccagaagggctcactgggaatttcccaggaggaacaatag

SEQ ID NO: 242057 - DNA, 927 bp, synthetic construct
  misc_feature 1..927: note = Description of Artificial Sequence: Synthetic coding sequence
  source 1..927: mol_type = other DNA
atgggggagatcaaggtgagtccggattataattggtttcgcggaaccgtccctttaaagaaaatcatcgtggacgacgacgatagcaaaatctggagtctctatgacgccggaccgaggagtattcggtgtcccctcatattcctgccacctgtaagtggcacagcagatgtgttttttagacagatactcgcactgacaggatgggggtacagagtgattgcacttcagtatcccgtctactgggatcacctggaattctgcgacggctttcggaagctcctggaccacctgcagctcgataaagtccaccttttcggagcatccttaggaggctttctcgcccaaaagttcgccgaatatacacacaaatccccccgagtgcacagtctgatattgtgcaattcgttcagtgacacaagcatcttcaatcagacatggaccgctaactccttctggctgatgcctgcgtttatgttgaagaagatcgttctgggtaactttagctcaggccctgtcgatccaatgatggctgacgccatcgacttcatggtggatcgcctggaatcgctaggccagtcggagcttgcctcacgcctcactctgaattgccagaatagctacgtcgagccccataaaattagggacattcccgtgacgatcatggacgtgtttgatcagagtgccctgtccacggaggctaaagaggaaatgtataagctgtaccccaacgctcgcagggctcatctgaagaccggcggaaacttcccctatctttgtcgttccgcagaggttaacttgtacgtgcagatccatctgctgcaatttcacggaactaagtacgcggcaatcgatccttctatggtgtcagccgaggagctcgaggtccagaagggatccttagggatctctcaggaggaacaatag

SEQ ID NO: 242058 - DNA, 2388 bp, synthetic construct
  misc_feature 1..2388: note = Description of Artificial Sequence: Synthetic coding sequence
  source 1..2388: mol_type = other DNA
atggcggtgctgttgctactgctgcgtgcattaagacgaggccctgggccaggtccgagacccctgtggggaccgggacctgcgtggtctcctgggtttcccgcacggccaggtcggggtagaccgtatatggccagtcgcccacctggcgatcttgccgaggctggcggacgggctctacagtccttacagttgcgcctcctaactcccacttttgaggggataaatgggctgcttctgaagcagcatctggttcaaaatccggtgagactctggcagttattgggcggtacattttacttcaatacttcccgacttaagcaaaagaacaaagaaaaagacaagagcaagggtaaagccccagaagaggacgaggaggagaggaggcgcagagaaagggacgatcaaatgtatagagagcggctgaggaccctgttggtgatcgctgtagtgatgtccttgttgaacgctctctctacaagcggtggtagcattagctggaatgattttgtgcacgagatgctggccaaaggggaggtgcaacgtgtgcaggtagtacccgagagtgatgttgttgaggtgtacctgcaccctggcgctgtggttttcgggagaccacgccttgcattgatgtacaggatgcaggtggccaatattgacaagttcgaggagaagctgcgcgctgcagaggacgagctgaatatcgaagcaaaagacagaatacccgtgtcttataaaagaaccggcttctttggaaatgcactctactcagtgggcatgaccgccgtgggtctggcaattctgtggtatgtcttcagactggcaggaatgaccggacgcgaggggggattttcagcctttaatcaactcaaaatggcccgtttcaccattgtcgacggcaagatggggaaaggggtgtcctttaaagacgtggccggtatgcatgaagccaagctcgaggtgagagaattcgtagactatctgaaaagtcccgaacggttcctgcagctaggtgctaaagtgccgaaaggggctttgttattagggccaccaggatgtggcaagacgttactagccaaagcagtggctacggaggcacaggtcccctttctggctatggcagggccagaatttgtcgaggttatcggaggactgggagccgcacgggtgagaagtctgtttaaagaagccagggcgcgtgctccatgtatcgtatatattgacgagatcgacgccgtcggaaagaagcgtagcacaacgatgagcggttttagcaatacggaggaagaacagacactgaaccagctgcttgtcgagatggacggaatggggacaacggaccacgtaattgtgttagcttcaacaaatagggctgacattttggacggtgccctaatgaggccaggacgactggatcgccatgtgttcatagacctccccacgctgcaggagcggagagagatctttgaacagcacctgaagtcgctgaaactgacccaaagcagcaccttttatagccagagattggcagagctgactccaggattctccggtgcagatatcgccaacatttgcaatgaggccgcattgcacgctgctcgcgagggccacacatctgtgcacacactaaatttcgagtacgcggttgagagagttcttgccggaacagctaagaagagtaaaatactatctaaggaagaacagaaggtcgtggccttccacgaatctgggcacgcccttgtgggctggatgctcgaacacaccgaagctgtgatgaaagtcagtattactcccagaacaaatgccgctctgggttttgcccaaatgctacctcgggaccagcacttgttcactaaggagcaacttttcgaaagaatgtgcatggcgctcggaggtagggcatctgaggcactgagttttaatgaagtgacttccggcgcacaggatgacctgcgaaaggtcacaagaattgcttattctatggtgaaacaatttgggatggctcccggtatcggacccatttcgttccccgaagcacaggagggactgatgggcataggtaggcgaccattttcacagggactccagcagatgatggatcacgaggcaagactgctcgtggccaaggcttaccgtcacaccgaaaaggtcctgcaagacaaccttgacaagctacaggcactcgccaacgccctgctcgaaaaggaggtcatcaattatgaagatatagaagctttgattggacctccgccacacggacctaaaaaaatgatagctcctcagcgctggatagacgctcagcgcgagaagcaggatctgggcgaagaagagacagaggaaacccagcagcctcccttggggggtgaggagccgacctggccaaagtag

SEQ ID NO: 242059 - DNA, 672 bp, synthetic construct
  misc_feature 1..672: note = Description of Artificial Sequence: Synthetic coding sequence
  source 1..672: mol_type = other DNA
atgaggcttaggtgtactcgaagggggagggatactttgccctgcacactcagcactagcagcaccccctggagtgcctccagccaagttcccagggcacagttgggaaaagctgtcggcagctgccgcggagtgggctcctgctgtgcgagacactgtaaaacccacctggcctctctgcggcagccttgtggggagcgcacaggcgcagcttgtgttctgctgatctacttccgcgtgactatctacttctatgtagaaatcgaaaagcttctgattatcgtggccaagcaagaaggtctgtccgggaatcataaacccgttgagcgcaaatacatgacttacctgagcgcacaggatcacgagctgattcaggttgtccagaacggacaccttcagatgtgtggaaaatccgagacgggcaatgaagcctctcccggactgcctaaaagagccaggtcatgtcctcgcaagaataggaagtggctgaggtttatgtctcgtgccacgccctggtgggcaggatgttggtccacacggagggacgagggtctccacaatccttcgaccaacgctgcgttagggttcgcacaggccccacagcgccctgctcccctgcatgagcagctttttgaacgtatgtgcatggcattaggaggtcgtgctagctag

SEQ ID NO: 242060 - DNA, 618 bp, synthetic construct
  misc_feature 1..618: note = Description of Artificial Sequence: Synthetic coding sequence
  source 1..618: mol_type = other DNA
cttggaccccaggcatgtactgtcgtcccacgtagcaaatgcttcgatctggagatggtgtcctctagatgggagccactccttcttctcaccgaggtgacatccgcaaatgaggtgtgggtcacgagcaactccacagcacttgtgttcgtgtccgataatgtccgcgaggaacttgaggaggttcaagatctgctttgtcgcacattgcctctgccagtgcaactgtcttttcccgaagaagcgctcgacgtcgctcgcgtagctcacgtttttgtgagtccgttttgcttcagtgctggatccgaagaacgcaggcgcagagagcgcgacgatcagatgtaccgggagcgactgcgcacactgctggtgatcgcggtggtcatgtcacttctgaatgctctttctacctcaggtggttccatctcatggaatgatttcgtgcacgaaatgctggcaaaaggagaagtgcagcgcgtgcaggtagtccccgagtctgacgtggttgaagtctaccttcaccccggagcggtcgtcttcggacgacccagactagcgttaatgtatcgaatgcaggtggcaaacatcgataaattcgaggagaagttaagagcttag

SEQ ID NO: 242061 - DNA, 1470 bp, synthetic construct
  misc_feature 1..1470: note = Description of Artificial Sequence: Synthetic coding sequence
  source 1..1470: mol_type = other DNA
atggctgtcctgctgcttttgcttcgggcactacgaagaggccctggacccggaccaaggccattgtgggggccaggaccagcctggtcccccggattcccggctcgcccagggaggggcaggccttacatggcctcccgaccacccggtgatctcgctgaagctgggggacgcgctctgcagtccttgcagttgagactgctgactccgacttttgaaggcataaatggactgctgttaaaacagcacttagtgcagaatccagtccggttatggcagcttttgggcggaaccttctatttcaacacctccagattgaagcagaagaacaaggagaaggacaagtccaaagggaaggctcctgaagaggacgaagaggagcgcaggagaagagaaagagacgatcaaatgtacagggaaaggctcagaacccttttagtgatcgcggtcgttatgtccctgctcaatgccttaagtacgagcggtggtagcatcagctggaatgacttcgtccacgaaatgctcgccaagggagaggttcaacgagtgcaggtggtccctgaatcggacgtcgtggaggtgtatttgcatcccggtgcggtggtgttcggtcggccacggctggctcttatgtacagaatgcaggtcgcgaatatcgacaaattcgaagagaaactgagggcagccgaggacgaactgaacatcgaggccaaggatagaattcccgtgagttataagcgtaccggcttttttggcaacgctctatatagtgtgggaatgaccgcagtaggtctggccattctctggtacgtattcaggctggccggtatgacggggcgtgagggtggcttcagcgcgtttaaccagctgaaaatggccaggtttactatcgtcgacggcaagatgggaaagggcgtatccttcaaggatgtcgctgggatgcacgaggccaagctggaggtgagagagttcgtagattatcttaaatccccagagaggtttttgcagctgggagctaaagtgcctaaaggtgcactgctgctcggcccaccaggctgtggcaaaacactcctggccaaggcagtcgctaccgaagcccaggtgccgttcttggctatggccggacccgagttcgtggaggttattggtggtctgggggctgcacgcgttcgctcactgtttaaagaggccagagcccgtgctccttgcatcgtttacatcgacgagatcgatgctgtgggcaagaaacgatcgactaccatgtctgggttttcaaataccgaggaggaacagaccctcaaccagctgttggtggagatggatggggcatccctcgaccagctgccctctcagggcacgatgagaaagctccgaggcaagactcccgcttgctcgtgtttgactgaacctacaggcagtcgcagagcaatggaaggccatagtctctgttggggctgccttctgcactag

SEQ ID NO: 242062 - DNA, 1851 bp, synthetic construct
  misc_feature 1..1851: note = Description of Artificial Sequence: Synthetic coding sequence
  source 1..1851: mol_type = other DNA
atgaactccccaggcggacgaggcaagaaaaaaggatctggcggtgcctctaatccggtgccccctcggcctcctcctccgtgcctcgcaccagcacctcctgccgctggcccagcccctccacctgagtcgcctcataagcgcaacctctactatttttcctacccattgttcgtgggtttcgccttgctacggctggtggcattccatctgggccttctcttcgtgtggctctgtcagcggttcagtcgcgcattgatggccgctaagaggtcttcaggagccgctccagcgcctgcttccgcctccgcaccagcccctgtgcctgggggagaggccgaacgcgtccgggtctttcacaaacaggcctttgagtacatttcaatcgccctcagaatagacgaagacgaaaaggctggtcagaaggagcaagccgtggaatggtataagaaggggatagaagagctcgaaaagggtatcgcggtaatcgtgacgggccagggggaacagtgtgagcgtgcgagaaggcttcaggccaaaatgatgactaacctggtaatggcaaaggatcgcctgcagctgctggaaaaaatgcagcccgtactacccttttccaaaagtcaaaccgatgtctacaacgacagcacgaatctggcatgtcgaaatggtcatcttcagtctgagagtggtgcagtccccaaaaggaaggatcctctaacccacacgagtaactcactgccaagaagtaaaacggtgatgaagacgggttcagctgggcttagcggccaccatcgcgcaccctcatactctggcctgtcaatggtatccggggtcaagcagggaagcgggcctgctcctactacgcacaaaggcacaccgaagactaaccggaccaacaagccttccacaccaaccacagcgacccgcaaaaaaaaggacctgaaaaacttcagaaacgttgatagtaacttagcgaacctgataatgaacgagatcgtggacaatggcaccgccgtgaaattcgacgacattgcgggtcaggacctggcgaaacaagccctccaggagatcgtgattttgccaagcctccgcccagagctttttaccggcctgcgcgcaccggctagaggtttactgctctttgggccaccaggaaacggaaaaactatgcttgctaaggccgtcgcggcagaaagtaacgccaccttcttcaatattagcgcagcttcacttacctccaagtatgtgggcgagggagaaaaacttgtgcgagcactctttgcagtagcgagggagctacaaccgtctattatttttatcgatgaagtggattcactgttgtgcgaaagacgcgaaggggaacacgacgcgtcacgccgattgaaaactgaattccttattgaatttgacggggtgcagagcgccggagatgaccgggtcttggttatgggggctacaaataggccccaggagctcgatgaggcagtgctgagaagatttattaaacgggtctatgtctcgctccccaacgaggagactcgccttctccttctaaagaaccttctgtgtaagcaaggctcaccgctaacacagaaagaactggcgcaattggcccgaatgacagatggttacagtgggtctgatttgacagcactggctaaggacgctgctctgggccctatacgcgaactgaagcctgaacaggtcaaaaacatgagcgcctccgaaatgagaaatattagattgagcgattttacggaatccctgaaaaagatcaaacgctctgtgtccccgcagactcttgaggcatacattagatggaataaagatttcggtgacactaccgtgtag

SEQ ID NO: 242063 - DNA, 1755 bp, synthetic construct
  misc_feature 1..1755: note = Description of Artificial Sequence: Synthetic coding sequence
  source 1..1755: mol_type = other DNA
atgaactccccgggtgggaggggaaagaagaaggggagcggaggagccagtaaccctgtacccccacgaccacccccaccctgcttggcaccggcaccaccagccgcagggcctgcaccacctcctgagagcccacataagcggaatctgtactacttttcctacccgctcttcgtgggcttcgctttgctgcgacttgtggctttccacctcgggctcttgttcgtgtggctctgtcagcggttcagtcgtgctctcatggcagcaaaacgttctagtggcgcagccccagcgccagctagcgcttcagcccctgccccagttccgggaggggaggcagagcgggtgcgggtgtttcacaaacaggcgttcgaatatatctccattgccttgagaatcgatgaagatgaaaaggcgggacaaaaggaacaggcggtggagtggtataagaaggggatagaggaactggaaaaaggcatcgccgtgatcgtgacaggccaaggggaacaatgtgaacgcgctaggcgcctgcaagccaaaatgatgacaaatctcgtgatggctaaggatcgtttgcagctgttggagtcaggagcggtcccaaagcggaaggaccctctgacgcacacctctaactcccttccaagatcaaagacagtcatgaagacgggatcagcagggctctcaggacaccaccgagcccctagctacagcggcctcagtatggtctcgggcgtaaaacagggctcggggcctgcccctaccacacataaaggcacccccaagaccaacaggacaaataaacccagcactcctaccaccgctactcggaagaagaaagatttgaagaacttccggaacgttgattcgaacttggctaatttgattatgaatgagatagtggataacggaacagccgtgaagtttgacgacatcgcaggacaggatttagccaagcaggcattgcaggagatcgttatcctgccttccctgcggcctgaactgtttaccggcttacgggctcccgctcgcggactccttcttttcggcccacctggaaacggcaagacaatgctggccaaggctgtggctgcagagagtaacgccacctttttcaatatctctgccgcatcactaacttcaaagtacgtcggtgagggggagaagctagtccgtgccttgttcgcggtcgccagggagttgcagccatcaattatattcatcgacgaggtcgactccctgctgtgtgagagaagggaaggagagcatgatgcctcacgtcgtctcaagaccgaattcctcatcgagttcgacggagtgcagagcgcaggtgatgaccgagtgctggtgatgggggcaactaacaggccacaggagctagatgaagcagtcctgcgtcgtttcattaaacgcgtgtacgttagtctgccaaatgaggagactagactgctgttactcaaaaatctgctctgcaaacagggttcccccctgacacagaaagaattggcgcagctcgctcgcatgaccgatggctattcggggtcagatttgaccgccctcgctaaggacgcagccctagggcctatccgagaactgaagccagaacaggtgaaaaacatgtccgcgtccgaaatgcgtaatatccgtctgagcgatttcacagaatctctgaagaagatcaagcggtctgtgtctccacagacattagaggcctacatacgctggaacaaagatttcggggatactactgtgtag

SEQ ID NO: 242064 - DNA, 26393 bp, synthetic construct
  misc_feature 1..26393: note = Description of Artificial Sequence: Synthetic coding sequence
  source 1..26393: mol_type = other DNA
atggcgaccagtagaggcgcaagtcgatgtcctcgggacatcgcgaacgttatgcaacggttacaagatgaacaggagattgtgcagaagagaacattcaccaagtggatcaattcccacctggctaaacggaaacctcccatggtggtcgacgatctgtttgaggacatgaaagacggggtgaagctgctggccctcttggaagtgctttcgggccagaagctgccctgcgaacaaggaaggcggatgaaacggatccacgccgtagctaacataggcaccgccctgaaattcctcgaaggcaggaagattaaacttgtcaatattaactctaccgatatcgccgatggcaggccatccatagtgctgggactcatgtggacaattatcctctattttcagatcgaggagttgaccagcaacctccctcagcttcagagcctgtcatcctccgcctcttctgtggattccattgtcagctcagaaactccctcccctccttccaaaaggaaggtaacaactaagatccaaggcaatgcaaagaaagccctgttgaaatgggtgcagtacacggccggtaaacaaaccggaattgaggtgaaagactttggaaagtcctggaggtccggcgttgccttccacagtgtcattcacgcgatcaggccagagctcgtggacctcgagactgtgaaaggcagaagcaaccgagaaaacctagaagatgcattcacaatagctgaaaccgagcttggtattcccagacttctggacccagaggacgtggacgttgacaaacccgatgaaaagagtatcatgacatacgtggcgcagtttctgaagcactatccagatatacacaacgcatccaccgatggccaggaagacgacgaaatcctgcccggatttcccagttttgccaattctgtgcagaactttaagcgggaggaccgtgtgatctttaaagagatgaaggtgtggattgagcagtttgaacgggacctaacccgcgctcaaatggtcgagtccaacttgcaggataaatatcagtccttcaagcattttcgagtccagtacgagatgaaacgaaagcagatcgagcacctgattcagcccctccatagggatgggaagttgtctctggatcaagccctcgtcaaacaatcctgggatagggttacttcgcggttatttgactggcacatacagttggacaagtccctgcccgctcctctcggaaccatcggagcgtggctctaccgggcagaggtcgcgcttcgcgaagaaatcactgtgcagcaggtacatgaggagaccgccaacactattcagcgaaagttagagcaacacaaagacctcttacaaaataccgatgcccataagcgagcgttccatgagatatatcgtactagaagcgtgaatggcattcccgtaccaccagaccagctggaggacatggccgaacgatttcattttgtctctagtaccagtgaattacacctgatgaagatggagttcttggagctgaaatataggctcctgtccctgcttgtgctcgctgaaagtaagctcaagtcatggatcattaaatatggtagaagagagtccgttgaacagctgctgcagaattacgtttccttcatcgagaatagcaaattttttgagcaatatgaggtaacataccagattctgaagcaaaccgctgagatgtacgtgaaggctgatgggagcgtggaggaggctgagaacgtgatgaaatttatgaatgagacgaccgctcagtggagaaatctctccgttgaagtccggtcagttagatctatgctcgaggaggtaataagcaattgggatagatatggtaacactgttgcgtcactgcaagcatggttagaagacgccgagaagatgctgaaccaatccgaaaacgccaagaaggatttcttccgaaatttacctcactggatccagcagcacaccgccatgaacgatgctggcaatttcctaatcgagacgtgcgacgagatggtgagccgggatctaaaacaacaacttctgctgcttaacggaaggtggcgggaattgtttatggaggtgaaacagtatgcccaggctgatgagatggaccgcatgaaaaaggaatacacagactgcgtggtgaccctgtcagctttcgccactgaagctcacaagaagttgtctgagcccttggaagtttcctttatgaatgtaaagctacttatccaggatttggaagacattgagcagagggtaccagtaatggacgcccagtataaaatcatcactaagaccgctcatctaataaccaaggaatcccctcaggaggagggtaaggaaatgttcgccaccatgagtaaactgaaagagcagctcacaaaagttaaggagtgttactctcccctgctgtacgaatcccagcaattgctcatcccactggaggaactagagaaacagatgaccagcttttatgatagccttgggaagatcaacgagatcatcactgtgctggaacgagaagctcagagctctgcactgtttaagcagaaacatcaggagctactggcctgtcaggagaactgcaagaaaaccctgaccctgattgaaaaaggatcacagagtgtccagaagttcgtgacccttagcaacgttctgaaacactttgaccaaacaaggctgcagcgccagatcgctgatatccacgtggcgttccagagcatggtcaaaaagacaggtgactggaaaaaacatgtggagaccaatagcagacttatgaaaaaattcgaggaatccagagcagagctggaaaaagtcctgcgaattgcccaagaaggactcgaggagaaaggagaccctgaagaattactgagacgacatactgagttcttcagtcagctcgaccaaagagtactcaacgcattccttaaagcctgtgatgaactaacggacattctccctgagcaggagcagcaaggtcttcaggaagccgtgaggaagctgcataagcaatggaaagatcttcaaggcgaagccccatatcatctcttacacttgaagattgacgtcgaaaaaaacagattcttggcctccgtggaggagtgtagaactgaactggaccgtgagacaaagctgatgccccaggaggggagcgaaaagattatcaaagaacaccgagtctttttcagtgacaagggtcctcaccacctctgtgaaaaaaggctgcagctgattgaagagctgtgcgtgaagctacctgttcgggatcctgtgagggacacaccaggaacttgtcacgttactcttaaggagctacgggctgcaatagactctacctaccgcaagcttatggaggaccccgacaagtggaaggactataccagccggttctccgagtttagcagctggatatctactaacgagacacagctgaaggggatcaagggggaggccatcgacacagctaaccatggcgaggtaaagagggcggtcgaagagatacgaaatggggtgaccaaacgaggcgaaacgcttagttggttgaaaagccgactcaaagtgctgactgaggttagcagcgagaacgaagctcagaagcagggagatgagctcgccaagctgtcgagtagttttaaggctttggttacgctgctgtcagaagtggagaaaatgctctccaacttcggggactgtgtgcaatacaaggagatcgtcaaaaacagccttgaggagctcatctcgggtagtaaggaggttcaagagcaagctgagaagatcttggacactgagaacctttttgaggcccaacaactcttgctgcaccaccaacagaagacaaagcgcatcagtgccaagaagagggatgtgcagcaacagatcgcccaggcccagcagggggaaggaggcctgcccgaccgcggacacgaagagctgaggaaacttgagagcactctggacgggctcgagagaagcagagagcggcaggaacggaggatccaggtgaccctgagaaagtgggaaaggttcgagaccaacaaagaaaccgttgtcagatacttgttccagaccggcagtagccacgagcggttcctctcctttagttctctcgaatccctgtcatcagaactggagcaaaccaaggagttttcgaagcgaaccgagtctatagctgtgcaggctgagaacctcgtcaaagaagcatcggaaattcctctaggaccccagaataaacagttactccaacaacaagccaagagcatcaaggagcaagtgaagaagttggaagatacactcgaggaagatattaagacgatggagatggtaaagaccaagtgggaccacttcggctcaaacttcgagacactgagcgtgtggatcaccgagaaggagaaggagctcaatgctttggaaaccagctctagcgccatggacatgcagattagccagatcaaggtgaccatacaggagattgaaagcaaactttctagcattgtagggctcgaggaagaggcccaaagtttcgcccagtttgttactacaggcgagtccgcacgaataaaggccaagctcactcaaatccgcaggtacggcgaagagctcagggaacatgctcagtgcctggaaggaaccattttgggacacctgagccagcagcagaagttcgaagagaatctgcgcaagattcagcagtccgtgtccgaattcgaggacaagctcgcagtgcccattaagatatgctctagcgccacagagacatacaaggttctccaagaacatatggatctgtgccaggccttagaaagcctgtccagcgcaattaccgcattcagcgcaagcgcccgaaaagttgtgaatcgagattcctgcgtgcaggaagcagcagcgttacagcagcagtatgaagacattctgagacgggcaaaagagcggcagaccgccctggagaacctccttgctcattggcagcgcctcgagaaggagttgagtagctttttgacctggctggagcggggtgaagccaaggcttcttcacccgagatggacatttccgctgatcgtgttaaggtcgagggagaactccaattaatccaagcactgcagaatgaggtggtttctcaggccagcttctacagcaaactgctccagttaaaagagtcactttttagcgttgcttccaaggatgatgtcaagatgatgaagctgcatcttgagcagctggatgagcggtggcgggacctccctcagatcattaataaaagaattaatttcctgcagtctgtagtggctgagcaccagcaattcgatgagctattgctctctttttctgtgtggatcaaactgtttctctccgaactccagacaacgagcgaaatctcaattatggatcaccaggtggccctgactcgacacaaggatcatgcagccgaggttgagtctaaaaagggtgaacttcagagtctgcagggacacctggcgaaacttgggtccctgggacgggctgaagatctgcatctcttacaggggaaggcagaggattgttttcagctgtttgaagaggcctcccaggtggtggagcggaggcaattagccttgagccacttagctgagttccttcagtcgcatgcttctctgtccggtatcctgcgtcagttgaggcagaccgtagaagctacgaatagcatgaacaaaaatgagtctgacctcattgagaaagacctcaacgacgcgctacaaaatgcgaaagccctggagtcagctgccgtcagcctggacggcatcctttctaaggcgcagtatcatctgaaaataggctccagcgagcaacggacctcttgcagggcgacagccgatcagctgtgcggagaagtcgagcgcatacaaaacctgctcggcaccaagcagtctgaggccgacgcgctggccgtacttaaaaaagcatttcaagaccaaaaggaggagttactaaaaagcattgaggatatcgaagaacggactgataaagagcgcctgaaggaacctacgagacaggctctgcaacagagacttcgggtgttcaaccagctcgaggatgagctcaatagccatgagcacgagctttgttggttgaaagataaggcaaagcagatcgcccagaaggatgtggccttcgctcccgaagtggaccgggaaattaatcggctggaggtgacctgggatgacacaaaaaggttgatccatgagaatcaaggtcagtgctgcgggttaatcgaccttatgcgtgaataccagaatctcaaatctgcagtctcaaaggttctcgagaatgcgagctcggtgatagtgactaggaccactattaaggaccaggaggatctgaagtgggcattttcaaagcatgaaacagctaagaacaaaatgaattacaaacagaaggatctggataactttaccagtaaaggtaaacacctcctgagcgaactaaagaagattcacagtagcgattttagcctggtgaagaccgacatggaaagcactgtcgacaaatggttggacgtatctgagaagctagaggagaacatggacagattgcgcgtgtcactgagtatctgggacgacgttctcagcactagagatgaaatagagggctggagcaacaattgtgtcccacagatggctgaaaacatcagtaatctggacaatcacttgcgagcagaggagctgttaaaggagtttgagtcagaagtgaagaacaaggcgctgcggctggaggagttgcattcgaaggtgaacgacctgaaagagttgactaagaacctggagactcctccagacctccagttcatcgaggccgacctgatgcagaaactggagcatgccaaagagataacagaagtagccaaaggaacactgaaggatttcacagctcagagcactcaagttgagaaattcattaacgacatcaccacatggtttactaaggtggaggaatcgttgatgaattgtgctcagaacgagacgtgcgaagcacttaagaaagttaaggacattcagaaggagttgcaatcccagcagtctaacatctcctcgacccaagagaatcttaactctctctgcagaaagtatcatagcgcagagctggagtctctgggccgtgctatgactggactgataaaaaagcatgaggcagtaagtcagctttgcagcaagactcaggcatccctgcaagagtcactggagaagcacttcagcgagagcatgcaggagtttcaggagtggttcctaggggcaaaagccgctgccaaagaaagctctgaccgcacgggcgattctaaagttctggaggccaagctgcacgatttgcagaatatcctggactctgtgtcggacggacaatcaaaattggacgccgtcacacaagagggccaaacactgtacgcgcacctttctaagcaaatcgtctcctcaatccaagagcagatcaccaaggctaacgaagagttccaggcatttttgaagcagtgtcttaaggacaagcaagcactgcaagattgcgcctccgagctgggatcgtttgaggatcagcaccggaaacttaacctctggattcacgagatggaagagagatttaatacagagaatctaggtgagagtaaacagcacataccagaaaagaaaaatgaggtccataaggtggaaatgtttttaggcgagctgctggcagcacgggaatctcttgataaactatctcagcgcggacagcttctaagcgaggagggacacggggctggacaggagggccgtctgtgcagccagctgcttacctcccaccagaacctcctgaggatgactaaggagaagctgcgcagctgccaggtcgccttacaggaacatgaggccttggaggaagccttgcagagtatgtggttctgggttaaagctatccaagatcgactggcctgtgcggaaagcactcttggctctaaagacacactcgaaaagaggcttagccagatccaggatatattgctcatgaagggtgagggcgaagttaaacttaacatggctatcgggaaaggcgagcaggctctcagatcttccaataaagaggggcagagagtcatccagacccagttagagaccctcaaggaggtttgggccgatatcatgtccagctcggtgcatgcacaaagtacactggagtctgttatctcacagtggaacgattatgttgagcgcaaaaatcagcttgagcagtggatggaatcagtggatcagaagatcgagcaccccttacagccccagcctgggcttaaggaaaagttcgtgctgttggaccacctacagtccatcctcagcgaagctgaggaccacacgcgcgcactgcacaggctgattgcaaaatccagggagctgtatgagaagaccgaggatgaatcttttaaagacacagctcaagaagagctaaagacccagtttaacgatatcatgaccgtggcaaaggaaaaaatgcggaaagtggaagagattgtaaaggatcacctgatgtacctggacgctgtccacgagttcaccgattggctgcactccgcaaaggaagagctgcatcggtggagcgacatgtccggcgactccagtgcaacacaaaagaagctttccaaaatcaaggaattaatcgacagtagagagatcggagcaagtaggctgtctagagtggagtctctcgctccagaggtcaaacaaaatactaccgccagcggctgcgagttgatgcacactgaaatgcaggccctgcgggcagactggaaacaatgggaggacagtgtattccaaacccagagttgcctggagaacctggtgtctcaaatggcgctttcagagcaggaattcagcgggcaggtggcccagctggaacaggcactcgaacagttcagcgctctgctgaagacctgggcacagcagctcaccttactcgagggtaagaatacagatgaagaaatcgtcgagtgctggcataaaggccaagaaatcctcgatgcgctacagaaagctgagccccgtacagaggatctcaagagtcagctaaatgaactctgcagattttcccgtgatctgtctacatactctggtaaagtttctggattgattaaggaatacaactgtctctgtctgcaggcctcaaaagggtgtcagaacaaagaacagatcctgcagcagcggtttaggaaagccttccgagacttccaacagtggctagtgaatgcgaagatcacaacagcaaagtgtttcgacattccgcagaacatctccgaagtttccacctctttgcaaaaaatccaggagttcctttcggaatcggagaatgggcagcataagctcaacatgatgctttctaagggtgaactgctatcaactctgctgactaaagaaaaggcaaaaggtattcaggcaaaggttaccgcagccaaggaggactggaagaattttcatagcaacctgcatcagaaggagtcagcgcttgagaatcttaagatacagatgaaggatttcgaagtgtccgctgagcctattcaagattggctatctaagactgaaaagatggtgcacgagtctagcaatcggttatacgacctgcctgctaagcgcagggaacagcagaaactgcagtctgtactcgaagaaatacattgttatgagcctcagttgaatcggttgaaggagaaggcccaacagctctgggaaggacaggcggcatccaaaagctttcgccaccgggtctcgcagctgtcttcccaatatctggccttatcaaatttgacgaaggagaaggtgtccagactcgacaggatcgtggccgagcacaatcagttctctctggggattaaagagctccaagactggatgactgatgctatccacatgctcgatagttattgtcatccaacttccgataaaagcgtgcttgattcgcggacattgaagctggaggccctcctctcagtgaaacaggagaaggaaatccagatgaaaatgattgtgactagaggggaaagcgtcctgcagaacacctcaccagaaggtatacccactattcagcagcagctgcagtccgtaaaagatatgtgggcttctttgctgagcgctggcatcaggtgtaaatcacagctggaaggtgcactgtcgaagtggacaagctaccaggatggagtgcgccagtttagcggctggatggactcaatggaagctaacctcaacgaaagcgaacggcaacacgccgagttacgggacaaaaccaccatgctcggaaaggcaaaactcctcaatgaggaagtgctcagttattcttcgctgctggaaaccatcgaggtcaaaggcgcaggcatgactgagcactacgtcacacagctcgagttacaggacttacaggaacgctaccgggcaatccaagagagagcaaaggaggctgttactaagtctgagaaattggtcagactgcaccaagagtaccaacgagacctcaaggcattcgaagtttggcttggccaggagcaagagaagctggaccagtattcagtgctggaaggagacgcccatactcacgaaaccacgctccgtgacctgcaggaacttcaggtacactgtgctgaagggcaggccctgctcaacagcgtgcttcacacccgggaagatgtcatcccgtcagggatccctcaggctgaagatagggccctggaaagtctcagacaagactggcaggcgtaccagcacagactctcagaaactagaacacagttcaacaatgtcgtgaataagctgcggttaatggagcagaaatttcaacaagtggacgaatggctgaaaacagctgaggagaaagtttcacctagaacccgccgtcagagcaacagagcgactaaggaaatacagttgcatcaaatgaagaaatggcatgaggaggtcactgcctatcgcgatgaggtagaggaagttggcgcacgcgcacaagaaatcctagatgagtcccacgtaaacagcaggatggggtgtcaagctacacagctgacttctaggtatcaggctctcctcctgcaagtcttggagcaaatcaaattcctggaggaggaaatacagtccctggaggaaagcgagtcctctctttcctcatacagtgattggtacgggtctacacacaaaaactttaaaaatgttgccacaaagatcgacaaggtggacacagtgatgatgggcaagaagctgaaaacactcgaggtgctgttgaaagacatggaaaagggtcattcactgctgaagagtgcacgggaaaagggtgagcgcgctgtcaaatacctggaagagggagaggcggagcgactgcgaaaggagatccatgaccacatggaacagttgaaggaactaacatcaaccgttaggaaggagcatatgacgctcgaaaaagggctgcacctggccaaagagttctcagataagtgtaaagccctcacccagtggatagccgagtaccaagagatcctgcatgtaccagaggagcctaagatggagttgtatgaaaagaaagcgcagcttagcaagtataagtctctacaacagacagtcctgtctcacgagcctagtgtgaagagtgtgagagagaaaggcgaggcattgttggaactggtgcaggacgtcacgctgaaggacaaaatagatcagctgcagtctgattatcaggacctgtgcagtattgggaaggagcacgtcttcagcttggaggccaaggtcaaagatcatgaggactataacagtgagttgcaggaagtggagaaatggttgctgcagatgagcggccgtctggtggctcccgacttactcgagacttcaagccttgagacaattacacaacagctggcccatcataaagctatgatggaggaaatcgccggatttgaggataggttgaacaaccttcagatgaagggtgatacactgattggacagtgtgcagaccatctgcaggccaaattgaaacagaacgtgcacgcccatctgcagggcaccaaagatagctatagcgctatatgttctacagctcagcggatgtaccagagcctcgaacatgaactccagaagcatgtgagcagacaagacacgttgcagcaatgccaggcatggctgagcgccgttcaacccgacctggagcctagccctcagccaccgctatctcgtgccgaagctatcaagcaagtgaagcattttcgggcactgcaggagcaggccaggacatacctcgacctcctgtgcagcatgtgcgatctgtctaatgcctcagtgaaaacaaccgccaaggacattcagcagaccgaacagacaatcgagcagaaactggtgcaggcccaaaatctcacccagggatgggaagagattaaacacttgaaatccgagctctggatatacctccaggatgctgatcaacagctgcagaatatgaagcgtcgtcacagcgagttagagctgaacatagcacagaatatggttagccaggtgaaagactttgtgaaaaagctccagagtaagcaggcctctgtgaatactatcattgaaaaggtcaacaagctcacgaagaaagaggagagtcctgaacataaggagatcaaccaccttaacgatcagtggcttgacctctgcagacagtcaaacaacctatgcttgcagcgagaggaggatctccagcggactagagactatcacgactgtatgaacgtagttgaagttttcttggagaagtttaccacagagtgggataacttggcgcgttccgatgcagaatcaactgccgtacacctcgaggcgctgaagaagctggcccttgcactgcaggaacgcaagtacgctatcgaagatctgaaggaccagaagcagaagatgattgaacacctgaatctggacgacaaggagcttgtaaaggagcagacaagtcacctggaacagcggtggttccagctggaggacctcatcaagcggaagatccaggtatccgttaccaatctggaggagctgaacgttgtgcagagccgatttcaggagctgatggagtgggcagaagaacagcagcccaacatagccgaagctctgaaacaatcgccccctccagatatggcacaaaacctgctgatggatcacctggccatatgctcagagctcgaggctaaacagatgctcctgaagagtctgatcaaggatgcagatcgggtcatggctgacttaggactgaacgaacggcaggtgattcagaaggcactgagcgatgcacagtctcacgttaattgtttgagcgatcttgtgggccagagaagaaagtacttgaacaaggcactgtctgaaaagacccagtttctgatggctgtgttccaggccacttcccagattcaacagcacgagcgcaagattatgttcagggagcacatttgtctgctgccagatgacgtctctaagcaggtcaaaacttgcaagtccgctcaggcttcacttaagacttaccagaacgaggtgactggtctatgggcgcagggacgcgagttgatgaaagaggttaccgaacaggaaaagtccgaggtactgggaaagctgcaggaactccaaagcgtctatgattcagtgctgcagaagtgcagccatcgccttcaggaacttgagaaaaatctcgtgtctcgcaagcactttaaggaggactttgacaaggcatgccattggctgaaacaggctgatattgtaactttcccggaaatcaacctgatgaacgaaagcagtgagctgcatacgcaactggccaaataccagaacattctcgagcagagcccagaatacgagaatttactattaactttgcagaggaccggtcaaactattctgccatccctgaatgaggtggaccattcctatctttcagagaaacttaacgcccttcccagacagttcaatgtcattgtagccctggcgaaagacaagttctacaaagtacaggaggctatacttgctaggaaagagtatgccagtctcatcgagctgacaacccagagtctatctgaattggaggcccagttcctgcgaatgagtaaagtgcctacagacctggctgtggaggaagctctctcattgcaggacggctgtcgggcaattctggatgaagtagccggactgggcgaagcggttgacgaactgaaccagaagaaggagggcttccgcagtacaggtcaaccatggcagcccgacaagatgttgcacctggtgacactatatcataggctgaaaagacagaccgagcagagagtgagcctgttggaagatacaacctcagcatatcaagagcacgagaaaatgtgtcagcaactggagcgacaacttaagagtgtgaaagaggaacagagtaaggtgaacgaagagacattaccggcagaggagaagctaaagatgtaccattctctggcgggatcactgcaagactccgggatcgttctgaagcgggtaacaatccacttggaagatctggctccacatctggacccactggcatatgagaaggccagacatcaaattcaatcctggcagggggaactcaagctgctgacatctgctattggggaaactgtaacagaatgtgagagtaggatggttcaatctatcgatttccagacagagatgtcccgatccctggattggttgcgcagagtgaaggcagaactttcagggcctgtctatctggacttaaatctccaggatatccaggaggaaattcggaaaattcagattcaccaggaagaagtgcagtcatccctgaggataatgaatgccttaagccacaaagagaaagaaaaatttacaaaagctaaagagctgattagcgcagacttggagcattccctagcagagctgagcgagctggacggtgatatacaggaggcactccgaaccaggcaagccacgctgaccgagatatactcgcagtgtcagcgctactatcaggtgtttcaggcagctaacgattggctggaagacgcccaagagctgctgcagctggcgggaaatggattggacgtggaatcagcagaagagaacctgaaatcccacatggagtttttctcaacagaggaccagttccattcgaaccttgaagaacttcatagcctggtggcaaccctcgatccattgatcaagccaacaggcaaagaagatctagagcagaaagttgccagtcttgagctgaggagccagagaatgagccgtgattcaggggctcaggtcgatctactgcagagatgcactgcacagtggcacgactaccagaaggctagggaggaggtcatcgaactgatgaacgacaccgagaagaaactcagtgaattttcgttactcaaaacctcctctagccacgaggctgaagagaagctgtcagagcataaagccctggtaagtgttgtgaacagttttcatgaaaagatcgtggcccttgaagagaaagccagtcaacttgaaaagaccgggaacgacgctagcaaagccaccctgagccgctctatgacaacagtgtggcagcgatggaccagactcagagctgtggcgcaggaccaggaaaagattctggaggacgccgtggatgagtggaccggctttaataacaaagttaagaaggctacggaaatgatcgatcagctgcaggataagctgcctgggtcgtccgctgaaaaagctagcaaagctgagctgcttaccctccttgagtaccacgacaccttcgtcctggagttagagcaacagcaaagcgcgctggggatgcttcgacagcagactctttctatgttgcaggacggggcagcacccacaccgggagaagagccacctttgatgcaggaaataaccgctatgcaagatcggtgcctgaatatgcaggaaaaagttaagacaaatggaaaactggtcaaacaagagcttaaagatcgcgaaatggttgagacccagattaactctgttaagtgttgggtgcaagagacaaaggaatatctcggcaatcctaccatcgaaatcgacgcacagctggaagagctgcagatcctgctgaccgaagctacgaaccatcggcaaaacattgagaaaatggctgaggagcagaaggagaaatacctgggactctataccatcctgcccagcgagttgtcactacagttggccgaggtagccttggacctgaagatcagagatcagatccaggacaagataaaggaggtggagcagtccaaagccacgtcacaagagctaagccgacagattcagaagctcgctaaggatttaacaacaattctaaccaagttgaaagctaagactgataacgttgtacaggcgaaaactgatcagaaggtcttgggcgaagagctggatggatgcaatagcaagctgatggaactagatgccgcagtgcaaaaattcctcgagcagaatggccagctcggaaagccactggcaaaaaaaatcggcaagctgaccgaactccaccaacagacgattcgtcaagcagaaaataggttgagtaagctgaatcaggctgcatcccacctcgaagaatataatgaaatgttggaactcattctgaagtggattgaaaaggcaaaagtgctggcccacggaaccatcgcttggaactccgcctctcagttgcgcgagcagtatatactgcatcagacactgcttgaagagtcgaaagagattgactccgaattggaagccatgacagagaaactacaataccttacatccgtgtactgcaccgaaaagatgtctcagcaggtcgccgagcttggaagagaaaccgaagagctcaggcagatgataaagattcgcctccaaaacctacaggatgcagcaaaagatatgaaaaagttcgaggctgagctgaaaaagctgcaggccgcacttgaacaggcccaggccactctgacctcaccggaggtgggccgactgtccctgaaagagcagcttagccatcgacagcatctgcttagcgagatggagtctctgaaacccaaagtccaggcagttcagctctgtcagtcagctctgaggattcccgaggacgttgtggccagccttcccctgtgtcatgccgcattgcggctccaggaagaggcctcgcgtttgcagcacacagctatccaacagtgcaatattatgcaggcagccgtcgtgcaatatgagcaatacgagcaggagatgaagcacctgcagcagctcatcgaaggcgctcatagagaaatagaggacaaacccgtcgccaccagtaatatccaggaacttcaggcccaaatttccaggcacgaggaactcgcacaaaaaattaagggataccaagaacaaatcgcgtctctgaatagtaagtgcaagatgttgacaatgaaagcgaaacacgcgacaatgctactcacagtcactgaagtagagggtttggccgaaggcactgaggacctcgatggcgagttgctgcctaccccctcagcccacccctccgtggtcatgatgactgctggtcgctgtcacaccttgctgtccccggtgacagaggaatccggggaggaagggaccaatagcgaaatctctagcccaccggcatgtagaagtccgtcccccgtagccaatactgacgctagtgtcaaccaggacattgcctactaccaggctctgagtgctgagcgattgcaaacagatgctgccaaaatccacccaagcacctccgcttcgcaggagttttacgagccgggactggaacctagtgccacagccaagctgggggatcttcagagatcctgggaaacgctgaaaaacgtaatcagcgagaagcaaagaacattatacgaagccctagagcgacagcagaagtatcaggactcccttcaatccataagtacaaagatggaagcaatcgagctgaagctatcagagtcccctgaacccggaagaagtcctgaaagtcaaatggctgagcaccaggccttgatggacgagatactgatgctgcaagatgaaataaacgagctgcagtctagtcttgcagaggaactggtgtccgaatcctgtgaagcagatcccgctgagcaactggccctccagagcactttgacggttcttgccgaacggatgtctaccatcagaatgaaagcttctgggaaaaggcaacttctggaggagaagctgaatgaccagcttgaggaacagcgtcaggaacaggcgttgcaaagatatagatgtgaggcagacgaactcgatagctggcttctgagcacaaaggccacactggataccgccctgtcgccccctaaggagccgatggacatggaagcccagctgatggactgccaaaacatgcttgttgaaatcgagcagaaggttgtggcccttagtgaactgagcgttcataatgagaatcttctccttgaggggaaagctcacactaaagatgaggccgagcagctcgcagggaaattgaggcgacttaaggggtcccttcttgagttacaacgtgcgttacacgataagcagcttaatatgcagggaaccgcccaggaaaaggaggagtccgacgtcgatctaacggctacccaaagtcccggtgttcaagagtggctcgcccaggccaggaccacctggacacagcagagacagtcctccctacaacagcagaaagagttggagcaagaactcgccgagcaaaagtctcttctaaggtccgtggccagtagaggcgaggagatcttaatacagcactcggccgctgagacatcaggagatgccggagagaaacctgatgtactctcacaagagctcggtatggagggtgagaagagtagtgctgaggatcagatgcgcatgaaatgggagagtctgcaccaggaattttctaccaagcagaagctacttcagaatgtgctcgagcaggagcaggaacaggtcctctacagccggcctaatcgcctcctgtccggggtgccactgtacaagggtgacgttcccacccaggacaaatctgctgtaacctcgctgctcgatggtctgaaccaggcctttgaggaggtctctagccagagcgggggtgccaagcggcagtcgattcatctggagcaaaagctctacgacggggtgtctgcaacatcaacctggctggatgatgtggaggagagactcttcgtggcaaccgcactgttgccggaggaaaccgagacatgtctgttcaaccaggagatcttagccaaagatataaaagaaatgagcgaggaaatggataaaaataagaatctgttcagtcaagcatttcccgagaatggtgacaatcgggatgttattgaggacaccttgggctgcctcttggggagactttcccttcttgactccgtcgtgaatcagcggtgtcaccagatgaaagagagactgcagcagatacttaacttccaaaatgatctcaaagtgctcttcaccagtctagccgataataaatacatcatacttcaaaaactcgctaacgtgttcgagcagccagtggccgaacagattgaagccatacagcaggctgaggacggcctcaaggaatttgacgccggaataatcgagctgaaaagaagaggggacaagcttcaggttgagcagccctcaatgcaggaacttagcaaactgcaagacatgtacgacgagctcatgatgatcatcggcagccgcagatccggcctgaaccagaatctcacattgaagagccagtacgagcgcgctctacaggacctcgccgacttattggaaacgggccaggaaaaaatggccggagatcagaagataattgtgtcttctaaggaggaaattcagcagctcttagacaaacacaaagagtactttcaaggactggaaagtcatatgatattgaccgaaacactttttcgcaagatcatttccttcgcagtgcagaaggaaacccagttccacacagaactgatggcccaggcctcagcggtcctaaaaagggcgcacaagagaggtgtcgaactggaatacatactggagacctggagtcatttggatgaggaccagcaggaactgagcaggcagctggaggtggtggagagctctatcccgagcgttggcctggtggaggaaaacgaggatcgcctaatagaccgcatcaccctctaccagcatttgaagtcatccctcaacgagtatcaacccaaactgtaccaggtgctcgacgacggcaagagactactgattagcatctcatgtagcgacctggagtctcagctgaaccagttgggcgagtgttggctgagcaacaccaataaaatgtctaaagaactgcaccgcctcgagactatcctgaagcactggacccgttatcaaagtgagtcggctgacttaatacactggcttcagtccgccaaagatcgactcgagttttggactcagcaaagcgttactgtcccgcaggagctcgagatggtgagagatcacctgaacgcatttcttgaattttcaaaggaggtcgatgcccagtcctccctgaagtcttctgttttgtctaccggaaaccaactcttgaggctgaaaaaagtggataccgcgactctgagaagcgaactgagccgtattgattctcagtggactgacctgctgacgaacattccagcagtccaggaaaaactccatcaattgcagatggataaacttccaagccgtcatgctatctccgaagtgatgagttggatctcactgatggagaatgtgatccagaaggacgaagacaacatcaagaactccatcggctataaggcaatccatgaataccttcagaagtacaagggattcaaaattgatatcaactgcaagcaactgaccgtggatttcgttaatcagtccgtactacagatctcatcgcaggacgttgagagcaagcgctccgacaagaccgacttcgctgaacagctgggagctatgaataaatcttggcagattctccagggattagtaacagagaaaatccagctgctcgaggggctgctcgaaagttggtctgagtacgagaacaatgtccagtgccttaagacatggtttgagacccaggaaaagagactgaagcaacagcatcgtataggagaccaggcttccgtgcaaaatgcactgaaagactgccaagatcttgaggacctgatcaaggcgaaggagaaagaggttgagaagatcgagcagaatgggctcgctctgattcagaacaagaaggaggacgtctcttctatcgtcatgtcaacactgcgagagctcggacagacctgggctaatctggaccacatggtgggacaattaaaaattctgctgaaaagtgttctcgaccagtggagttcacacaaggtcgctttcgacaaaattaactcttatcttatggaggccagatattcactgtccaggtttcggcttttgactggctctctggaagcagttcaagttcaggtggacaatttacaaaatctccaagacgacctggaaaagcaggagcgaagcctgcagaagttcggctccatcacaaaccagttacttaaagagtgtcatcctcctgtgacagagacactcaccaacaccctgaaggaggtgaatatgagatggaacaatctgctggaagagatcgccgaacagcttcagtccagtaaagccctcctgcagctgtggcaaaggtacaaagactactccaagcaatgtgccagcactgtacaacagcaggaagaccgtactaacgagttgctgaaggctgccaccaataaagatatcgctgatgacgaagtggcgacatggatacaggattgtaatgacttgttaaagggcctcggcaccgttaaagactctctgtttttcctgcacgagctgggggaacagctcaagcagcaggtggatgccagcgccgctagtgccattcaatccgaccagctcagcctgagccaacacctctgcgctttagaacaggcactgtgtaagcagcagacgtctttgcaggccggagtcctggactacgaaacctttgcgaaatctttagaggcgctggaagcttggatcgttgaggctgaggagatactccaaggacaggaccccagccattctagtgacctgagtacgattcaagagagaatggaggaattgaagggacagatgctgaaattttcctctatggcgccagacctcgatcgactcaatgagctgggctataggctaccgttgaatgacaaggagatcaaaagaatgcagaatctgaacagacactggtctctgatcagcagccaaaccacggagcgctttagtaagctgcagtctttcctgctgcagcaccagacgttcttggagaaatgcgaaacatggatggagtttctcgtgcaaacggaacagaagctcgccgttgagattagcgggaactatcagcacctactagagcagcagagagcccatgaactgtttcaggcagagatgttctcacgccaacagatcttacactccataataatcgatggtcagcgcttgctcgagcagggacaggtggatgacagagacgaattcaatcttaaattgactttgcttagcaaccaatggcagggcgtgattagaagagcccagcagaggcgcggtattattgacagccagatccgccagtggcagaggtaccgagagatggccgagaagctgcgtaaatggctcgtcgaggtgtcctatttgcctatgagtgggctggggagcgtgccgatccctctgcagcaagctcgcaccctgttcgacgaagttcagtttaaagaaaaggtgttcctaaggcagcagggcagttatatccttacggtggaggcaggaaaacagctgctcctatccgcagacagcggtgcagaagctgcattgcaggccgagttggcagaaatccaagagaagtggaaatccgcgagtatgcgcctggaggagcagaagaagaaattggcctttttgttgaaggattgggagaagtgtgaaaaaggaatcgccgattccttggagaagttgcggacatttaaaaagaagctaagccagtcactacccgaccatcacgaagaactccacgcagaacagatgcgctgcaaggaattagagaatgctgtgggaagctggactgacgatctgactcagctttccctccttaaggatactttgagcgcctacatttccgcagatgacataagtatcctaaacgagcgcgtggagttacttcaacggcagtgggaagagctgtgtcatcagctgagtttgagacggcagcagataggcgaacgtctcaacgagtgggcggtattttccgagaagaacaaggaactgtgcgagtggctgactcaaatggagtcgaaggtttcccagaacggcgacatccttatcgaagagatgatcgaaaaacttaagaaggattaccaggaggaaatagctatagcccaggaaaataaaatccagctgcagcaaatgggggaaagactggccaaggcttcccatgaatcaaaggccagcgaaatcgaatataagttagggaaggtgaacgatcgctggcagcacctgttagatctcatcgccgcaagggtgaaaaagctcaaggaaacattagtggccgttcagcaactcgacaaaaacatgtccagcttaaggacatggctggcacatatcgaatcagaactggcaaagccaattgtgtacgattcttgcaattcagaagaaatacaacgcaaacttaacgagcaacaggagctgcagagagacattgagaaacacagtactggcgtcgcttccgtcctaaacctgtgcgaggtacttctccacgactgcgacgcctgcgccacggacgctgaatgtgattccatacaacaggccacgaggaacctggatcgcagatggagaaatatttgcgcaatgtccatggagcgaaggctcaaaatcgaggaaacatggcggctttggcagaaattcctcgacgactatagcagattcgaggattggctcaagtcaagcgaaagaacagctgcattcccaagctccagcggcgtgatctacactgtggccaaagaagagctaaaaaaattcgaggccttccagagacaggtgcatgaatgtttgacacagctcgagctgatcaacaagcagtacagacgactggccagagaaaataggactgactcggcatgcagcctcaaacagatggtccatgagggcaaccagcggtgggataatctgcagaagcgtgtgacctctatcctgcggcgtcttaagcactttatcgggcagcgcgaagagtttgagaccgctcgggatagcatcctcgtctggctgacagagatggacctccagctgactaatatcgagcattttagcgaatgcgacgtccaagcgaaaatcaaacagcttaaggcatttcagcaggaaatctctctcaatcacaataaaattgagcagatcattgctcaaggagagcagcttattgagaagtccgagcccctagacgctgccataatcgaagaggagttggatgaacttcgccgatactgtcaggaagtctttggccgagtggagagatatcataagaagctgatccgactgcctttgcccgacgacgaacacgacctctccgaccgcgaacttgaactcgaagatagcgcagcgttatctgatctgcactggcatgatcgcagcgccgactctctgctgtcaccacaaccatcttccaacctcagcttatccctcgctcagccgttgcggtctgaaaggtctggtcgcgatacaccggcatcagtggatagcattcccctggagtgggatcacgactacgacctgagtcgggacctggaaagcgctatgagcagggccctgcctagcgaggacgaagaggggcaggatgataaagatttctacctgcgtggcgctgttggcctgagcggagatcactccgctttggagtcacagatccgacagctgggtaaggccctcgatgactctcggttccagatacagcaaactgagaatattatccgcagcaagacgccgaccggcccagagttagacactagctataaaggctacatgaaactactcggcgagtgctccagcagcatagactccgtgaaaaggcttgagcataagcttaaggaagaagaagaatccctgcctggcttcgtcaacctgcactcaactgagacccagaccgcaggagtaatcgaccgctgggaactgctgcaggcacaggcattgtctaaagagttaagaatgaagcagaacctgcagaaatggcagcagtttaactcggacctgaactcgatttgggcttggctgggcgatacagaggaagagctggagcagctgcaacgactggaactgtccaccgacattcaaactatagagttgcagatcaagaagctgaaggaactgcagaaggcagtggaccaccgaaaagccataatccttagtattaacctgtgttcccccgagttcactcaggcggattccaaggagagcagggacctgcaggaccgtctttcacagatgaatggaaggtgggatcgggtatgcagcctgctggaggagtggcgaggtctcctgcaagacgcactaatgcagtgccagggcttccatgagatgtcccacggcttgcttctgatgctggagaatatagatagaaggaagaatgaaattgtgcccatcgactccaatctggacgcagaaattttgcaagaccaccacaaacagctgatgcagatcaagcatgaactgctggagtcccaacttcgggtcgcgtctttgcaggatatgagttgccagcttctcgtgaatgcagaaggcacagactgtttggaggccaaagagaaagtacacgtgataggtaatcgactcaagctcctgcttaaggaagtatctaggcacataaaggagcttgagaagctgctagatgtgtcttcctcacagcaggatctctcatcatggagtagcgctgacgaactagacacatccggttccgtgagcccaaccagtggacgcagcactcctaaccgtcaaaaaactcctaggggtaaatgttctctgagtcagcctggtccttcagttagttcaccccactcccgcagtactaagggagggtctgactccagtctcagtgaaccaggaccaggccgatctggcaggggctttctgttccgtgtgctccgagctgctctccccttacagctcttgctcttgctgctaatcggcctggcttgcctggtgcctatgtccgaagaggactactcatgcgctctgagtaataatttcgctaggtcatttcatccaatgctgaggtataccaacggaccccctccactata

SEQ ID NO: 242065 - DNA, 25230 bp, synthetic construct
  misc_feature 1..25230: note = Description of Artificial Sequence: Synthetic coding sequence
  source 1..25230: mol_type = other DNA
atggctacctcgcgcggagcctcacgatgccctcgcgatattgctaatgtcatgcaaagactgcaggacgaacaggaaatagtccagaaaagaacttttacaaaatggatcaacagtcacctcgcgaaacgcaagccgcctatggttgtcgacgacctgttcgaggatatgaaggatggcgtgaagctcctcgccctgctcgaggtgctgtcaggacagaaactgccctgtgaacagggtagaaggatgaagcggatccatgcagttgccaacatcggaacagctctgaaatttcttgaagggaggaagatcaagctggtgaatattaactccacagatatagccgacgggagaccctcgattgttctcggccttatgtggacaattatcctttattttcaaattgaggaattaacttctaacctcccacagctccaatcactgagtagttcggcgagttccgtggactcaatagtctccagcgaaacgccatccccccctagcaagcgtaaggtcaccactaagatccagggtaacgcaaagaaagctctcctaaaatgggtgcagtacacagcaggcaagcaaactgggatcgaggtaaaggattttggtaaatcttggagatccggggtcgctttccactccgtgattcacgccatcagaccagagctcgtcgatctcgagaccgtgaaggggcgatctaatcgagagaatctggaggatgcgtttacaattgctgagacggagcttggcattccgaggctgctcgaccctgaggacgtggacgtagacaaaccagatgaaaagtcgatcatgacatacgtcgcccaattcctgaagcattaccctgacattcacaacgcatctacagacggacaagaagacgacgaaattctccctggttttccaagtttcgctaactctgtgcagaacttcaagcgcgaagacagagttatttttaaagagatgaaggtgtggatcgaacaattcgaacgggacctcacgagggcgcagatggttgaatcgaatctgcaggacaagtatcaatctttcaagcacttccgtgtacagtacgagatgaagcggaagcaaatcgagcatctcatccagcctcttcatcgggatggcaagctgtctctagaccaagctctagttaagcagagctgggatagagtcacctctaggctcttcgattggcatatccagctggataagtcacttcccgcaccacttggcaccatcggcgcttggttgtaccgcgctgaagtcgcccttagagaagaaatcacggtgcagcaggtccacgaagagacagcgaataccatccagcggaaactggaacagcacaagcgtaaattgagaaatgtcatcgatctgctccagaacaccgatgctcacaaacgggcttttcacgagatctaccgaactcgctcggttaatggtatacccgtgcccccagaccagctggaggacatggctgagcggtttcactttgtgtcttccacaagtgaactccacttgatgaagatggagttcctcgaattgaaatatcggctgctgagtctactggtcctggccgaaagcaaactgaagagctggatcataaaatacggcaggcgcgaatcagtagagcagcttctgcaaaattatgtgagcttcatcgaaaatagtaagttttttgaacagtatgaagtcacgtatcagattctgaagcagactgctgagatgtatgtcaaggcggatggatctgtggaagaagccgagaacgtgatgaagtttatgaacgagaccacagcccagtggcgaaacctgagtgtggaagtgcgaagcgtccgctccatgctagaagaggtaatatctaactgggaccggtacggcaataccgtggcatctctgcaagcttggctggaagacgccgagaagatgctgaatcagtccgagaatgccaaaaaggacttcttcagaaatctgccacattggattcaacagcatacagccatgaacgatgctggtaattttctcattgagacctgcgacgagatggtgagccgagatttaaagcagcaactgctgctgctcaatggacgctggcgagagctgttcatggaggtgaagcaatatgcccaggcggatgaaatggatagaatgaaaaaagagtatacagactgtgtggtgacccttagcgctttcgcaactgaggcgcacaagaagctgagcgagcccctggaggtctcttttatgaatgtgaaactcttgatccaggacctggaggatatcgagcaacgggtccctgtaatggacgcccagtacaaaatcatcacgaagactgcccacctcattacgaaagagtcaccacaggaggagggcaaggagatgtttgcgacaatgtcaaagcttaaagagcagctgaccaaggtgaaagagtgttattctcccttgctttacgaatcacaacagctccttattcccctggaagaactcgagaagcagatgaccagcttttacgattccctggggaagattaatgaaatcataacggttctggagagggaggcccagtcctcggctctgtttaaacagaagcaccaattgaggatcctcaagtgcaagtggtgcaactcatcccaaaagatgaccctctgcttggttcttggatctatgattagcatgctgagcaccgctaagattaccattgcaggttataagtctgaggtagaggtcagcgagctactggcatgtcaagaaaattgcaagaaaaccctgacacttatcgaaaagggtagtcagagcgttcagaagtttgtgaccctgtctaacgtcctgaagcatttcgatcagaccaggctgcagactgactgtagatacagttgttgcttttcagtgatgcggaagcagcatcacatcatgattgtcttccacatcaagtctatggtgaaaaagaccggtgactggaaaaagcacgtggaaaccaacagcaggctgatgaaaaagttcgaagaatctagagccgagttggaaaaggtccttcgaatagcgcaggaaggtctcgaagaaaaaggggacccagaggagctactgcggagacacaccgaattttttagccagctggatcagagggtgctgaatgctttcctgaaggcatgtgatgaactgaccgatatcttacccgaacaagaacagcaggggctgcaggaggccgtgaggaagctgcataagcagtggaaggacctgcagggagaagctccataccacctgcttcacctcaaaatcgatgtcgaaaagaacagatttctggccagtgtggaggagtgcagaaccgagctggaccgtgagactaagctgatgccccaagagggcagtgagaaaattatcaaagaacatagagtgtttttctcagacaagggaccccatcacttgtgtgagaagagacttcagctaattgaggaactgtgcgttaagctccctgttagggacccggtgagggacacacccggtacatgtcatgtgacactaaaagagctgcgagccgcaatagattcaacctacaggaagcttatggaggacccggataagtggaaggattatacaagccggttttccgaattttccagttggatttctactaacgagacacagctcaagggcatcaagggagaggccatcgataccgctaaccatggtgaggtgaagcgagcagttgaggaaattaggaacggggtaaccaaaaggggagaaactctgagctggctgaaatctcgcctgaaggtactaacagaagtgagcagcgagaatgaggcccagaagcaaggcgacgaactggccaagctaagttcttcttttaaagcattggtgacacttctcagcgaggtggaaaagatgctaagcaactttggcgattgtgtgcaatataaagagatcgtcaagaattctctcgaggagctcatctcaggctccaaggaagtgcaggagcaagcagaaaagatcctcgataccgagaacctcttcgaagcacagcagcttcttctgcatcatcagcagaagactaagagaatcagtgccaaaaaacgagacgtccagcagcagattgctcaagcacaacagggtgagggaggactcccagaccggggtcacgaggagctgcggaagctggagagtactctggatggcttggagcgatcaagagaacgccaggagagaagaatacaggtgactttgaggaaatgggagagatttgagaccaacaaagaaacggtggtgagatacctgttccagacaggatctagtcacgagcgctttctctcattcagtagccttgaatcccttagcagcgaactggaacagaccaaggagtttagcaagagaaccgagagtattgcggtgcaggcggagaacctggtcaaagaggccagcgaaattcccctcggccctcagaacaagcagctactccagcaacaagctaaaagtataaaggagcaagtcaagaagctcgaagacactttagaagaggagtatgtgatagacaataaaacgatggagatggtaaagactaagtgggaccattttgggtcaaacttcgagactttgtcggtgtggattaccgaaaaggagaaagagcttaatgccctagagactagcagcagcgctatggatatgcagatctcccaaatcaaagtgactattcaagagatcgagtccaagctcagcagtatcgtgggactcgaggaggaggcacaaagcttcgcgcagtttgtcacaaccggggaatctgcccgaataaaggcaaaactgacacagatccgcaggtatggcgaggagttgagggaacacgcccagtgcctggaaggcactatcctcggtcacctctcccagcagcagaaatttgaagagaatttgagaaagatccagcagtctgtctcagagttcgaagataaactcgccgtacccatcaagatttgttcctcagcgactgaaacttataaggtgctccaagagcacatggatctttgtcaggccctcgagagtttgagctctgcaatcactgctttctctgcgtccgcccgaaaggtggtcaaccgggactcctgtgtccaagaggccgctgccctgcagcagcagtatgaagatatcttgcgacgggcaaaggagaggcaaacagctctggaaaacctgctggcccattggcagaggctggagaaggagctctcatccttcttgacgtggctggaacggggagaagcaaaggcaagcagccccgagatggatatctccgccgaccgggtgaaggttgaggcctccaaagatgatgtaaagatgatgaagttacatcttgagcagctcgacgaaaggtggagggacctgccccaaataattaacaaaagaattaactttctccagtccgttgtggccgaacatcagcagttcgacgaactcttgttatcgttctctgtctggataaagttgttcttatcagagcttcaaactacaagcgagatctcaatcatggatcatcaagttgctctcacgaggcacaaagaccacgccgctgaggtggaatccaaaaaaggcgaactgcaatctcttcagggtcatcttgccaagctgggcagtctgggcagggcagaggatctccatttactgcaggggaaggccgaagattgtttccaacttttcgaggaggcctcccaagttgtggaacgtcggcagctggccctgtcacacctagctgagttcctacaaagccatgcaagcctgtccggaatattgcggcaactgcggcagacagttgaggctactaactccatgaacaagaacgagtccgacctgattgaaaaggatttgaacgatgcgctgcaaaacgccaaggctctggagtctgcagcagtgtccctcgatggaattctcagtaaggcccagtaccatctcaagattggttccagcgagcagagaacctcctgcagagctactgcagaccagctctgcggtgaagtggagcgcatccagaacctgttagggacgaagcagtctgaggcagatgccttggctgtgcttaagaaggcatttcaggatcagaaggaggagctgttgaagtcaatcgaggacatagaggaacggactgacaaggaaagactgaaggagcccacacggcaggctctccagcagcggctgagagtgtttaatcaactggaggatgaactgaacagccacgaacatgagctatgttggctgaaagacaaagccaagcaaattgctcagaaggatgtagccttcgcaccggaggtggaccgggagattaatcgattggaggtgacatgggatgacacaaagcggctcatccatgaaaaccagggccagtgttgtggactgatcgacctgatgcgcgagtatcagaacctgaaatcagctgtgagcaaagtgcttgagaacgcatcatccgtgatcgtcactagaactaccattaaagaccaggaggatctgaagtgggctttttcaaaacatgaaaccgctaaaaacaaaatgaactataaacagaaggacctcgataatttcacctccaagggaaagcacctgcttagtgaactcaaaaagattcactcttccgactttagcctggtgaagacggacatggaatccacggtggacaagtggcttgatgtaagtgaaaaattggaagaaaacatggaccgcctgagggtcagtctatccatctgggacgatgttttgagcaccagggacgaaattgaggggtggtccaataattgcgtaccccagatggctgaaaacataagtaatctggataaccacctaagggccgaggaactgctgaaagagttcgaaagcgaagtcaagaacaaggcactcaggctagaggaacttcactcaaaggtcaacgacttgaaggagttgacaaaaaacctcgagacacctcctgatctgcagttcatcgaagccgatctgatgcagaaactggaacacgccaaggaaataaccgaggttgccaagggcaccttgaaagattttactgcacagtccacccaggtggaaaaattcatcaacgacatcaccacatggtttacgaaggtggaagaatccctgatgaattgtgctcagaacgagacatgcgaggcgctgaagaaagttaaagatatacagaaggagttacagagtcagcagtctaacatcagctccacccaggaaaacctgaatagtctgtgtcgtaagtaccattcagcggagcttgagtcactaggaagagctatgacaggcttgattaagaaacacgaagcagtcagtcagttatgttcgaagacccaggcctcactccaggaatccctggagaagcacttctccgaagagtctatgcaagagttccaggaatggtttctgggggcaaaagcagccgctaaggagtcttccgataggacaggtgacagtaaggtgctcgaggcaaagctccacgatctgcagcagaatatcctggactccgttagtgatggacaatctaaacttgacgccgtgactcaggaagggcagactctgtacgcacatctgtctaagcaaattgtcagttctatccaggaacaaattaccaaggccaacgaggagttccaggcgttcctcaagcagtgtttgaaggacaagcaggcgctgcaggactgcgcatctgagcttggatccttcgaggatcagcatcggaaactgaacctgtggattcacgagatggaggagcgcttcaatactgaaaacctgggtgagtctaagcaacacatccctgagaagaaaaacgaagtgcataaagttgaaatgttcctgggcgagcttctagcggctagggagagtctcgataaactaagccagcgcggtcagctgctctcagaggagggtcacggcgcaggtcaagaaggcaggctttgttctcaactcctaacctcccaccaaaacctgttgcgaatgacgaaagagaagctccggagttgtcaagttgcccttcaggagcacgaagcgttagaggaggccttacaatccatgtggttctgggtgaaggcaatacaggacagactagcttgtgcagaaagtactctcggcagtaaggacacgctggagaaacgtctgagtcaaatccaagacatcctcctgatgaaaggcgagggcgaagttaaattaaacatggccatcggcaagggtgagcaggctcttcgatcctccaataaggaggggcagagggtgatccagacacagttagaaaccctaaaggaggtatgggccgacattatgagctcctccgtgcacgcgcagtccaccttggagtctgtaattagccagtggaatgattatgtggaacggaagaaccagttggagcaatggatggaatcagtcgatcagaagatcgagcaccccctccagccacaaccaggtctcaaggagaagttcgtactgctagaccatctccagtcgattctgagcgaagcggaggatcatactcgtgcactgcacagactgatcgcaaaatctcgagaactgtacgaaaaaaccgaggatgagagcttcaaggacactgcccaggaagagctgaagactcagtttaacgacataatgaccgtagctaaggaaaaaatgagaaaagttgaggagatcgtgaaggaccatcttatgtatctggacgccgtgcacgagttcactgattggctccattcggctaaagaggaactccaccgctggtctgacatgagcggggatagctcggccactcaaaaaaaactgtccaaaattaaagaactcatcgattcccgcgaaattggtgcttctcgcctatcgagggtggagtctctagcacccgaagttaagcagaatacaactgctagtggatgcgagctcatgcacaccgaaatgcaagccctgcgcgcagactggaaacagtgggaagattcagtgttccagacacaatcatgcctagaaaacttggtatcccagatggctctgagcgagcaagaattttccggccaggtggcgcagctggaacaagctctggaacagttttctgccctcctgaaaacctgggcacagcagctcactctgcttgagggaaagaatacagacgaggagatcgtggagtgttggcacaagggacaggagattcttgacgctctgcagaaagccgaacccagaacagaggatctgaagtctcaactcaacgagctctgccgtttcagcagagatcttagtacatattccgggaaggtctcaggcttgatcaaggaatacaactgcctgtgtcttcaagcctccaaaggctgtcaaaacaaagagcaaatcttgcagcagaggtttcgtaaggcctttagagatttccagcagtggctggtaaacgctaagattaccaccgctaagtgctttgatattccacagaacatctcagaggttagtacgagtttacaaaagatccaggagttcttgagcgagtccgagaacggacagcacaagttgaatatgatgttatcaaaaggagagctactcagcactttgttgacaaaagaaaaggccaagggaatccaggccaaggtcacagctgccaaggaagactggaaaaactttcactctaatctgcaccagaaggaaagtgccctcgagaacctaaaaattcagatgaaggattttgaggtgtccgccgagccaatccaggactggttgagtaaaaccgaaaagatggttcacgaatcttccaatcgcctgtacgatctccccgcaaagcggagagaacagcaaaagctccagtccgtgttagaagagatacattgttatgaaccacagcttaaccgactgaaagagaaggctcagcaactatgggaggggcaggcagcctccaagagtttccgacatcgggtcagtcaattgtcctcacagtacctggctctctccaacttgaccaaagagaaggtgagccgactagacaggatcgttgctgaacataaccagttttcccttggtataaaggaactgcaagactggatgaccgacgccatacatatgctggactcctactgtcatcccacctctgataagagcgtcctcgatagcagaacactgaagctagaggccctgctttcagtgaaacaagaaaaggagatacagatgaagatgatagtcaccagaggcgaatctgtcctgcagaacaccagcccggaggggatccccacaatccagcagcagctgcagtcagtgaaggatatgtgggcgtctttgttgtctgccggtatccgatgcaagagagtgagacttccctgtgcctacatcgcccttaagctgagggtgcatcagcacgcagagctcagagacaaaactactatgttaggtaaagcgaaagaggccgtgactaagagtgagaaactggttaggctgcatcaggagtatcagcgtgatctcaaagcctttgaagtatggttaggccaagagcaggaaaaactggaccagtatagcgtactggagggggatgcacacactcacgaaacgacacttagggacctccaagagctacaggtccactgtgcagaaggacaggcccttctgaacagtgtgttgcacacaagggaagatgtgattcctagcggaataccccaggcagaagacagggccctggagagcctcaggcaggactggcaagcctatcagcaccgattaagcgaaaccaggactcagttcaacaacgtggtgaacaagttgcggctgatggagcaaaaatttcaacaggtggatgagtggttgaagacagccgaagaaaaggtgtccccgaggactcgccgtcagagtaatcgcgctacaaaggaaatccaactccaccagatgaaaaagtggcacgaggaggtgaccgcttatagggatgaagtggaggaggtgggcgctcgcgctcaggagatcctcgacgaatcccacgtgaattccagaatgggatgtcaagcgacacaactgacgtcgagatatcaggccctcttgctccaggtgcttgagcagatcaaattcctggaggaggaaatacagtctctggaggagtctgagtcaagcctcagtagttattctgattggtatggcagcacgcacaaaaacttcaagaatgtcgcgacaaagattgacaaagttgacacggtcatgatgggtaagaagttgaagacactcgaggtactccttaaggacatggagaagggacattccctgctgaaatctgcgagagaaaagggggagcgtgccgtaaagtatctggaagaaggcgaggctgagcgcctgcgaaaggagattcatgatcatatggaacagctgaaagagctgacatctacagtcagaaaggagcatatgactctggagaagtcactgcagcagacagtgcttagccacgagccctccgtgaagagcgtgcgcgagaaaggggaagccctgctggagctggtacaggacgttactctcaaggacaaaatcgatcagctgcagtcagactaccaggacctttgttctatcggcaaagagcacgtgtttagcctggaagcgaaggtcaaggatcatgaggactataattccgagttgcaagaagttgagaagtggttgctgcaaatgagcggccgattagtcgctccagaccttcttgaaacaagctccttagagactattacccagcagctggcccatcacaagatgtatcagtccctggagcatgagttgcagaaacacgttagcaggcaggatacattgcagcaatgccaggcatggctcagcgctgtgcagcccgatctcgaacccagtccgcagccaccccttagccgcgctgaggctataaagcaggtgaagcactttcgggctctgcaggagcaggcgaggacctatctcgacttactctgttcaatgtgtgacctaagcaacgccagcgtgaagaccaccgctaaggacatccaacagacagagcaaacaatagagcagaaactggtacaagcccagaatcttacccagggttgggaggaaattaaacatctcaagtccgagttgtggatatacctgcaggacgctgatcagcagctccagaacatgaaaagaaggcacagtgaactagagttaaatatcgcacagaatatggtatcgcaggtgaaggacttcgtgaaaaaactccagtctaaacaggcctctgtaaatacaataattgaaaaagtgaacaaactgactaaaaaagaggaatcccccgagcacaaagagattaatcatctgaatgaccagtggttggacctgtgcagacaaagtaacaacctttgtcttcagcgtgaggaagacctccagaggactcgggattatcacgactgcatgaacgtggtggaggtgttcctggagaagttcacaacggagtgggataatctggcgaggagcgatgccgagtccacagcagtgcacttggaggccttgaaaaagctcgccctagctctgcaagagaggaagtacgctattgaagatttgaaggatcagaagcagaagatgattgaacaccttaatcttgatgacaaggagcttgtgaaggaacagacatctcacctcgaacaaagatggttccagttagaggaccttatcaagcgtaagatacaggtgtcagttaccaacctggaggaactgaatgtggtgcaaagtagattccaggagctgatggaatgggccgaggagcagcaacctaatatagcagaagccttaaagcagtcccctcctcctgacatggcccaaaaccttctgatggatcatttggctatttgcagtgaacttgaagccaaacagatgctcctcaaatctttgataaaagatgccgatcgagttatggcagacctcggcctaaatgagagacaagttatacagaaagccctttctgatgctcagtcccacgtgaattgcctgtcagacctcgtcggccagaggagaaaaaagcacttcaaagaggacttcgataaagcctgtcattggcttaagcaggccgatatagtgactttccccgaaatcaatttaatgaatgagtcttcagaactgcatacacaactggccaagtaccagaacatcctcgagcagtctcccgagtacgagaacctcctgttaactctccagcgaaccggtcagacgatcctcccttctctcaatgaagttgatcactcctacctatccgagaagctcaatgccctgcctcggcagtttaatgttatcgtggctctggcgaaggacaagttttataaggttcaggaggcaatcctggctcgaaaggagtacgctagcctgatagagttaactactcagtccctgtctgagctggaggctcagttcctccggatgtccaaagtgcccactgatctcgccgttgaagaagccttgtcactgcaagacgggtgccgagcaatcctggacgaggtggcgggactgggcgaagctgtggacgagctgaatcagaaaaaggagggcttcaggagcacaggccaaccctggcagcccgacaagatgctccacctcgtcaccctgtatcacaggctgaagcgccaaaccgagcagcgggtttccctgcttgaagacactactagcgcataccaggaacatgagaagatgtgtcaacagctcgagaggcaactaaagagtgtgaaagaggagcaatcaaaagtgaacgaagaaacactcccagctgaggaaaaactcaagatgtaccactccctggccggaagcctgcaggacagtggaattgttcttaagagggtcaccatacacctcgaggacctggctccacacctggacccactggcctatgagaaggccagacaccagattcagtcctggcagggtgaacttaagttactcaccagtgccattggagagaccgtcacagaatgtgaatcacggatggtccagtcaatcgactttcaaacagaaatgtcacggtctctcgactggttacggagggtcaaggccgagttaagtgggccagtctatttagacctgaatctccaggacattcaggaagagattcgcaaaatccaaatccaccaggaggaggtgcagtcctcccttcggataatgaacgcactgtcacataaagagaaggagaagttcacaaaggctaaggagttgatcagtgccgatctggagcacagcctcgctgaactgtctgaattggatggtgacatacaggaggccttgagaactcgccaggctacgctcactgaaatttactcacagtgtcagcggtactaccaagtgttccaagcagctaatgactggctcgaagacgcacaggagctgctgcaactagccggaaatggtctcgatgtcgagagtgcggaggaaaatctgaagagccacatggagttctttagcaccgaagatcaatttcatagcaatctggaggagctgcattccctcgtggctacgcttgaccccttaataaagcccactgggaaagaagatctagagcaaaaggtggcctccctcgagctgcgatcccagcgcatgtccagagatagtggtgctcaggctctggttagcgttgtgaatagctttcacgaaaagatagtggcactcgaggagaaagcctcccagctggaaaagaccggaaatgacgctagcaaagccacactgagcagatctatgaccaccgtctggcagagatggacccggctgagggccgtggcccaggaccaagagaagatactggaagacgccgttgatgagtggaccggctttaacaacaaagtaaaaaaggctactgagatgattgaccagctgcaggacaaacttcctggttcaagtgcggaaaaagcctccaaggcggagctgctgaccctcctcgagtaccacgatacattcgttctggagctggagcaacagcaatccgcccttggcatgcttcggcagcagactttgagtatgttacaggacggagctgcccctacaccgggagaagaaccgcctcttatgcaagagataacagccatgcaagatcgatgtctcaaaatggtagagactcagattaactcagtcaagtgttgggtccaggagacaaaggagtatctgggcaatcctactatagagattgatgcgcagctggaggagctccagatactgctgactgaggccacgaatcatcgtcaaaatatcgagaagatggccgaagagcaaaaggagaagtacctcgggttgtataccattctccctagtgagctgagtttgcagctcgctgaagttgctctggatctgaaaattagggatcagatccaggacaaaatcaaggaggtcgaacagagcaaggctacatcccaggagctctctcgccagattcagaaactcgctaaggacttaaccaccattttaacaaagctcaaagcaaagacagacaacgtcgtccaggctaagaccgatcaaaaggcagcatcacaccttgaagagtacaacgagatgctggaattgattctcaaatggatcgagaaggccaaggtgctagcgcacgggaccatcgcctggaacagtgcttcccagttacgcgaacagtacattcttcaccagacgttgctggaggagagtaaagagattgactccgaattagaagcgatgaccgagaagctacagtatctgacatccgtgtactgtactgagaagatgtcccagcaggtggccgaacttggcagagaaacagaagaacttcggcagatgatcaaaattcgactacagaacctccaggatgccgcaaaggacatgaaaaagttcgaggcagaactgaaaaaacttcaggctgctctggaacaagcacaggctacgttgacgtccccagaggttggaaggttgagcctgaaagaacagctgtcccatcggcagcatcttctaagtgagatggaatcactgaagcccaaggtccaggcggtgcaactctgccagagcgctttgcgtatccctgaagacgttgtagccagcctccccctctgtcacgcagcgctgcggctccaggaggaggcaagtcggcttcaacacactgcgatccaacagtgtaacatcatgcaggaggccgttgtgcagtacgaacaatatgagcaggagatgaagcacctacagcagctgattgagggtgcacacagggaaatcgaagataagcccgtggccacctctaatatacaagagctccaggctcagataagtcgccacgaggaactggctcagaagattaagggctaccaggagcaaatcgcctccctgaactctaagtgcaagatgctgaccatgaaggcgaaacatgccaccatgttactcaccgtgacggaagtcgaaggcctggccgagggtaccgaagatctggacggtgagttactcccgacaccctccgcccatccctctgtggtcatgatgactgccggtcgctgtcataccctcctctcacccgttacagaggaaagcggcgaggagggcaccaacagcgagatctcttcccctcccgcatgtaggtctccgagtcctgtggcaaacaccgacgcctctgtgaaccaggacattgcttactaccaagccttgtccgccgagagactgcagacggacgctgcaaagatacacccctctacctcagcttctcaggaattctacgagccgggactggagcctagcgctacagcaaagttaggcgatctgcagcgctcgtgggaaactctgaaaaacgttatctctgagaagcagaggacgctatatgaagctctagaaagacagcaaaagtaccaggatagcttacagtcgatcagcacaaagatggaggccatagaactgaagttgtcagagtcccctgagcccggaagatcccccgaatcacagatggctgagcaccaggcactgatggacgagatccttatgttacaggacgaaatcaacgagttgcagagctccctcgctgaagaactcgtgagtgagtcgtgcgaggccgaccccgctgagcagctcgccctgcagagcacgctgacagtactcgccgagagaatgagcacgataagaatgaaagccagcgggaagagacagttactggaagaaaaactcaatgatcaactggaggagcaaagacaggaacaagcactgcagaggtatcggtgtgaggcagacgagctggacagctggctcctgagcacaaaggcaaccctggacacagccttaagtccacctaaggagccgatggacatggaagcccagcttatggattgtcagaatatgctagtggagatcgagcagaaggtggtggccctgagtgaactctccgtccataatgagaacttactcctagaggggaaggctcataccaaagacgaggcggaacaattggcaggtaagctacgccgtctgaagggctctttattggagctccaaagggccttacacgacaagcagcttaatatgcaggggacagcccaggaaaaagaagaatctgacgtggatctgaccgctactcaatcacctggggttcaggagtggctggcccaggccagaacaacctggacccagcagcggcagagttcacttcagcagcagaaggagctggagcaggaactcgcggaacagaaatcactgctgagatcggtggcgagtaggggcgaagaaatcctaatacaacactccgcagcagagacctcaggtgatgcgggagaaaaacctgacgtactgagtcaagaactgggaatggagggcgagaaaagcagcgccgaagaccagatgagaatgaagtgggagagtctgcaccaggagttttccacaaaacagaagctgttacagaatgtcttagaacaggaacaagaacaggtgctttacagccggcctaacaggttgctcagtggtgttccactgtacaagggcgacgttccgacccaggacaaaagtgccgtgacatccctgctagatggtttgaaccaagctttcgaggaggtgagcagccagagcggtggggctaaaagacagtcgatccacctagagcaaaaactttatgatggagtgtccgcaaccagcacctggctcgacgacgtcgaggagagactcttcgtggcaaccgctctcttacctgaggagacggagacttgcctattcaatcaggaaatactggcgaaggacattaaagagatgtctgaggaaatggataaaaacaagaatcttttttctcaggccttcccagaaaacggcgataatagggatgtgatcgaggataccctgggctgccttctggggagactgagcctcctcgattctgtggtgaatcagcgttgccaccaaatgaaggaacgcctgcagcagatcctgaatttccaaaacgaccttaaagtgctttttacctcactggctgacaataaatatattatattgcagaagctcgctaacgtgttcgagcagcctgtcgctgaacagatcgaggccatccagcaagcggaagatggactaaaggagttcgacgccggaatcatcgaattgaagcggcgaggcgataagttgcaggtcgagcagccctctatgcaggaactgtctaagttacaggatatgtatgatgagctcatgatgataatcggcagtagaagaagcggtctgaaccagaatttgacactgaaatctcaatatgaacgcgctctccaggacctggctgatttgctggagactgggcaggaaaagatggcaggagaccaaaagatcattgtcagcagtaaagaagagatacagcagctcctcgataagcacaaggagtactttcagggcctcgaatctcacatgattcttactgaaaccctgttcaggaaaatcatttccttcgctgtccagaaagagacacaattccatacagaattgatggcacaggcttcggctgttttgaagagagctcataagcgcggagtcgaactcgagtatatactagagacttggagccatctcgatgaggaccaacaagaactttcccggcaacttgaagtggtggaatcttcgattccctctgtgggcctggtggaggaaaatgaagataggctcatcgaccggatcaccctgtaccaacacctcaagtcaagccttaacgagtatcaaccgaagctttatcaggtccttgatgacggaaagagactcttaatttccatctcctgcagcgacttagaatcgcagctgaaccagctcggcgaatgttggctgagtaacaccaataaaatgtctaaagaactgcacagattggaaacgatcttgaagcattggaccagatatcagagtgagagtgctgaccttatccattggctgcagtccgcaaaggacagactggaattctggactcagcaatccgtgaccgtgccccaggagcttgaaatggtgagagatcacttgaatgccttcctcgagttctcaaaggaagtggacgctcaatctagcctgaagtctagcgtcctcagcacgggtaatcagctactgaggttaaaaaaggtggacactgccacgctgcgaagcgaactgagtcgaatcgacagccaatggactgacttactaacaaatattcccgcagtgcaggaaaagcttcaccagctgcagatggataaactcccaagcagacacgccattagcgaggtgatgagttggatctcccttatggaaaatgtcattcagaaggacgaggacaacatcaaaaattccatcggttacaaagctattcacgagtaccttcagaagtacaaggggttcaagatcgatataaactgtaaacaactgactgtggacttcgttaaccaatcggtgcttcagatctcctcccaggacgtagagtcaaagagatctgataagaccgacttcgcagaacagttgggggcaatgaacaagtcatggcaaattttgcagggccttgtgaccgagaagattcaattactggaaggtctgctggagtcctggtctgaatacgagaataacgtgcagtgtctgaaaacttggttcgaaacacaggaaaagagattgaagcagcaacacaggataggggatcaagcaagcgtccaaaatgccctcaaagattgccaggatctagaggacttgatcaaagcaaaggagaaagaagtggagaaaatcgaacagaacggtctggcactgatacagaataagaaagaggatgtgtcgagcattgtgatgtcgacgctgcgggagctcggacagacatgggctaacctagaccatatggtcgggcagctcaagattttattaaaatctgttcttgatcagtggagctctcacaaagtagcattcgataagataaacagctacctcatggaagcccgatacagtctctcccgattcaggctcctgactgggtcacttgaagccgtacaggtgcaagtggataatctccagaatctccaggatgacctcgagaaacaggagcgctccctgcaaaaattcgggtccatcactaatcagttgctcaaggagtgccaccctcctgtcacagaaaccttgacaaacaccctgaaggaggttaatatgcgctggaacaacctcctcgaagaaatcgcagagcagctgcaatcttcgaaagctttgctccaactatggcagaggtataaagactattccaaacaatgcgccagtaccgttcaacagcaagaagaccgcactaatgagttgctgaaagccgcaacgaacaaggacattgccgacgatgaggtggcaacctggattcaagactgtaatgaccttctcaaaggattggggacagtcaaagattccctgttcttcctccacgaactgggagagcaactgaaacagcaggttgatgcatctgctgcctctgcaattcagtcagatcaactgtccctctctcagcatctgtgtgctctggagcaggccctgtgtaaacagcaaacatctcttcaggcgggagtcctggattacgagacctttgcaaaatctttagaggctctggaggcatggatcgtggaggcagaggagatcctgcagggacaggaccccagccacagttcagacctaagtactatacaggagcgcatggaggaattaaaaggccagatgttaaagttcagcagcatggctcctgatctggatcggctcaacgagctgggctacagactgccgcttaacgataaagagatcaagcgcatgcagaacttgaaccgccattggtcactaattagtagccaaacaaccgagagattcagcaagcttcagagtttcctgctacaacatcagacctttctcgagaagtgtgagacatggatggaatttttagtgcagaccgaacaaaagctggcagtggaaatcagcggcaactaccagcacttacttgagcaacagagagcacatgaattgttccaggctgagatgttctcgagacagcagattctgcacagcatcatcatcgatggccagagattattggagcaggggcaggtggacgatcgtgacgagtttaatctgaaactcactcttctgagcaaccagtggcagggagtgatacgacgggctcaacaacgcaggggcattattgattctcagattcggcaatggcagcgatatcgcgaaatggccgaaaaattaaggaagtggttagtggaagtatcctatctccctatgtctggcctgggttccgtccccatccctcttcaacaagccagaaccctgtttgatgaagtccagttcaaggaaaaagtttttctgagacaacaggggagctatattctgaccgtggaagctggtaagcagctcttgctgtcggccgatagtggagcggaagccgctttacaggccgaactggcagaaatacaggagaagtggaagtctgcatcaatgcggctggaggaacagaaaaagaagctggccttcctcttgaaagattgggagaaatgtgagaaggggattgcagatagcttggaaaaactgcggaccttcaaaaagaagttgtctcagtccttgcctgatcaccacgaagaattgcacgccgagcagatgaggtgcaaggaattagagaatgctgtgggcagttggactgatgatcttacgcaactttcacttctgaaggacactctgagtgcatatatcagcgcagatgatatctcaattctgaacgagagggtcgaactgctgcaaaggcagtgggaagagctgtgtcaccaattgtctttacgacgtcagcagataggagagagactcaatgagtgggcggtctttagcgagaaaaacaaggagctatgcgaatggcttacacagatggaaagcaaagtctcccaaaatggcgacatcttaatcgaggagatgattgaaaaactgaagaaagattaccaggaagaaatagccatcgcccaggagaataagatccagctgcagcagatgggcgaacggcttgcaaaggccagccatgagtcgaaagctagcgagatcgaatacaaacttggtaaggtcaatgaccgttggcagcacctgttggatctcattgctgccagagtgaagaagctcaaagagacactcgtggctgtccagcagttggacaaaaatatgagcagtttgcgtacttggctggcacacatcgagtcagagcttgcaaaaccgatcgtttacgacagctgtaatagcgaagaaatccaacgaaagctgaatgagcagcaggagctccagagagacatcgagaagcattcgacgggtgtggcctctgtgctcaatctttgtgaggtgctgctgcacgactgcgatgcgtgtgcaaccgacgctgaatgcgacagcatccagcaagccacgcgtaatttggaccggaggtggaggaacatttgcgccatgtctatggagcgcaggctgaagatcgaagagacttggaggttatggcagaagtttctggatgattacagcagatttgaagattggctgaagagctctgaacgcaccgccgcattcccaagctcaagcggggtgatctacacagtggctaaagaagaattgaagaagttcgaagcgtttcagcgccaggtgcatgagtgtctgacccagctagagctcatcaataagcagtacaggaggctggccagagagaatcgcacagactcagcttgttcactgaaacagatggtgcatgagggcaatcaaagatgggacaacctgcaaaagcgcgttactagcattctccgcagactgaagcacttcatcgggcagcgggaggagtttgaaaccgcacgggactcaattcttgtgtggctcactgagatggatttacagctgacaaacatcgagcactttagtgaatgcgacgtgcaggcaaaaataaaacagctgaaggcattccagcaagagatttcacttaaccacaacaagattgaacaaataatcgcccagggagaacagctcatagagaagtctgagccccttgacgccgctatcatcgaagaagagcttgatgagctgaggcgatattgccaagaggtcttcggacgcgttgagagataccacaaaaagctaattcggttaccactacccgatgacgagcacgacctgtccgatcgagagctggagttggaggactccgccgcactctccgaccttcattggcacgatcgatcagctgatagcctactcagcccacagccaagcagcaatctgtctctgtcactggctcagccactcagatccgagcggagtggtcgcgacactcccgcttcagttgattctattcctctggagtgggaccacgactacgacttatcacgggacctggaaagcgctatgagccgggcattgccctccgaggacgaggaaggtcaggatgataaggacttctatcttagaggcgctgtggggctgagcggggaccacagtgctctggaatcccagatccggcagctaggaaaagcactcgatgacagccggtttcagatccagcagaccgagaatatcattagatctaaaacccctactggacctgagctggacacatcatacaaaggatacatgaagctgcttggggagtgttcatcctctatcgattcggtgaagcggctggaacacaagctgaaggaggaggaggagtccctgcccggatttgtgaacctgcactcgactgagactcaaactgcaggggtcatcgataggtgggagcttctgcaggctcaggccctgtcaaaggaactgcgcatgaagcaaaacctccagaaatggcagcagtttaattccgacctgaatagtatctgggcttggcttggagacaccgaggaagagctggaacaactgcagaggctggagctcagtaccgacatccagacaattgagctgcaaattaagaagctcaaagaattgcagaaggccgttgatcatagaaaggcgataatcctatcaattaacctgtgctcacctgagtttacacaggctgattcgaaggaaagtagggatcttcaagacagactgagtcagatgaacggacgctgggatagagtgtgcagcctgctcgaagaatggaggggcctgcttcaggacgcgctgatgcagtgccagggattccacgagatgtctcacgggctgctgttgatgctcgagaatatcgataggcgtaagaacgagattgttcctatagacagtaacctcgacgccgaaattctgcaggatcaccacaaacagctgatgcaaatcaagcatgaactgcttgagtctcagttacgcgtagcatccctgcaagatatgagctgtcaactactggtgaacgctgaggggactgactgcctcgaagcaaaagaaaaggtccacgtgatcggaaacagactgaaacttctgctgaaggaggtgagccggcatatcaaagaactggagaaactcctcgatgtcagttccagtcagcaggatctctcttcctggtcatcagccgacgaactcgatacatccgggagcgtcagccccacatccgggcgaagcacccctaaccggcagaaaacaccacgaggcaagtgtagtttgtcacagcccggtcccagtgtttcttctccacattctcgcagcactaaggggggaagtgactcttctctaagtgaacctggtcccggacggagcggaagggggtttctgttcagagttttgcgagctgcacttcctctccagctgctcctattgttgttaatcggcttggcttgtttggtacccatgtctgaggaagattactcatgtgcattgagcaacaacttcgcgagatcttttcatccgatgctgaggtatacgaacggtcctcctcctctttag

SEQ ID NO: 242066 - DNA, 9965 bp, synthetic construct
  misc_feature 1..9965: note = Description of Artificial Sequence: Synthetic coding sequence
  source 1..9965: mol_type = other DNA
atggaactggacgccgctgttcagaaatttcttgagcagaacggtcagttagggaaacccctcgcaaagaagatcggcaaactcacggagctccaccagcaaactatacgacaggcagaaaaccgcctgtccaaattgaatcaggcggcttctcacctggaggaatataacgaaatgctggagctaatactcaaatggattgagaaggctaaagtgctagcacacggcacaattgcctggaattccgcctcccagttacgggagcaatacattcttcatcagacattattggaagagagcaaggagattgacagtgagctcgaagctatgaccgaaaagctccagtacctgaccagcgtttactgtactgagaagatgtcccagcaggttgccgagctggggagggagaccgaagagctccgacagatgattaagatcagactgcaaaatctgcaagacgctgcaaaggacatgaagaaattcgaggccgagctaaagaagctccaggcagctctcgagcaggctcaggcaacattgacatcacctgaggtgggaagactcagtcttaaagaacagctcagccaccgccagcacctcttgtcggagatggagtccttaaaaccgaaagtccaggccgtgcaactgtgccagtcagccctcaggattccagaggatgtcgtggcctcgctcccactttgccatgctgcacttagactccaagaggaggccagcaggcttcaacatactgctattcaacaatgcaacattatgcaggccgctgttgtccagtatgagcagtacgaacaagagatgaagcacctgcagcagctcattgaaggagcccatagagaaatagaggacaaacccgtcgcaacctccaatattcaggaacttcaggcgcagatatctcgacatgaggagctcgcccagaaaatcaaaggctaccaggagcagatcgcatcactgaattcaaaatgcaagatgttaactatgaaggccaaacatgcaacaatgctgctgactgtgaccgaggtggaagggctggccgaagggaccgaagacttagatggcgagctgctgcctacacctagcgcccatccctccgttgtaatgatgaccgccggtaggtgccacactttactgtcgcccgtaactgaggaatctggcgaagaaggtacaaatagtgagatcagcagtccaccagcttgcaggagcccatccccagttgccaacactgacgcctcagtgaatcaggatatagcctattatcaggccctatcagcagaaagactccagactgacgcggcaaaaattcatccatcgaccagcgctagtcaagagttttacgaacctgggctggaaccaagcgctaccgccaaattgggagatctccaacgatcttgggaaactctgaagaacgtcattagtgagaaacagcgcactctgtacgaagcgctcgagaggcaacagaagtatcaggactcactccagtcaattagtaccaagatggaggcgattgaactgaagttgtctgaaagcccagagcccggaaggtcccccgagtctcaaatggcagagcatcaggctctgatggatgaaatactaatgctccaggacgaaattaatgaactccagtcctcactagctgaagaactcgtgtccgagtcttgtgaggccgaccctgcagagcagctggcattgcagagcacactgacggtgctcgcggagcgaatgagcaccattcgcatgaaggccagcgggaaacgccaactgctggaggaaaaattgaacgatcagctcgaggaacagcgccaggagcaggcacttcagagataccggtgtgaggctgatgagctggatagttggctactgtctaccaaagctacactggacaccgctttatctccaccaaaggagcccatggacatggaagctcagctgatggactgtcagaatatgctcgtcgagattgaacagaaggtggttgcgctcagcgagttgagcgtgcacaacgagaacctcctcctggaaggaaaggcacacaccaaagatgaggccgagcagctggcagggaagctacgtagactcaaggggagtctgctggaactgcagcgtgccttgcacgataaacaattaaacatgcagggcacagcacaagaaaaggaggagagcgatgttgatctgaccgccacacagagcccaggagtccaggagtggctcgcccaagcaagaaccacctggacccaacaacggcagagctccctgcagcagcagaaagagctcgagcaggagctggctgaacagaagtccctgctccgctccgtagcttcaagaggcgaagaaatcttgatccagcatagcgctgcagaaactagcggcgacgctggggagaagcccgacgtgctaagtcaagaactcgggatggaaggagagaagtcatctgcggaagaccagatgcgtatgaaatgggagtcactgcaccaggagtttagtacgaagcagaaactgttgcaaaacgtgcttgaacaggaacaggaacaggtgctgtatagcagacctaaccgcctactcagcggagtaccattgtacaaaggcgacgtccctacacaggacaaatccgccgtcacgtctttgctggatggtctgaaccaagcctttgaggaggtgtccagccagtcaggaggagcaaaaagacagagtatacacttggaacaaaagctgtacgacggagtgtcggcaacttccacatggctggatgacgtcgaagagcggcttttcgtggctacagcgctgctcccagaggagacggagacatgcctgtttaaccaggaaatcctagccaaggacatcaaggaaatgtcagaggaaatggacaaaaataaaaacctgttctcacaggcattccccgagaacggcgataaccgagatgtaatcgaggataccctagggtgtcttctcggcagattgtccttactggacagtgtcgttaatcagagatgccatcagatgaaggagcgcctgcagcagatcctgaactttcaaaacgacctgaaggtactattcacctctctcgccgacaacaaatatatcatcctccagaagcttgccaatgtgttcgagcagccggtggcggagcagatcgaagccatccaacaagccgaggacggactgaaagagtttgatgcaggtatcatcgagctgaaacgacggggtgataaattacaggttgagcagccgagcatgcaggagttaagtaagttacaggatatgtacgacgaactcatgatgataatcggatccaggcgaagtgggttgaaccagaacttgaccctcaaaagccagtacgagagagccctgcaggacctggcagatttattagagactggccaggaaaaaatggccggagatcagaagatcatcgtgagtagcaaggaggagattcagcagctactggataagcacaaggaatatttccagggcctggaatcccatatgattctcactgagaccctgttcagaaaaattatcagctttgctgtacaaaaagaaactcagttccataccgaactgatggcccaggcttccgcagtgctgaaacgagcacacaaacggggtgtagaactcgagtatattctggaaacatggtcacatctggacgaagaccagcaggaattgagtagacagctagaggtagtggagtctagtattccttcagtgggcctagtggaggagaacgaggacaggttgatcgaccggatcactctgtaccagcatctgaagtcctctctgaacgaataccagccgaagctgtaccaggtgttagatgatgggaagagactgttgataagtatcagttgctccgacttggagtcccagctgaatcagcttggggaatgttggctgagcaacaccaataaaatgtccaaagaactgcatcggctggaaaccatccttaaacattggactagatatcagtccgagagcgccgacttaatccactggctgcagtcggctaaggaccgcttagagttctggacccagcagagcgtgaccgtaccccaggagttggagatggtgcgagaccaccttaacgcatttctggagttttcgaaagaagtagacgctcagtcttccctgaagtccagtgtgctttccaccgggaaccagcttctgagactaaagaaagtcgacacagcaacacttagatcagagctgagtcggatcgacagtcaatggacagatctgctgacaaacattcccgcagtgcaggaaaagcttcaccagctgcagatggataagcttccaagtaggcacgccattagcgaggtcatgtcatggatctccctgatggagaatgtcatccagaaggacgaggacaacattaagaatagcatcggatataaagccatccatgagtacctgcagaaatataaggggttcaaaatcgacattaactgcaagcagctgactgtggacttcgtgaatcagtctgtgttgcagatatcctctcaggatgtggaaagtaaaaggagcgacaagaccgactttgctgagcagctgggggctatgaacaagtcatggcaaattctgcaagggctggtaaccgagaaaatccagctgttggagggcctactggagagttggtctgaatacgagaataatgttcagtgcctgaagacctggttcgaaactcaggagaaacgcttgaaacagcagcaccggattggcgaccaggccagtgtccagaacgccctgaaggactgtcaggatctggaggatcttattaaagccaaagagaaggaggtggagaagatcgaacagaatggccttgccctaatacagaacaaaaaggaagacgtgtcatccatcgttatgtccaccctgagagagcttggccagacctgggcaaatctcgatcatatggtcggccaactcaagatcttgcttaagagcgttctggatcagtggtccagccataaggttgctttcgacaagatcaattcgtatcttatggaggcccgttactctctgagccgctttaggctcctgacaggaagtcttgaagcggtgcaggtgcaggtggacaacctgcaaaatctccaagatgacctcgagaaacaggagcgatctttgcagaagttcggttccataactaaccaattgttgaaggagtgtcatccacccgttacagaaacactcaccaacacactgaaagaagtgaacatgagatggaacaacctactggaagaaatcgcagaacagctgcaatccagtaaggccttattacagctgtggcagcgctacaaggattatagtaagcagtgcgctagcactgtgcaacagcaggaggatagaaccaatgagctcctgaaagcagctacgaacaaggacattgccgacgatgaagttgccacctggatccaggattgcaatgatctgctaaaaggactgggcactgtgaaggattcactcttctttcttcacgaactgggtgagcagctcaagcaacaggttgatgcctctgcagcatccgcgatccagtctgatcagctcagcctgtcacagcatctgtgtgccctcgagcaggcattatgcaagcagcagacaagcctccaggccggagtcctcgactatgagacattcgcaaagtccctcgaagcgcttgaagcctggattgtggaggctgaggaaattctccagggccaggacccgtcccactcttctgatttgtcaacaatccaggagcggatggaagagctgaagggccagatgctcaaattctccagtatggctcccgacctggatcgcttgaatgagctgggctaccgcctcccactgaacgacaaagaaatcaaaaggatgcagaatctgaacagacactggagcctgatttcaagccagactaccgaaaggttcagcaagctccagtcatttttgttgcagcatcagactttccttgaaaaatgtgaaacatggatggaattcttagtgcagactgaacagaagctggccgtggagatatctggaaactatcagcacttattggaacagcagagagcccatgagctgttccaagccgagatgttcagtagacaacaaatccttcactctataatcatcgacggccagaggctccttgaacaggggcaggtggacgacagggatgaatttaacctgaaactcactttgctatctaatcagtggcagggggtgattcgcagagcccagcagcggcgaggcattattgattctcaaattaggcagtggcagcggtaccgcgagatggccgagaagcttcgtaagtggctggtggaagtgtcatacctgcctatgtccggcctgggcagtgtgcctatccccctgcagcaggccagaacactctttgacgaggtgcagttcaaggagaaggtgtttctcagacagcaaggttcttacatcctgacagtggaggccggaaaacagctgctgctctccgctgactccggcgctgaggctgctctgcaggctgaactggcagagattcaggagaaatggaaatctgcctcaatgaggctagaggagcagaagaagaaactcgcttttttgctgaaggactgggagaagtgcgagaagggcatcgcggattcccttgagaagctgaggaccttcaaaaaaaaattgagccagtctttacccgaccaccacgaggaactccatgcagagcagatgagatgcaaggagctcgaaaatgctgtggggtcctggacagacgacctgacacagctgtccctgctgaaggatacactctctgcatatatatctgcggacgatatctccatcttgaacgagcgggtggaactcctgcagcggcagtgggaggaactgtgccaccaactcagcctgcgcagacagcagatcggtgaacgactaaacgagtgggccgtgttttccgagaagaacaaggagctttgcgaatggttaactcagatggaaagcaaagtttcacaaaatggtgatatactgattgaagaaatgatcgagaaattaaaaaaggactaccaagaggaaatagcgattgcacaggaaaataagatccagttgcagcagatgggggagagactggcgaaggcatcccacgaatcaaaggcaagcgaaattgagtataaactgggaaaggtcaatgatcggtggcagcacctgcttgatctgatcgctgcgcgagtgaaaaagttgaaagaaactctcgtggcggtgcaacagttggataaaaatatgtccagcctgcgtacctggctggcccacattgagtcagaacttgcgaagcctatagtttatgatagctgcaactccgaggagatccagaggaaactcaatgagcagcaagaactgcagagggatatcgagaagcacagcaccggagtcgcctctgtcttaaacctgtgtgaggtcctcctgcacgattgcgacgcttgcgcgaccgacgctgagtgcgattctattcagcaggctacacgcaatctggacagaaggtggcgaaatatttgtgccatgagcatggagcgcagactaaagatcgaggagacatggaggctctggcaaaagtttctcgatgattattcccgatttgaggattggcttaagtcttccgagagaacagccgctttccccagttcatctggcgtaatttacacagtcgctaaagaagaactgaagaaatttgaagccttccagaggcaggtgcatgagtgtctgacacaattggagttgatcaacaaacaataccgaaggctcgcacgagagaaccggacagacagcgcttgcagcttaaaacagatggtgcatgaaggcaatcagcggtgggacaacctgcagaaacgcgtgacaagtatcctgagaagactgaaacattttataggacagcgtgaagagttcgagaccgctagggattctattctggtttggctgacggaaatggatctgcaactgacgaacatcgaacacttttccgaatgtgacgtgcaggcaaaaatcaagcagctgaaggccttccagcaggaaataagcttgaaccataacaaaattgagcagatcatcgcccagggcgagcagctcattgaaaagtctgagccattagatgctgccataatcgaagaggaactcgacgagcttagaaggtactgccaggaagtatttggcagagtggaacggtaccataaaaaactcattaggttacctctaccagacgatgaacacgaccttagcgatcgggaactggaactggaagatagtgcagccttatccgatttacattggcacgatcgctcagccgattctctgttgagcccccaacctagtagcaacctgagcttatccctggcccagccactccgttcagagaggtctggaagagatacaccagcaagcgttgactccatccctctggaatgggatcacgattacgacttgagccgagatttggaatcggctatgtctagagcccttccgtccgaagatgaggaaggccaggatgataaggatttctatctccggggagctgtcggactgtctggcgatcatagtgccctcgaatcacagatccggcagctgggtaaggcactggacgacagccgtttccagattcagcagactgagaacattatccggtctaagacacctacaggcccagagttggataccagctacaaaggatacatgaagctgcttggagagtgctcgtcttccattgatagtgtgaagcgactcgaacacaagctcaaggaagaggaggagtcattacccggtttcgtgaatctccactccactgagactcaaacagctggggtcatcgataggtgggagctgttgcaggcacaggcactcagtaaggaactgaggatgaagcagaacctgcagaagtggcagcagtttaactctgatttgaattctatctgggcctggctcggggacaccgaggaggaactggagcaattgcaacggctggagctcagcactgacatccagactatagagttgcagatcaaaaagctgaaggaacttcagaaggcagtggaccaccggaaggcaatcattctttccattaacctgtgctcacccgaattcactcaggcagactccaaagagtcaagggatctgcaggacagacttagccagatgaacggaagatgggaccgtgtgtgctctcttttggaggaatggagggggctgctccaagacgcactgatgcagtgccagggctttcatgagatgtctcacggcctgctgttgatgctagagaacattgaccgcaggaagaatgaaatcgtgccaattgactcaaacctcgacgctgagatactgcaggaccaccataaacagctgatgcaaattaaacatgaattgctggagagccaactgcgggtggcgtctcttcaagatatgagctgtcagcttctcgtgaatgccgagggcacagactgcctggaagccaaggagaaggtccacgtgatcgggaacagattgaaactgcttctgaaagaagtgagtagacacatcaaagaacttgagaaattgctggatgtctcctcatcccagcaggacctctcatcgtggagcagcgctgacgaattagatactagcggtagtgttagccccacatccggcagaagtacccccaaccgccaaaagacacccaggggtaaatgcagtctctcacagccaggtccaagcgtttccagcccgcattctagaagcaccaaaggtggcagcgactcttccctgagtgaacccggtcccggaaggtccggcagaggctttcttttccgagtgttgagagctgcattgccgctccaactgctgctcctcctgctgatcggcctggcctgtctggtgcctatgtccgaggaggactactcttgtgcactgagcaataattttgcccgtagttttcatcctatgctcaggtacaccaatggtccgccacccctgta

SEQ ID NO: 242067 - DNA, 2934 bp, synthetic construct
  misc_feature 1..2934: note = Description of Artificial Sequence: Synthetic coding sequence
  source 1..2934: mol_type = other DNA
atggttgtcgccgaagatctcagtgcgctgaggatggctgaggattcttgcgttgatgcagatctgcctgattgtaattgcgatgtgactcggcagagggttaagaagctaaaagagactcttgttgctgtccaacagctcgacaagaatatgtccagcctgagaacttggctagcgcacatagagtcagagctcgccaagcccattgtgtacgattcttgtaattccgaggaaatccaaaggaagttgaacgaacaacaggagttacagcgcgatattgagaagcactctacaggcgttgcgagcgtactaaatttgtgtgaagtgctgttgcatgattgtgacgcttgcgccaccgatgcagagtgtgattctatccagcaggccactcgtaacttggaccggagatggcgcaatatttgcgccatgtcaatggagcgcaggttgaagattgaagagacatggcgcctgtggcaaaaatttcttgatgattactcccgattcgaggactggctgaagtcttcagaacgcacagctgcatttccctcgtcctccggggtgatttataccgtagctaaggaagagttaaaaaagtttgaagcctttcagcggcaggtgcacgagtgcctcactcagttagaactgataaacaagcaatatagacgcttggcgagagagaaccgaaccgattctgcgtgcagtttaaagcaaatggtacacgagggtaaccagagatgggacaacctgcagaaaagggtgacatctatcctgagaagacttaagcattttatcgggcagagggaggagtttgagactgccagggactcaattctggtgtggctcacagaaatggaccttcagctcaccaatatagaacacttttccgagtgcgacgtgcaggccaaaatcaagcaattgaaggcttttcagcaggaaatctctttgaaccataacaagatagaacagatcatcgcccaaggggagcagctgattgagaagagtgagccactggatgctgcaataattgaggaggaacttgacgagctccgcaggtattgccaggaggtgtttgggagagtggagcgttatcataagaagttgattagactgcctctcccagatgacgagcatgatctttctgatagggagttagaactagaagacagcgccgctttgagtgacctgcactggcacgaccgatctgcagattccttgttatctcctcagccatcctccaacttatctctgagtctcgcccaaccccttcggagtgaacgctcagggagagacacacccgcatccgtggatagcatcccactcgagtgggaccatgactatgacctctccagagatctagagtccgctatgtcccgcgctctgcctagtgaagacgaggagggacaggacgacaaggacttctacctccgcggagctgtgggtctgtccgatgtaatgattccggagtcccctgaagcttacgttaagctcacggagaatgcaattaagaatacgtctggagatcattccgcccttgagagccagatccgccagttgggaaaggctctggacgatagcaggtttcaaatccagcagacagaaaacattattaggtccaaaactcccaccggcccagagctggataccagttataaaggatacatgaaactcctgggcgaatgttcatcttctatcgactctgtgaagcgactggagcacaagctgaaggaagaagaggaatcccttcccggattcgtcaatctgcacagtacagaaacacaaacggcgggagtaatcgatcgatgggaactgctccaggctcaggcgcttagcaaggaacttaggatgaagcagaaccttcagaaatggcagcagttcaactctgatctcaacagcatctgggcttggctgggagacaccgaggaagaattagaacagctccagcgcctcgagttgtccactgacatccaaacgatcgaactccagattaaaaagttgaaggagctacagaaagcagtggatcaccgcaaggctattatactgtcaattaacctatgtagcccagaattcacccaggcggacagtaaggaaagtcgggacctccaagataggttatcacagatgaacggcaggtgggaccgtgtgtgttcactcctggaagagtggaggggactgctacaggacgcactaatgcaatgccaggggtttcatgagatgagtcacggcctactgctgatgctggagaatatcgatcgacgaaagaatgaaatcgtgcctattgactctaatctggatgccgaaatcttgcaagaccatcacaagcagctgatgcagataaaacacgagcttctagagagtcagctccgcgtcgcgagcctacaggatatgagttgccagctgctggtgaatgctgagggaaccgactgtctcgaagcaaaagaaaaggtgcacgtgatagggaatagactcaagttgttattaaaagaagtgagtcgccatataaaagagctggagaagctgcttgatgtgagctcatctcaacaggacttgagttcttggagctcagcggatgaactggatacctccgggagcgtcagtcctaccagcgggcgatccaccccaaaccgccagaaaacacctcggggaaaatgctcactgtcccagccaggtccctccgttagctccccccacagtcgcagtaccaaaggaggctccgattccagtctcagcgagccaggtcctggcaggtccggacggggattccttttcagggtgctgcgcgcagcacttccattgcagctgctgttactgctgttgatagggcttgcttgtctggtcccgatgtccgaggaagattactcctgcgctttgtcaaacaattttgcacggtctttccacccaatgttacgatacaccaatggaccgcctcccctgtag

SEQ ID NO: 242068 - DNA, 26393 bp, synthetic construct
  misc_feature 1..26393: note = Description of Artificial Sequence: Synthetic coding sequence
  source 1..26393: mol_type = other DNA
atggccacgtcacgaggggcaagtagatgccctagagacattgccaatgtgatgcagcggttgcaagatgagcaggaaatagtccagaaacggactttcactaagtggataaattcacaccttgcgaaaagaaaacctcctatggtagtggatgacctgtttgaagacatgaaagacggggtgaagctgctagctctgctcgaggtactctccggacaaaaactgccttgtgagcaagggaggaggatgaagaggatccacgcagtggccaacattggcacagccctaaagttcctggaggggcgtaaaatcaaattggtcaatatcaacagtacagatatcgccgatggcaggcctagcatcgtgttgggactgatgtggacaatcatactttatttccagatcgaggagcttacttctaatttgccacagttgcaaagtttgtctagcagcgcttcctccgttgatagcatagtgtcgtccgagacaccaagccccccaagtaaacggaaggtgaccacgaagatccaggggaacgctaagaaagcgctcctgaaatgggtccagtacaccgcagggaaacagactggtatagaggtcaaagacttcgggaaaagctggcggtctggagtcgcttttcacagtgtgattcatgctatcagaccagaattggtcgatttggaaaccgtgaaagggaggtctaacagggagaatctggaagacgccttcactatcgcggaaactgaattagggatccctcgactgctcgaccctgaagatgtggacgtggacaagcccgacgagaaaagcattatgacatacgttgcccagttcttaaaacattacccagacatccataatgcctctaccgatggccaggaggatgatgagattcttcccggttttccatcctttgccaactctgtccaaaactttaagagagaggacagggtcattttcaaagagatgaaggtgtggattgaacaatttgaacgagacttgaccagagcccagatggtggaaagtaacctgcaggataaataccagagctttaaacacttcagggtgcagtacgaaatgaaaaggaagcagattgaacacctcatccagcctctccacagagacgggaaactgtcccttgaccaggcattggtcaagcagtcctgggatcgggtaaccagccgtctcttcgattggcacattcagctggataaaagtctgcctgccccactgggaacaataggcgcttggctctatagggctgaagtcgccctccgggaggagatcacggtccagcaggtgcatgaggaaaccgcaaacacaatacagcggaaactcgaacagcataaagacctgctccagaatacagacgcacacaagcgcgcatttcatgagatttataggaccagatccgtaaacggcattccggttcctccggatcagctcgaggacatggcagaacggtttcacttcgtttcgtccacgtccgaactgcatcttatgaagatggagtttctggagctgaaatacaggctgctgtcgttgcttgtgctggcagagagtaaactgaaaagttggattatcaagtatggccgacgagagtcagtggagcagctgctgcagaattacgtgtctttcatcgagaatagtaaattcttcgagcagtacgaagtgacttaccaaattctgaagcaaacagccgaaatgtatgtgaaagcggatggtagtgtcgaggaggccgagaacgtgatgaaattcatgaacgagaccactgctcagtggagaaatttgtccgtcgaggtgcgctcggtgcgctctatgctcgaggaggttatcagtaactgggatcgatacgggaacaccgtggcctctctgcaagcttggctggaagacgctgagaaaatgctcaatcagtctgaaaacgctaaaaaggactttttcaggaatctaccccactggatacaacagcacactgccatgaacgatgccggaaactttctgatagagacatgtgatgagatggtttcgcgcgatctaaaacaacagcttctgttactgaatggacggtggcgagagttgttcatggaagtgaagcagtacgcccaggctgatgagatggacagaatgaagaaggagtacacggactgcgtagtcactctcagcgccttcgccacagaagctcacaaaaagctgagtgaaccgctcgaagtaagctttatgaatgtgaagctgctgatccaggatttagaagatatcgaacagagggtgccagtgatggacgcccaatataagatcatcacaaaaacggcacacctcattactaaagagtctcctcaggaggagggtaaggaaatgtttgctactatgtccaaacttaaggagcagttgacaaaggttaaagaatgctactctcccttgttgtacgaatcccagcagctactgatacctctggaggagctggaaaagcagatgacatcattttacgattccctgggcaagatcaatgaaatcatcacagtactagagcgagaggctcagtcatctgcactgttcaagcagaagcaccaggagcttcttgcttgccaggaaaattgcaagaaaacactcactctgatcgagaagggaagccagtccgttcaaaagtttgttactctaagtaacgtgctcaagcatttcgatcaaacgagacttcaaagacagatcgcagacattcatgtcgcctttcagagtatggtgaaaaaaacgggtgactggaagaaacacgtggaaacaaactcaagactgatgaagaagttcgaagagagccgagcagaactggagaaggtgttgcgaatcgctcaagaaggacttgaggaaaagggtgatcccgaggagctgctgagacgccatactgaattcttctcccagctagaccagcgggtgctgaacgcctttcttaaagcttgtgatgagttgacagatatcttgcccgagcaggaacagcagggtctccaggaggcagtgcgaaaactgcacaaacagtggaaggatctgcaaggagaggctccataccatctgctccatctgaagattgacgtggaaaaaaatagattccttgcatctgtggaggagtgccgcaccgaactggatcgggagaccaagctaatgccgcaagaagggtctgagaagatcatcaaggagcatcgggtgtttttctctgacaagggccctcaccacctgtgcgaaaaaagactccagctgattgaggagctctgcgtcaaactcccggtgagggatcccgtccgagataccccaggcacttgtcacgtgacgctcaaggagttaagagctgccattgatagcacttataggaagctgatggaggatcctgacaagtggaaggattataccagtcgcttctctgagttttcttcctggattagtacaaatgagacgcagctgaagggtattaagggagaggctattgacaccgcaaaccatggagaggttaaacgtgctgtagaagagattcggaatggggtgaccaagcggggtgaaacattatcttggctgaagtcgaggctgaaggtacttacagaagtaagctctgagaacgaagcacaaaaacagggagacgaactggcaaagctgagtagctcttttaaggctctggtaacactcctgagtgaggtggagaaaatgttatctaactttggggactgcgtgcaatataaggaaatcgtcaagaactcgctcgaggagttgatatctggaagtaaggaggtgcaagaacaggccgagaagatcctcgatactgagaacctgttcgaagcccagcagctgcttctgcaccatcagcaaaaaaccaagcgaatatcagccaaaaaacgcgatgttcaacagcagatcgcacaggcccaacagggcgaggggggactgccggaccgcggacacgaagaactgagaaaactggaatctacactggacgggttagagcggagccgcgaacggcaggaacgacgtattcaggtaaccctgagaaagtgggaacgatttgagacaaacaaagaaaccgtggtcaggtatttgttccagactggctcgagtcacgagcgatttctgtcatttagctccttagagtcactgagtagtgagctcgagcagaccaaagaattttctaagcggacagagagtatagccgttcaggcagaaaaccttgtgaaggaagcctctgaaattcctttggggccacagaacaaacagctgcttcagcagcaggcaaagtcaatcaaagagcaggtaaagaaactcgaggacaccttagaggaggacattaagactatggaaatggtcaagaccaaatgggaccactttggttcaaatttcgagaccctgagtgtctggattaccgagaaagagaaggaactcaacgcactcgagactagctccagtgctatggacatgcagataagccagataaaggtgactatccaggagattgagagcaaactctcttcaattgtcggacttgaggaggaagctcagtccttcgcccaatttgttacaacgggagagtcagccagaattaaggcgaagctgacccagatcaggcggtacggggaagaattaagggaacacgcccaatgtctcgaagggaccatactcggccacctttcacagcaacaaaaatttgaagaaaacctgagaaagatccagcagagcgtttctgagttcgaagacaagctggccgtacctataaagatctgttctagcgctacagagacatataaggtactacaggagcatatggacttgtgccaggccctggagagtctctcctcagcgattacggcattcagcgcgtccgccaggaaggtggtgaaccgggacagctgcgtacaggaagcagctgcactgcagcaacagtatgaggatattctcagaagggctaaggagaggcagactgctttggaaaaccttctggcacattggcagcgcctcgaaaaggagctgtcaagctttcttacttggcttgagcgtggggaagcgaaggcgtcaagccccgaaatggacatctctgcagatcgcgtgaaggtggaaggtgagctacagctgatccaggccctccaaaacgaagtggtgagccaagccagcttctatagtaagctcctgcagctcaaagagtccctgttcagcgtggcgtccaaggacgacgtaaagatgatgaaactgcatctcgaacagctggacgaacgctggagagatctgccccagattattaacaagaggattaacttcctgcaatcagtggtcgctgaacaccaacaatttgacgagctacttctctccttttcagtgtggatcaagctgtttttgtcagagttgcagactacttccgagatcagcatcatggaccaccaggtcgctctaaccagacacaaggatcatgcagccgaggtcgagtctaagaagggcgagctccaatccctgcagggccacctggccaagctcggatctctcgggcgagcagaggacctgcacctcctgcagggcaaagcagaagactgctttcaattattcgaagaggcctcacaggttgtcgagaggcgccagttggccctgtcccatctggctgagtttcttcagtcccatgcaagcttgagtgggatcctgagacagctaaggcagacagtagaggcaacaaattccatgaacaagaacgagagcgaccttatcgagaaggatctaaacgacgccctgcaaaatgccaaagcccttgagtcggcagccgtgagtctcgacggcatcctctccaaggcgcaatatcaccttaaaatcggttcatccgagcagcgaacctcctgtcgcgcaactgccgaccagctatgcggggaagtcgagcgtatacagaatctcctgggaaccaagcaaagcgaggccgacgcactggccgttctgaagaaagccttccaagaccagaaagaggagctcctgaaatcaatcgaggacatagaagaacggaccgataaggaaaggctgaaggaacccacaaggcaagccttgcagcaaagactgcgagtgttcaatcagctggaagatgaactcaacagccatgagcacgagctatgctggctgaaagataaggctaagcagattgcccagaaagatgtagccttcgccccagaggtagacagggagattaacagactggaggtaacctgggacgatacgaagagactgatccacgaaaaccagggccaatgttgtggactgattgacttgatgagagagtatcaaaacctcaagagcgccgtatcaaaggtcctagaaaacgcttcaagcgtaatcgtcactcgcacgacaatcaaggaccaggaggatctcaagtgggcctttagcaagcacgaaacagcgaagaataagatgaattacaagcagaaagacctcgataactttacctccaaaggcaagcacttactgagcgagctgaagaaaatacacagcagtgatttctcactggtgaagacggatatggagtcaactgtggataagtggctcgacgtgtctgaaaagcttgaagagaatatggatcgtctgcgggtctcactgtctatttgggatgatgtgttatcaacccgggatgaaatcgagggttggtcaaataattgtgttcctcaaatggcagagaatatctcaaacctcgataaccatctgcgggcagaggagttgctcaaggaattcgaatccgaggtgaagaacaaggctctgcggctcgaagagttacacagcaaggtgaacgacctcaaggagttgaccaaaaacctcgagacaccccctgacctgcagttcattgaggctgacttgatgcaaaaacttgaacacgctaaggagatcacggaagtagccaaaggcactttgaaggattttaccgcccagagtacgcaggtggaaaaattcatcaatgatattaccacctggtttacaaaggtggaggagtcactgatgaactgcgctcagaatgagacatgtgaggcactgaagaaagtaaaggacatccaaaaagaattgcaatcacagcagagcaacattagcagcacacaggagaacctaaatagcctgtgcagaaaataccactccgctgagctggaatctctgggaagagccatgaccgggctgattaaaaagcacgaagctgtgtcccagctgtgtagcaagacccaggcatccctacaggaaagtctggagaagcatttctcggaatctatgcaggagtttcaggagtggttccttggggctaaagccgctgccaaagagagtagtgatcgaacaggcgacagtaaggtgttggaggcgaaattgcacgacttacagaatatcttggattccgtgtctgacggtcagtccaaactcgatgcagtcacccaggaggggcagaccctgtacgcccacttgtccaaacagatagtcagtagcattcaggaacagatcacgaaagctaacgaggagtttcaggcattcctgaagcagtgtctcaaggacaagcaggccctccaagactgcgcttccgaattgggctctttcgaggaccagcaccgcaaactcaacttgtggattcacgagatggaggagcgcttcaacacagaaaacctgggcgagtctaaacaacacattccggagaaaaagaatgaagtgcataaggtagaaatgttcctgggagagctcctggccgctcgcgagtccctggacaaactttcccagaggggccagctgttatccgaggagggccacggcgctggacaggaagggcgtctgtgttcacagttactcaccagccaccaaaacctgctgcggatgactaaagaaaagctgcggagctgccaggtggcattgcaagaacatgaagcacttgaggaggccttacagagcatgtggttctgggtgaaagctattcaggatagacttgcctgcgccgagtccaccttggggtctaaggacacattagagaagcgcctttcacagatccaggatatcctcttaatgaagggcgagggtgaagtcaaattgaacatggctattgggaagggggaacaggccctacggtcctcgaataaagaaggacagcgggtgatccagacccagctcgagacactcaaagaagtttgggccgacatcatgtcgagtagcgtgcacgcacagtcaaccctggagagtgtgatctcacagtggaatgattacgtcgagcggaagaaccagttggaacagtggatggagagcgtagaccagaagattgagcacccactgcaaccacaacccggactcaaggagaagttcgtgcttcttgatcacctgcagtctatcctgtctgaagcggaggaccatacacgagccctgcatcgcctgatcgcgaagagccgagagctgtatgagaagacagaggacgaaagcttcaaagataccgcccaagaagaactcaaaacacagtttaacgatattatgacagtggctaaggagaaaatgcggaaggtcgaggagatcgtcaaggatcacctcatgtatctggatgccgttcacgagtttacggactggctgcactctgcaaaggaggaactgcaccgctggagtgacatgagcggggattcctcggccacacaaaaaaaattgtccaagataaaggaactgattgactcccgcgaaattggagcctcaaggttatctagagtcgagagcctggcacccgaagtgaaacagaatacaactgcatctgggtgtgagctgatgcatacagagatgcaggctttacgcgctgactggaaacagtgggaggattccgtattccagacacagtcttgcctcgagaacttagtgtctcagatggccctaagcgaacaggaattctccgggcaggttgcccagctggaacaggctctggagcagttctcagcgctcttgaagacctgggcacagcagttaacacttctagaaggtaagaacacagacgaagaaatagtagaatgctggcacaagggtcaggaaatcctggacgcactgcagaaagccgaaccaaggactgaggatctgaaatctcagctgaatgaactgtgtcgcttctctagagacctcagcacatattcaggaaaagtcagcgggctcatcaaagagtacaattgcctttgcctccaggcttccaaaggatgccagaacaaggagcagatcctccagcagcgattcaggaaggcttttagagattttcagcaatggctggtaaacgcaaagatcacaacagctaaatgcttcgacatcccccagaacatctccgaggtctccacaagcctgcagaaaattcaggaattcttgtccgagagcgagaatggacagcataaactgaatatgatgctttcgaaaggggagctgctgtccacacttttgactaaggagaaggcaaaagggattcaggctaaggtcactgccgcaaaggaagattggaagaattttcactccaatctgcaccagaaggagtcagcattagagaatcttaaaattcagatgaaggatttcgaggtctctgcggaaccgatccaggactggttgagcaagacagaaaagatggtgcatgaaagtagcaaccgactgtatgacttaccagcaaagaggagagaacagcagaaattgcagagcgttctggaggaaatccattgctatgaacctcagttaaatcggttgaaggagaaagcccagcagctatgggaagggcaagccgcttccaaatcatttaggcaccgggtaagtcaattgtctagccaatatttggcattatccaacctcacaaaagaaaaggtgagtaggctcgataggatcgttgcggagcataatcagttcagtctgggaatcaaggagctgcaggattggatgactgatgccatccacatgctggacagctactgccatcctacgagtgacaaatcagtgctcgattccaggactttaaaactggaggccctgctgagtgttaaacaggaaaaagagatccaaatgaagatgatcgtcacacgcggagaatccgtcctgcaaaatacctctccagagggcattccaactattcagcaacagctccaatcagtaaaagatatgtgggccagcttacttagcgccggaattaggtgtaagagccagctcgagggggcactttctaagtggaccagctatcaggacggcgtgcggcaattttcaggctggatggactcaatggaagcgaacctaaacgaaagcgaaaggcagcacgccgagctgcgagataagacaaccatgctcgggaaggctaagcttctcaatgaagaggtgcttagctattcaagtctcttagagactatcgaggtcaagggggctggcatgacagagcattacgtcactcagcttgagctgcaggacctacaggagagataccgcgctatccaggaaagagcaaaggaggccgttacaaaatccgaaaagctggtgaggttgcaccaagagtatcagcgcgacctcaaagcctttgaagtgtggttgggtcaagagcaagagaaactagaccagtacagcgtactcgaaggtgacgcccatacacatgagacgactctgcgagatctccaggaactgcaggtgcactgcgcagagggccaagccctccttaactcagtgttgcatactcgggaagatgtgatcccaagtgggattccacaagccgaggacagggctttggaatcactgcgccaggactggcaggcctatcagcataggctcagcgagacacgcacccagttcaataatgttgtcaacaagcttcgactgatggagcaaaagtttcagcaggtggatgagtggcttaagacagcggaggaaaaagtaagtccacgcacccgacgacagtcaaatagggctacaaaagagatccagctgcaccaaatgaagaagtggcacgaggaagtcacagcctatagagacgaggtggaagaggtgggcgcacgcgctcaggagatccttgatgaatcccacgtgaacagcagaatggggtgccaggccacacaactgacctcccggtatcaggcactacttctgcaggttctggaacagattaagttcctagaggaagagatccaaagtctggaagagtccgaatcctcactctccagctatagcgattggtatggttccacccataagaatttcaagaacgtcgctacaaagatcgataaggtcgacacagtgatgatgggaaagaaactgaagactctagaggtgctgctgaaagacatggaaaaggggcactcactgcttaagtccgcaagggagaaaggggagagggcagtcaaatacctagaggagggggaagccgagcggctgcgaaaagagatccatgatcacatggagcagctgaaggaactgacatccaccgtgagaaaagagcacatgaccctcgaaaagggcctgcacctcgctaaggagttcagcgacaaatgtaaggctttaacgcagtggattgcagagtaccaggagattctacacgtgcccgaggagcctaagatggaactatatgagaaaaaagcccagttatccaagtacaaatcgcttcagcaaaccgtcttgtcacacgaaccatctgtgaaaagcgtgagagaaaaaggggaggccctgctggaactcgtgcaggatgtcactctcaaagacaaaatcgaccaattgcagtccgattaccaggacctgtgctcgatcgggaaagagcatgttttctccctggaggccaaggtaaaagatcatgaggattataacagcgaactccaggaggtagagaagtggctcctgcagatgtccggtaggctagtggctcctgacctgctggagacatccagtctggagaccataacacaacagctggctcatcataaagcgatgatggaggaaattgctggctttgaagaccgacttaataatctgcagatgaaaggcgataccttaattgggcagtgcgcagaccacctgcaggcgaagttaaagcagaatgttcacgcccatctacagggaaccaaagatagctactcagctatctgcagcacagcccagcgcatgtatcagtctttggagcacgagctgcagaaacacgtatctcgccaggacactttgcaacagtgccaggcctggctctcagccgtgcagccagaccttgaacccagcccccagccccctctgagccgcgcagaggccatcaagcaggtcaagcactttagggccctccaagagcaagcccgaacttaccttgacctcctttgcagcatgtgcgaccttagcaatgcgagcgtgaaaactaccgccaaggacattcagcagacggaacagaccatcgaacagaagttggtccaagcgcagaatctgactcagggatgggaagagataaaacatttgaaatcagagctgtggatttaccttcaggacgcagaccaacaactacagaatatgaaacggaggcattccgaactggaacttaacatagctcagaacatggtctcgcaggtgaaggacttcgtcaagaaactccagtctaaacaggcatctgttaataccattatcgaaaaggtgaataaactcacaaagaaagaggagtcaccagaacacaaggagatcaaccaccttaacgaccagtggctggacctctgtcgccagtccaacaatctgtgtttgcagcgcgaagaagatctccagaggactcgcgactaccacgattgcatgaatgtggtggaagttttcctggagaagttcactaccgaatgggacaatttagctcggtccgatgccgaaagtaccgcagtgcacctcgaagctctgaagaagctcgccctggctctccaggagaggaagtatgccattgaggacctgaaggaccagaagcagaaaatgatcgagcacctcaacctagatgataaagagctcgttaaagagcagacatctcacctggagcagcgctggttccagctggaggaccttatcaagaggaaaatccaggtgtccgttactaacttagaggaattgaatgtggttcaatccagattccaagaattgatggaatgggctgaggagcagcagcctaatattgctgaagctttaaagcaaagtccaccaccagacatggcccagaacctgctaatggaccatttggctatttgctcggaattggaagccaagcagatgctgctgaagtcccttataaaggacgcagaccgagttatggctgacctcgggctcaacgaacggcaggtgatacagaaagccttgtccgatgcacagtctcatgtcaattgtttatccgacctggttggccagcgaaggaaatatctcaataaggcactgtctgaaaagacgcagttcctaatggcggtctttcaggccacctcacagatccagcagcacgaacggaaaatcatgttccgggagcatatttgcctgttaccagacgacgtgtctaagcaggtaaaaacgtgtaaatccgcacaggcgagccttaagacctaccagaacgaggtgactggtctatgggcgcagggtcgggagctgatgaaggaagtgaccgagcaagaaaagtcagaggttctgggaaagctgcaggagctgcaaagcgtgtacgacagcgttcttcaaaagtgttcgcaccggttacaagagctcgaaaagaacctcgtctctcgaaaacactttaaggaggatttcgacaaagcgtgccattggcttaagcaagccgatatcgtgacattccccgaaatcaacctgatgaatgagagtagtgagctccacacacagctggccaagtaccagaatattcttgagcagtctccagagtacgaaaatctgctgctcacccttcagagaactggccaaaccatcctcccttctttgaacgaagttgatcactcatatttgagcgagaaactaaacgcactgcccagacagttcaacgtgattgtggcacttgcaaaggacaagttttacaaagttcaagaagcaattttagccagaaaggagtacgcctcacttatcgaacttacaacacagagcctcagcgagctggaggcacagttcctgagaatgagtaaggttccgaccgatttggcagtcgaggaagcactgagcctacaagacggttgtcgggctatactggacgaagtggccggtctgggcgaggcagtggatgagctaaaccagaagaaagaaggctttcggtccactggccagccttggcagcctgataagatgttacatctcgtgactctttaccacaggcttaaaaggcagacagagcagcgcgtgagtttgctggaggatacaacctccgcttatcaagaacatgagaagatgtgtcagcagctggaacgccagctgaagtccgtcaaagaggagcagtccaaagtcaatgaggaaactctgcctgctgaggagaagcttaagatgtatcatagccttgcaggcagtttgcaggacagcggaattgttttgaagcgcgtaactattcatttggaggatcttgcaccacatttggacccgctcgcttatgaaaaagccagacatcaaatacagagctggcagggtgagctgaaactgctgactagcgcgatcggcgagactgttaccgagtgcgagtcacggatggttcagtcaattgacttccagactgagatgagcaggtctctggactggctgcgaagggtgaaagctgaattgtcgggtcctgtctacctggatctcaatctccaggatatccaggaggaaattcgcaagattcagatccatcaggaagaggtgcaatcttccttacgcattatgaatgcactatcgcacaaagaaaaggaaaagtttaccaaagccaaggaactgatatcagcagatctggaacactccttggcggaactgagtgagctggacggagatattcaggaggccctgaggaccagacaagctacactgaccgagatctactcccagtgccaacggtattaccaggttttccaggctgccaatgactggctcgaggatgcccaggaattgctccagctcgcaggaaatggcctggatgtcgaatccgccgaagaaaaccttaagagtcacatggagtttttttccaccgaagatcagtttcatagtaacttggaggagcttcacagtttggttgctaccctggaccctcttataaagccaactggcaaggaggacttagagcagaaagtagccagcctggagctaagatctcagaggatgtcccgcgactctggtgctcaggtggatctgcttcaacggtgtacggctcagtggcacgattaccagaaggcccgagaagaggtgatcgagctaatgaatgacacggaaaaaaaattatccgaattcagtctccttaaaaccagctccagccatgaggcagaggaaaagttatcagaacataaggctctggtttcggtcgtgaatagcttccatgaaaagattgtggcgttggaagagaaagcctcgcagctggagaagaccggaaacgatgcatccaaagccacacttagccggagcatgaccactgtttggcagagatggacccgcctccgagccgtggcacaggaccaggagaaaatccttgaagatgccgtggatgaatggactggcttcaacaacaaagtgaagaaggccactgagatgatcgatcaactgcaggataagctgcctggaagctccgcagagaaggcctctaaagctgagctcttaacgctgttggaatatcatgacacgtttgtgcttgagctggagcagcaacaatcagccctagggatgttaagacagcagacattgtctatgctgcaggatggggctgctcccactcccggtgaagagcctcccctgatgcaagaaatcaccgccatgcaggatagatgtcttaatatgcaggagaaggtgaaaactaacggcaagcttgttaagcaggagctgaaggacagagagatggtggagacccagattaattctgtgaagtgctgggtccaggagacaaaagaatatttaggaaatccgactatcgagatcgacgcacagcttgaggaacttcagattctgctaacagaagctaccaatcacaggcaaaatatcgagaaaatggccgaggaacagaaagaaaagtatctgggtctgtacacaattctgcccagcgagctatccctgcagctggctgaggttgccctggatctgaagattcgggatcaaatccaggacaagataaaagaggtcgaacaatctaaagcaacttcccaggaactgagtaggcagatacaaaagttggcaaaggacctcactacgattttgacgaagctcaaagccaagactgataacgtggtacaggcgaaaaccgatcagaaggtgctgggcgaagagcttgatggctgtaactcaaagttgatggaactcgatgcagccgtgcagaagtttttagagcagaatgggcaactgggtaaaccccttgcgaaaaaaattggaaaactcacagagcttcaccagcagacaattcgtcaagccgaaaatcggttgtctaaacttaatcaggccgctagtcacctcgaggaatataatgagatgcttgagctaattctcaagtggattgagaaagctaaagtgctggcgcacggaaccatcgcttggaactccgctagccagcttcgcgagcagtacattctccaccaaactctgctggaggagtcaaaggagattgactccgaactcgaagctatgacagaaaaattacagtacttgacgtcagtgtactgtactgaaaagatgtcacagcaggtagccgagctaggccgagagaccgaggagctgaggcagatgatcaaaattcgcttgcagaatcttcaagatgcagcgaaggatatgaagaaatttgaggccgaactgaagaagctgcaggccgctctagaacaggcccaggccactctgacatcaccagaagtgggcagactttcgttgaaggagcaactgtcccatcgccagcatctgcttagtgagatggagtctctgaaaccaaaagtccaagcggtgcagctgtgccagagcgcattgagaatcccggaggacgtggtggcttcactcccactctgccatgccgcattgcgattgcaagaggaggctagtcggctgcagcacaccgcaatacagcagtgtaacatcatgcaagaggcagtcgtgcaatatgaacaatatgagcaggaaatgaagcatctccagcagctcatagagggcgcacaccgggaaattgaggataagcctgtagccactagcaacatccaggaactgcaagctcagatttcaaggcacgaggagttagcccagaagattaaggggtaccaggaacaaatagcctccctgaactcaaagtgcaaaatgctgacgatgaaggccaaacacgcaacaatgctgttaaccgttaccgaggttgaaggtctggcagagggaaccgaggacttagatggagagctgctcccgacccccagtgcacacccctcagtcgttatgatgactgccggtcggtgccacaccctcctcagtccagtgactgaggagagtggagaagagggtacaaattccgagataagcagccctccggcttgtaggtcacccagcccggtggcaaatacggatgcctccgtgaatcaggacattgcatattaccaggctctgagcgccgagcgcctccagacggatgctgcaaagattcacccctccacctccgcaagccaagaattctatgagcccggattggagccaagtgcaacagccaaacttggcgacctgcaaagatcctgggaaacactcaagaatgtgatatccgaaaagcaaagaaccctgtatgaggctcttgagcgtcagcagaagtaccaagatagcttgcagagcatctcaactaaaatggaggccatagagctgaagttaagtgagagccccgaacctggaaggtccccggagagtcaaatggcagagcaccaggcactgatggacgagatcctcatgctgcaggacgaaatcaatgagctccagtcctctcttgcagaggagctcgtttctgaaagctgtgaggctgatcccgctgaacagctggctctgcagtctaccctgaccgtactggctgagcgaatgtcaactatcaggatgaaggccagcgggaagcggcagctgctggaggagaagcttaatgatcagctcgaagaacagagacaagagcaggctctacagcggtaccgatgtgaagcagacgagcttgactcctggctgctctcaaccaaagctaccttggacactgccttgagccctcctaaggaacccatggacatggaagcccagctgatggactgccagaatatgctggtggagattgagcaaaaagttgtagctctgagcgagctttctgtacacaatgagaaccttctcctggagggtaaagctcacacaaaagacgaggctgagcagctggctggcaaactgcggagactgaaggggtcattgctggagcttcaacgcgctttgcacgataaacaattgaacatgcaggggactgctcaggagaaggaagagtctgatgtcgatctgacggccactcaatcacccggtgtacaagagtggctggctcaggcccgaacgacttggactcagcagcgacagtcctccctgcagcagcagaaagagctggaacaggagctggctgaacagaagtcgctcctcaggtcagtggcttcacgaggcgaggaaatacttattcagcactcagccgctgagacatcgggggacgccggagaaaagccagacgtgctttcccaggagctcgggatggagggggagaagagcagcgcagaggatcaaatgagaatgaaatgggagtcccttcaccaggagtttagcacaaaacagaaattattacagaatgtgctggagcaagagcaggagcaggtactgtattcaaggcccaataggctcctttctggcgttcccctgtacaagggggatgtcccgactcaggataaaagtgccgtgacttctttgctcgacggcctgaaccaggccttcgaagaagtctcctcacagtcagggggagctaaacggcagtctattcatttagaacaaaagttgtatgacggggtgtcagcaacttctacttggttggatgatgttgaggaacgcttattcgtggccactgctttgttgcccgaggagaccgagacatgtctgttcaatcaggagattttggctaaagacatcaaagagatgtcagaggagatggataaaaacaaaaacctgttctcccaggctttccctgagaatggagataacagggatgtgattgaggacacacttggctgtttattaggtcgcctcagccttctagactctgtcgtgaaccagcgttgccatcagatgaaagagaggcttcagcagatcctgaactttcagaacgatctcaaagtgttgttcacctcactggctgataacaagtacattatcctgcagaagctggcgaatgtctttgaacagcccgtcgccgagcagattgaggccatccaacaggctgaagacggcttgaaggaattcgacgctggtatcatcgagctgaaaaggaggggggataagctgcaagtggagcagccttctatgcaggagctctcaaaactccaagatatgtacgacgagctgatgatgataattggcagtcggagaagtggattgaatcagaacctcactttgaagagccaatatgaaagggctctgcaggatctggccgacctgctagagaccggccaggaaaagatggcaggagaccagaagatcatcgtcagctccaaggaggagattcagcagttgctggataaacacaaggaatacttccaaggactggagagccatatgatactgacagagacgttattccggaaaattataagctttgccgtgcagaaagagacccagttccataccgagctgatggcacaggcctccgccgtgctgaagagggcgcacaagaggggtgtggagctggagtacattctcgaaacttggtctcatctggacgaagaccagcaggagctgtctaggcagctggaggttgtggaaagtagtatcccctctgtgggcctggtcgaagagaatgaggatcggctaatcgatagaattacactgtaccagcatcttaagagcagtcttaacgaataccagcccaaactctatcaggttctggatgatggaaagagactgctcatttcaatttcctgttccgatttggagtcgcagctcaaccagttgggcgagtgttggctgtccaacaccaacaaaatgtccaaagagttgcacagactggaaaccattctcaaacactggaccagatatcagtctgagagtgccgatcttattcactggttgcagtccgcaaaagacagactggagttttggacacagcaaagcgttaccgtccctcaggaacttgaaatggtgcgggaccatttgaacgcctttctcgaatttagtaaggaagtggacgcacagtccagtttaaagagctccgtcctttctacaggtaaccagcttctcaggctgaaaaaggtggacactgctactctgcgctctgagttgagccggatcgattcccagtggaccgatcttctgaccaatattcccgctgttcaggaaaaactacaccagctgcagatggacaagctaccaagccggcatgcaattagcgaggtgatgagttggatttctctgatggagaatgtgatccaaaaggatgaggataacatcaaaaactctataggatacaaagccattcacgaatacctccagaagtacaagggcttcaagatcgatatcaactgcaagcaactaaccgtcgatttcgtaaatcagtcagtgctgcaaatttctagtcaggatgtggagtccaagcgatcagacaagaccgattttgctgagcagctaggagctatgaacaaaagttggcagattcttcagggtctcgttaccgaaaagatccagctgctcgagggactgctggaaagctggagtgagtacgagaacaatgtccagtgtcttaagacatggttcgaaacccaggagaagcggctgaagcagcaacacagaatcggcgaccaagcctccgtgcagaatgctttaaaggactgccaggatctggaagacctgatcaaggccaaggaaaaagaagtggaaaagattgagcaaaatggactggcactgattcagaacaagaaagaggacgtatcctccattgtcatgagtacactgagggagttgggccaaacttgggcgaatcttgatcacatggtgggccagttaaagattttgttgaaatcagtccttgatcaatggtcctctcataaagtcgcatttgacaaaattaactcatacctgatggaggcaagatattcacttagtagatttaggcttttgacaggatccttggaagcagtgcaggttcaggtggataatctccagaacctgcaggacgaccttgagaaacaagaaaggagccttcagaaattcggttcaatcacaaaccagctcctgaaagaatgccaccctcccgttactgagaccttaaccaatacactgaaagaggtgaacatgcgttggaacaatctcctggaggaaattgccgagcagctacaatcatccaaggctcttctccagctatggcagcggtacaaggactactctaaacaatgtgcatccacagtccagcagcaggaggatcgcacgaacgaactattgaaggcagctactaacaaggatatcgccgacgacgaagtggccacatggattcaggactgcaatgatttactcaagggcttagggaccgtgaaggactcgctgttctttctgcacgagctaggcgagcaactcaaacagcaggtcgatgcatctgctgcgtctgcaattcaatccgaccagctttccttatcacaacacttgtgtgctctggagcaagctctatgtaagcaacagacctcccttcaagccggagtgctggactatgagactttcgctaagtctctcgaagctctggaggcatggatcgttgaggcagaagagattttacagggccaggacccaagccactctagcgatttgtccaccattcaggaacggatggaggaattaaagggacagatgctcaaattctcttctatggcccctgacctagacagattgaatgagttaggctaccgtctccctttgaatgataaagaaattaaacggatgcagaacctgaaccgacactggtccctgatctctagccagactaccgaaagattcagtaaattgcagtcatttctcctccagcatcagacattccttgagaagtgcgaaacttggatggaattccttgtgcagaccgagcaaaagctggccgtcgaaattagtggtaactatcagcatttactggaacaacagagagctcacgaactgtttcaggcagaaatgttctcccgtcagcagattctccactcaattattattgacggacaaagactactcgaacagggccaagtggatgatagggacgagttcaacctgaaactgaccctactgagcaatcaatggcagggcgttattagacgggctcagcagcgcagaggcattattgattcacagatcagacagtggcagcggtaccgggaaatggctgaaaaattgcgcaagtggctggtggaggtcagttatctgcctatgagcgggctgggttctgttcctatcccactgcagcaggctagaactctgtttgatgaagttcaatttaaggagaaagtgtttctgcgacagcaggggagttacattctgacggtcgaggccggtaaacaactcttacttagcgcggatagtggagcggaggccgcactccaggcggaactagcggaaatccaggagaaatggaaatctgcatcaatgcgccttgaggaacagaagaagaagctcgctttcctgctgaaagattgggaaaagtgcgagaaagggattgcggatagccttgaaaaactacggacctttaagaaaaaattgtcacagtctttgcctgatcaccacgaggagctgcacgccgagcaaatgcggtgcaaagagctggagaacgctgtcggctcttggaccgacgacctcacacaactgtcgctgctgaaggacacactttccgcctacattagcgctgatgacatctccattctcaacgaacgcgtggaactgttgcagcgccagtgggaggaactgtgccatcaactctccctgcggcgacagcagataggagagcggttgaacgaatgggcggttttttcagaaaagaacaaagaattgtgtgaatggcttactcagatggagagcaaggttagccagaacggggatatcttgatcgaggagatgattgagaaattaaagaaggattatcaggaggaaatcgccattgcacaggagaacaaaattcagctgcaacagatgggcgagagactcgcaaaggcatctcacgaaagcaaggcctctgaaattgaatataagcttggcaaggtcaatgatcgctggcagcatctcctggaccttatagcagcacgggtgaaaaagctgaaggagacactggtggctgttcaacaactggacaagaatatgtcaagtttgcggacatggctcgcccacatcgagtccgaactggcgaaacccatcgtctacgacagctgtaatagtgaggagatacagcggaagttaaatgagcagcaggagctgcagagagatatcgagaagcatagcactggggtagcctctgttctgaacctgtgtgaagttttacttcacgactgcgatgcatgtgctactgatgcagaatgtgattcaattcagcaggctactagaaatctggacagaaggtggcgaaatatttgtgcgatgagtatggaacgcagacttaaaatcgaggaaacttggcgcttgtggcagaaatttttggatgattattccaggttcgaggactggttgaagtcaagcgagcggaccgccgctttccccagcagctcgggagttatatatacagtggccaaggaagaattgaagaaatttgaagccttccagcgtcaggtccatgaatgtttgacacagttggagctgattaacaaacagtacagacgtctcgctagggaaaaccgcactgatagcgcttgttccctcaaacagatggtgcacgagggcaaccagcgctgggacaacctccagaagagagtaacgtccattcttcggagactcaaacacttcattggtcaacgcgaggagttcgagacagccagggactctattttggtctggctcactgaaatggatctgcagctgactaatattgagcatttctctgagtgtgatgttcaggcaaaaatcaagcagctgaaggcattccaacaggagatctccctgaaccacaacaagatcgagcagatcatcgcccagggtgagcagctgatcgagaaatcggagccattggatgctgcaatcatcgaggaagagctggatgagctccggcgatactgccaagaggtcttcgggagggtggaacgatatcataaaaaattgataaggctccctctccccgatgatgaacacgacttgtccgacagagagcttgagttagaggatagcgccgcactgtccgatctgcattggcacgacaggagtgcagactcccttttgagtccccaacctagtagcaacttgtctcttagcctggcccagccgctgcggtctgaacgatcggggagagacactccagcctccgttgactcaatcccacttgaatgggaccacgactacgatttatctagggatttagaatctgcaatgtccagagcactgcctagcgaagatgaagagggccaggacgataaggatttttatctgcggggagccgtaggcctgagtggtgaccactccgcactggaatcccagattcgccagctcgggaaggctttggacgattctcgctttcagatccagcagactgagaacatcatacgatcgaaaaccccgactggacctgagttggacaccagctataaaggctacatgaagttactgggcgagtgtagctcttcaatagacagcgtgaagcggttggagcacaaactgaaagaagaggaagaatctcttccgggtttcgtgaacttacattccaccgagacacagaccgcaggagttatcgataggtgggaactgcttcaggctcaggcactctccaaagagcttcggatgaagcaaaacctgcaaaaatggcaacaattcaacagcgacttgaactccatctgggcatggctcggcgataccgaagaagagttagaacagctgcagcgtctcgagttgtccactgacatacaaaccattgagttgcagatcaagaaactgaaagagctgcagaaagccgtcgaccaccgcaaggcaataatccttagtatcaacctatgttctcctgaattcacccaagcggatagtaaagagtctagggacctccaggaccgtttaagtcagatgaacgggaggtgggacagagtgtgtagcctgctggaggaatggcggggtctgctgcaggatgccctcatgcagtgtcagggtttccacgagatgtcccatgggctgctcctgatgctggaaaatatcgacagacggaaaaacgaaatcgtgcccattgacagcaatttggacgccgagattctgcaagaccaccataagcagctcatgcagatcaagcacgagctgctggagagccagctccgagtcgcgtctctgcaagatatgtcgtgccaactacttgtgaatgccgagggtaccgattgtttggaggctaaggaaaaggtccacgttattgggaacaggctcaagttactgcttaaggaagtgtcacgacatatcaaggagttggaaaaactgcttgacgtctcttcttctcagcaggatctgtcctcctggagctcagcagacgagctggacacgtctgggtccgtgagccccacctccgggaggtccactccgaatcggcaaaaaacccctcggggtaagtgttccctgtcccaacctgggcctagtgtatcttctccacacagccgtagtacaaaagggggatccgatagcagcttgtctgaacccggaccaggtaggagcggaaggggattcctctttcgcgtgctcagggcagccctccctctgcaattattattgcttttgctgatcggcctcgcctgtttggtaccaatgtcggaggaggattatagctgcgctctgtcgaataacttcgccaggtcgtttcatcccatgctgcgctatactaacggtcctcccccactcta

SEQ ID NO: 242069 - DNA, 26250 bp, synthetic construct
  misc_feature 1..26250: note = Description of Artificial Sequence: Synthetic coding sequence
  source 1..26250: mol_type = other DNA
atggcaacaagtagaggagcatcgcggtgccctcgggatattgccaacgttatgcagcgcctccaagacgagcaagaaattgtgcagaaaagaacattcacgaaatggataaatagtcatctcgccaagcggaagccacccatggtggtggatgatcttttcgaggatatgaaagacggcgtgaagctgttagctttactggaagtccttagtggacagaagctaccatgcgagcagggccgtaggatgaaaaggatccacgctgttgcgaatatcgggacagcactgaagttcttagagggcagaaaatctatgcatcggggtagccccatcaagctcgtgaacattaatagtacagacatcgccgacgggaggccctccatagttctcggtcttatgtggactataattttgtattttcagattgaagagttaacgtctaaccttcctcagctgcagtccctgtctagctccgccagttccgttgattctatcgtgtccagcgaaacaccatcgcctccaagtaaacgtaaggtgactacaaaaatacaaggaaatgcaaaaaaagctctgcttaaatgggtccagtataccgccggaaaacaaaccggcatagaagtaaaagacttcggtaagtcctggaggtccggcgtagcttttcactccgtaattcatgctatccgtcccgagctcgtagacctcgaaaccgtcaaaggcagatctaatagggaaaacttggaggacgcttttaccattgcagaaactgagctgggtattccacggctgctggatcccgaggacgtggatgtggacaagcccgatgagaagtccatcatgacctacgtggctcagttcctcaagcattatcccgatattcacaatgcctccacagacggccaagaggacgacgagatccttcccggatttccgagctttgcaaactcggtgcagaatttcaagcgcgaggatcgcgtgatatttaaagagatgaaagtctggatcgagcaattcgagcgtgatttgacacgcgcacaaatggttgagagtaacctccaagacaagtaccagagctttaagcacttcagggtacagtacgagatgaaacggaagcagatcgagcacctgattcagcctctccacagggatggcaagctgtctctcgatcaggcactggttaaacagtcatgggaccgcgtgacttctagattgttcgactggcacattcagctcgacaagtccctgcctgcacccctgggcacaattggcgcatggctctaccgggcagaggttgccctgcgcgaggaaattactgtccagcaggtgcacgaggagaccgctaacaccatacaacggaagctcgaacagcataaggacctcctgcaaaatacggatgcccacaagagggcgtttcacgagatttatcgaactagaagcgtcaacgggatcccagttcctcctgaccagctggaagatatggccgagagatttcatttcgttagtagtacctccgagctgcaccttatgaagatggaatttttagaactgaaataccgtctccttagcctgttagtgttagccgagtctaagctcaaaagctggatcatcaagtatggccgtagagagtccgttgaacagttgcttcaaaactacgtatcattcatagaaaactcaaaattcttcgagcagtacgaggtgacttaccagattctcaaacagactgcagagatgtatgttaaggctgatggatctgtagaggaggcagagaacgtaatgaagtttatgaacgaaaccacagctcagtggagaaatctgtcagtggaagtgcgtagtgtccggtctatgctggaggaggtgataagcaactgggacaggtatggcaatactgtggcaagtctccaggcatggctggaggatgccgagaaaatgctgaaccagagtgaaaatgccaagaaggatttcttccgcaacctcccacattggatccagcagcataccgcaatgaatgatgctggtaactttctgattgagacgtgtgatgaaatggtgagccgcgacctgaagcagcaactgctgcttcttaatgggcgttggcgcgagctgtttatggaggtgaaacagtatgcgcaggccgatgaaatggacagaatgaaaaaagaatacactgactgtgtcgtaacacttagcgcttttgctactgaagcccacaaaaaattgagcgaacccctcgaagtatctttcatgaacgtcaagttgctcatccaggatctggaagacattgagcagcgtgttccagttatggatgcacaatacaaaatcataacgaagaccgctcacctgattaccaaagaatcaccacaggaggaaggcaaagagatgtttgcaacaatgtccaagctgaaagagcagctcaccaaagttaaggagtgttactccccgctgctatatgaatcacaacaactgttgatcccgctcgaagagttagagaagcagatgacctccttctatgacagcctgggcaagatcaacgagatcattactgtactcgagcgggaggcccaaagcagcgcccttttcaagcagaaacatcaggagctcctggcctgtcaggaaaattgtaaaaaaaccctgacactgattgagaagggtagccagtcagtgcagaagtttgttactttgtccaatgtgttgaagcattttgatcagaccaggctgcagaggcagattgccgatatccatgtggccttccagtccatggtgaagaagacaggggactggaaaaaacacgtggagacaaattctcgactgatgaaaaaatttgaggaaagccgcgctgaattagagaaggtattaaggatcgcgcaagagggcctggaggagaagggagacccggaggaactgttaaggaggcataccgaatttttcagccagctcgatcagagggtccttaatgcatttctcaaggcttgtgacgaactcacagacattctccccgagcaagaacagcagggactccaggaggcggtgagaaagctgcacaagcagtggaaggatctccagggcgaggccccttaccacctgctgcaccttaaaatcgatgtggagaaaaatcggtttctggcttccgtggaagagtgcaggaccgaactcgatcgagagactaaacttatgcctcaagagggatccgaaaaaataattaaggagcaccgggtctttttttcggacaagggtcctcaccacttgtgtgagaagcgtctacagctcattgaggaactgtgtgtgaagttgccagtgcgggatcctgttagggacacacctggcacttgtcatgtcacccttaaagaactccgggcagctattgacagcacatatcggaagctgatggaagatccagataagtggaaagactatacttcgaggtttagcgagtttagcagctggatcagcactaatgagacccagctgaaggggattaaaggcgaagcaatagatacagctaatcacggggaggtcaaacgagccgtcgaagaaataaggaatggcgttacaaagagaggggagactctgtcctggcttaaatcaaggcttaaggtgctgacggaagtgagtagcgagaacgaggctcagaagcagggcgacgagctggccaaattatcctcctcctttaaagccctggtcacacttctatctgaggtcgaaaagatgctgtctaattttggagactgcgttcagtacaaggaaattgttaagaattccctggaggagctgatatccggcagcaaagaggttcaggagcaggctgaaaagattctggacaccgaaaatctcttcgaggctcagcagctcctcctccatcatcaacaaaagactaagaggatttcagcgaaaaaaagagacgttcaacagcagattgctcaggcacagcaaggtgaaggtgggctcccagatcgaggccatgaagagctaagaaaactcgaaagtaccctggacggcctggaaagatcacgcgagagacaggagaggaggattcaggtcacactcagaaagtgggagcggtttgagacgaacaaggaaacagtggtacgatacctttttcagacaggctcttcccacgagagatttttatcttttagttccttggagtcactgtcatccgagcttgaacaaacaaaggaattctcgaaacggactgagtcaatcgctgtgcaggctgagaacctggtgaaagaagccagtgaaatcccgctggggcctcagaacaagcagctcctgcaacagcaagcgaaatcaatcaaggaacaggtgaagaagttagaagacacccttgaggaagacattaaaactatggagatggtgaaaaccaaatgggaccattttggctctaacttcgagaccctgtcagtgtggattacagagaaagagaaggagctaaacgcattagaaacctcctctagcgccatggatatgcagatctctcagattaaagtgaccattcaggagatcgaatccaaactttctagcatcgtggggctagaggaagaggctcagagctttgcgcaattcgtgacaacaggtgaatccgcaaggatcaaggccaaattgacgcagattcgtcgctacggcgaggagcttcgagaacacgcacagtgtctggagggaacaatcctggggcaccttagccagcagcagaaatttgaagagaatctcaggaagatccagcagtccgttagtgaattcgaagataaacttgcagtacctattaagatatgctcatctgccactgagacatataaagtacttcaggaacacatggatctatgccaggctctggagtctctgagcagcgcaattactgccttttccgcctctgcgaggaaggtggtaaaccgtgatagctgcgtccaagaggccgctgccctccagcagcagtatgaggacatcctgcgccgtgcgaaggagaggcagactgctctcgaaaaccttctggcccactggcagcgcctcgaaaaagagctctcctctttcctgacctggctggagcggggagaggctaaggcaagttcccccgaaatggacattagcgcggacagagtaaaagtggagggagaactgcagttgatccaggccttgcagaacgaagtggtgtcccaggcctctttttactcaaaactgttgcagctcaaggagagtctgttttctgtagcttcaaaagacgacgttaaaatgatgaaacttcatctcgagcagctggacgagagatggcgggacctgccccaaatcatcaacaagagaatcaatttcctacaatccgttgtcgcagagcaccagcagttcgatgaactccttttatcattctcagtctggataaagcttttcctctctgagctccagacaacaagcgagatctctatcatggatcatcaggttgcactcacacgtcacaaagaccacgctgctgaagtggaatctaagaaaggcgagctgcaatctctgcagggccatctggccaaattgggctctttaggacgagcagaagacttacacctgctccaggggaaagccgaagactgtttccagttatttgaagaggcgagccaagtcgtggagcggcgtcagctggctctgtctcacttagccgagtttttgcagtcgcacgccagtctttccggtattctgagacagttaagacaaacagtggaggcaaccaattcaatgaataaaaacgagtcagatctgatcgagaaagacttaaacgacgccctccaaaatgctaaggccctggaatcagccgcagtgtccctggacggcatcctttccaaggcccagtaccacttgaaaatcggctcatcagaacagcgaacctcttgcagagccaccgccgatcagctttgcggggaggtcgagcgcattcaaaacctgttggggacaaagcagagcgaggctgatgccttagctgtacttaaaaaagccttccaggatcagaaggaggagctgttgaagagtattgaggacatcgaagagcgcacagacaaagaacgcctaaaggagccaaccagacaggcccttcagcagcgcctgcgcgtgtttaatcagctggaagatgaactcaacagccacgaacacgaactgtgttggctcaaggacaaggccaagcagattgcccagaaggatgtagcttttgctcctgaggtcgacagagaaatcaaccgacttgaggtgacctgggatgatacaaaacgtctaattcatgagaaccagggacaatgttgcgggctcatcgatttgatgcgggaataccagaatctgaagtctgctgtgtccaaagtcctagagaatgccagctccgtgattgtgacccggactacgattaaagatcaggaggatcttaagtgggcgttcagtaaacacgagacagccaaaaacaaaatgaattacaaacagaaggacctggataactttacaagcaaggggaagcatctcctctcagagctgaagaagatccatagttctgattttagcctggtcaaaacagatatggagagcacagttgataagtggcttgatgtgtccgagaagcttgaggagaatatggaccgattgagagtgtccctgtcaatttgggatgacgtcctgagtacgcgcgacgaaatcgaaggctggtcaaacaattgtgtgccacagatggctgaaaacatttctaacctggataatcacctccgcgcagaggagcttttgaaagaattcgaatccgaagtcaaaaataaagcactgcgactcgaggaactccacagcaaggtcaacgacctcaaggaactcaccaagaatttagaaacacctcctgacttacagttcatcgaagcggatctcatgcaaaagctggagcatgccaaggaaatcacagaagtggcaaaggggaccctcaaagacttcaccgcccagtccacccaagtcgaaaagtttattaacgacatcacgacgtggttcacgaaggttgaggaatctttaatgaattgcgcccagaatgagacttgcgaagccctgaagaaggtgaaggacatccaaaaagaactgcagagccaacaatccaatataagctccactcaggaaaacttgaactccctctgtcgtaagtatcacagcgctgagttagagagcctgggaagagcaatgactggcctgatcaagaagcacgaggcggtgtctcagctgtgctccaagactcaagcatccctgcaggagagcctcgagaaacacttcagcgaatcgatgcaggagtttcaggaatggttcctgggtgccaaggccgctgccaaggagagcagcgaccgtactggggactctaaggtgctcgaagccaagctgcacgatctacaaaatattctggacagcgtgtctgatggccagtctaagctggacgcggttacacaagagggtcaaacgctgtacgcccacctctcaaagcagattgtgtcatccattcaggaacagattacaaaggctaacgaagagtttcaggccttcctgaagcagtgcctgaaggacaaacaggccctgcaggactgtgcctctgaactgggtagttttgaggaccagcaccgcaaacttaacctttggattcacgaaatggaagaacgatttaacaccgaaaacctgggcgagtccaagcagcatattcctgagaagaagaacgaagtgcacaaggtggagatgttcctgggcgagcttttagctgcaagagaaagtcttgataagctgtcacaaaggggtcagcttctgagtgaggagggtcacggggctggccaagaagggcgactctgctctcagctgcttacctcccaccaaaacttattacgaatgaccaaagaaaagctgcggagctgtcaggtcgctcttcaggaacatgaggccctggaggaggcgctgcaatcaatgtggttttgggtgaaggctattcaggatcggctggcctgcgctgagtcaacactaggcagcaaggataccctggagaaacgcctcagtcagatccaggatattctattgatgaaaggtgaaggtgaagtgaaactaaacatggcgatcgggaagggggagcaagccctgaggtcctccaacaaagaaggtcaaagagttattcaaacgcagctggagactctcaaggaagtctgggccgacatcatgagctcttccgtgcatgctcagtccactctggaaagcgtcatcagccaatggaatgactacgtcgagagaaaaaatcaactcgagcagtggatggaatccgtggaccagaagatcgagcaccctctccagcctcaacccggactaaaagagaagtttgtccttctggaccatttgcagtccatcttgtcggaggctgaagatcacactagagccctgcatcgactgatcgcaaaatcacgggaactttacgagaaaaccgaagatgagtccttcaaggataccgcgcaggaggaactaaagacccagtttaacgacatcatgactgttgcaaaggagaaaatgcgcaaggttgaggagatcgtaaaagaccacctgatgtatctcgatgcagtgcatgagtttaccgattggctgcacagcgccaaggaagaactgcacagatggtccgacatgtcaggcgactcctcggccacacagaaaaaactgtcgaaaatcaaagagctgattgattccagagagatcggggcaagcaggttgagcagagtggaatccctggcccctgaggtcaaacagaatacaactgcctccggatgtgaactcatgcataccgaaatgcaggcactccgggcagactggaaacaatgggaagacagtgtttttcagactcaaagctgcctggagaatctcgtctctcaaatggctcttagcgagcaggagttttctggccaggttgctcagctagaacaggctctggaacaattctctgccctcctgaagacatgggcacagcagctgaccctcctggaagggaagaacacggatgaggagatcgtggagtgttggcataaaggacaagaaattctagatgctctacaaaaggctgagccccgtacagaggacctcaaaagccagctcaatgaattgtgcagattttcaagagatctgtccacttatagtggtaaggtatccggtctcatcaaggaatataactgcctgtgtttacaggcctcgaaggggtgccagaataaagagcagattctgcaacagcggttccgaaaggcctttcgggacttccagcagtggcttgtgaatgcaaaaattaccaccgcaaaatgttttgatatccctcaaaacatcagcgaagtttcgacgtcattgcagaagatccaggagtttctcagtgagtccgaaaatggacagcataaactgaacatgatgttgtcaaagggggagctgctctcaacgcttttaactaaggagaaggccaaagggatccaagctaaggtaactgccgcaaaagaggattggaaaaacttccacagcaatttacaccagaaggagtctgcactcgaaaatctgaagattcagatgaaggactttgaagtttccgctgagccaatccaggactggctcagcaaaaccgaaaaaatggttcacgagagcagcaatagactctacgacctgcccgcaaagagacgagagcagcagaagctgcaatctgtgctggaggagattcattgctatgaaccccagctcaacaggctgaaggagaaggcccagcagctctgggaaggccaagccgcttctaagtcatttagacatcgggtcagtcaattgtcgtctcagtatctcgcactgagcaacctgacgaaggagaaggtcagcagactggatcgaatcgtggctgagcataaccagttctcattaggcataaaagaactgcaggactggatgacggatgcaattcatatgttagactcttattgtcatcctactagcgacaagtcagtgctggacagcaggactctgaagctggaagcccttctctcggtcaaacaggaaaaagaaattcagatgaagatgattgtgacgcgtggcgagagcgttctccagaacaccagtcccgagggcatcccaacaattcagcagcagctgcaaagcgtaaaagacatgtgggccagcctgctcagcgcaggaattagatgcaaaagccagctggagggcgctctgagcaaatggacgagttaccaggatggcgttcggcaattcagcgggtggatggattctatggaagccaacctgaacgaaagcgaaagacaacacgccgagctcagggacaagacaacaatgcttggtaaagccaaacttctgaatgaagaggttcttagttatagctccctacttgaaacaattgaggtgaagggggctgggatgaccgaacactacgtgacccagttggaattgcaggacctgcaggaacggtacagagctattcaggagcgagctaaagaagcagtcactaagagcgaaaaactggtcaggcttcatcaagagtaccagagggacttgaaagcatttgaagtctggctgggccaggagcaggaaaagctcgaccagtactctgtgctggaaggcgatgcgcacacacacgagacaacccttcgggaccttcaggagctgcaagtacattgcgccgagggccaggccctgctgaacagtgtgcttcataccagagaggacgtcatcccgtcaggaatccctcaggctgaggaccgcgcattggagtccctccggcaggactggcaggcctaccaacaccgtctctccgaaactcgaactcagttcaacaatgtagtgaataaactaagactgatggagcagaagtttcagcaagtggatgaatggcttaaaacagcagaggagaaaaaatggcacgaggaagtcaccgcgtatcgcgatgaggtggaggaagtgggtgccagagctcaggaaatattggacgaatcccacgtgaattcgcgcatggggtgccaggccacgcagctcacaagtcgatatcaagccctgctgctgcaggtgctagaacaaattaagttcctggaggaggaaattcagtccctggaagagtctgaaagctccttgtcttcctattctgactggtacggtagcacacacaaaaactttaagaatgttgccaccaagatagataaagttgacaccgtcatgatgggaaaaaaactgaaaacccttgaggtcctcctgaaggatatggagaaggggcatagcctgctcaagtccgcaagagaaaaaggcgagcgggcagttaaataccttgaggaaggcgaggcggagcggctgcgcaaagaaatccatgaccacatggaacagctgaaggagttgactagcaccgttagaaaagaacacatgacgctggagaagggcctccatttagccaaggagttcagcgataagtgcaaagccctgacccagtggatcgcagagtatcaagagattttgcacgtgcccgaggaacctaagatggagctgtacgaaaagaaagcgcagctctctaaatataaaagtctccagcagacagttctttcgcacgagcctagcgtgaaaagtgttcgcgagaagggagaggctttactagaactcgttcaggacgttactctcaaggacaagattgaccagctacagtccgattatcaggatctctgtagtatcggcaaagccatgatggaagagatcgctgggttcgaggaccgtttgaataatcttcagatgaagggcgacactctgatcggccagtgcgctgaccacctgcaggctaagctgaagcagaacgtgcacgcgcatctgcaggggactaaggatagttatagtgcgatctgtagcaccgcacagaggatgtatcagagtctggaacacgagctgcagaagcacgtatccaggcaggacacgctgcaacagtgtcaagcatggctttcagccgtgcaacctgatttggagcctagcccccagccaccgttgagccgggcagaagctattaaacaagtgaagcactttagagcgctgcaggagcaggccagaacttatcttgacttactctgctccatgtgcgatctgagtaatgcctctgtgaagaccaccgccaaggatatccaacagacagagcagactattgaacaaaagctcgtgcaggcgcagaacttaacacaaggttgggaggagataaagcatttaaagagcgaactgtggatttacttacaggacgctgatcagcaactgcagaacatgaaacgacggcattctgaactcgaacttaacatagcgcagaatatggtttcgcaggttaaagacttcgtgaagaagcttcagtccaaacaagccagtgtgaataccattattgagaaagtgaataagctgactaagaaggaagaaagcccagagcataaggaaatcaatcacctgaacgatcagtggttggatctgtgccgccagagcaacaacctgtgtcttcagagagaggaggatttgcaaaggacgagagattatcatgattgtatgaacgtggttgaggtcttccttgagaagttcacaactgagtgggataacctcgcccgatcggatgccgaaagtactgccgtacacctggaagccttgaaaaagctggcactcgccttacaagagcgcaagtacgcaattgaagatcttaaggaccaaaaacaaaagatgattgagcacctgaacctggacgataaagagctcgtgaaggagcaaacgtctcatttggagcaacgctggttccagctcgaagacctcatcaagcgcaaaatacaggtttctgtgactaacctagaggagcttaatgtcgtccagtcgaggttccaggagctgatggagtgggcagaggaacaacaacccaacatagccgaagcattgaagcaatcaccaccaccagatatggcacaaaatctgcttatggaccaccttgccatctgttccgagttggaggcaaaacagatgctgcttaagagtctcatcaaggacgcggaccgagtcatggcagacttgggacttaatgaacggcaagtgatccagaaggctctgagcgatgcccagtctcacgtgaattgcctgagtgatctggtcggacagcgcagaaagtatcttaataaggccctcagcgaaaagacccagttcctcatggccgtgtttcaggctacgagccaaatccagcagcacgaaagaaagatcatgttccgagagcatatatgtctgttgcccgatgacgtgtccaaacaggttaagacctgtaaaagcgcccaggccagtctgaagacatatcagaatgaagtgaccggactttgggctcaaggcagagaactgatgaaggaagtcactgaacaggaaaagtctgaagtgctgggcaagttgcaggagctccagtccgtgtatgactccgtgctccagaagtgtagccatcgcctgcaggagctggaaaaaaatttggtttcaaggaaacatttcaaagaagattttgataaagcgtgccattggctcaaacaggctgatattgtgacctttcccgagattaatcttatgaacgagagctcagaattgcatacccagctggcgaaatatcaaaatattttggagcagagcccagaatacgagaacttgctcttgacactgcagcgaaccggccagaccatcctgcctagcttgaacgaagtagaccattcctacctgtcagagaagctgaacgcactgcctcggcaatttaacgtgattgtggcactcgccaaagacaagttctataaggtgcaagaagctatcctggcccgtaaggagtacgcatctcttatagagcttaccactcagtctcttagtgaattggaagctcagttcctcaggatgagcaaagtgcccaccgatctcgctgtcgaggaagctctgagtcttcaggatggctgtcgggcaatattagacgaagtggcgggactgggagaggccgtcgatgagttgaatcagaaaaaggaaggattccgctccacgggacaaccatggcagcccgacaaaatgttgcatctggtcaccctataccaccgactgaaacgtcagactgagcaacgggtttcactcctggaggacactacatcggcttatcaggaacacgagaaaatgtgccagcaacttgagagacagctcaagagtgttaaagaggagcagagcaaagtgaacgaggaaaccctgcccgctgaggaaaagctcaaaatgtatcacagtttggccggtagtttgcaagatagcggtatcgtcttgaagcgggtgactatccatttggaggacttggcccctcacctggatcctctggcctacgaaaaggctcgtcatcagatacaaagttggcaaggagaactgaagctgctgaccagtgccataggtgagacagtgactgaatgtgagagccggatggtgcagagcatcgatttccagaccgagatgtccagatcacttgattggctacgtcgcgtgaaagccgagttgtccggccctgtgtatctggacttgaatttgcaggatattcaggaagaaattcggaagatacagatccatcaggaagaagtccagagtagtctgcggatcatgaatgcactgtctcacaaggagaaggaaaagtttacaaaagccaaagaattgattagtgcggacttggaacactcactggcggagctcagcgaactagatggcgacattcaggaggcactgaggaccagacaagccaccctgacagaaatttactcccaatgtcagaggtattaccaggtattccaggcagcaaatgattggctggaagacgcacaggaattactgcaactcgctggaaacggcctggacgtggaaagcgccgaagagaacttgaagagccacatggaattcttttcgaccgaggaccagttccactcgaatctggaggaactccactccctggttgcaacactcgatcccctgatcaaaccaaccggaaaggaggaccttgagcagaaagtggcatcgttggagctgcgttcccaaagaatgtcccgagatagtggggcacaagtggacctacttcagcgttgtactgcacagtggcacgactaccaaaaagccagggaggaagtcatcgagctgatgaacgacaccgaaaagaagttgtcagaattcagtcttcttaaaacctcttcttctcatgaggcagaagagaagctctcagagcacaaagccctagtatcagtcgttaactccttccatgagaagatcgtggccctggaggagaaggcatcacagcttgagaagaccggcaacgatgcctctaaagcaacactcagccgctcaatgaccacggtttggcagcgttggacccgactaagggctgtggcccaggatcaagagaagatcttggaggatgctgtggatgagtggaccggcttcaacaacaaggtcaaaaaggccacagagatgatagatcagctgcaggacaagctgcccggttcttccgctgagaaggcttctaaagccgagctgctcaccctccttgaatatcatgatacattcgtactcgagctcgagcagcagcaatccgccctgggcatgttaagacagcaaactttgtctatgctgcaggatggcgctgctcccactcccggagaggagcctccgctgatgcaggagataacagccatgcaggacaggtgcttgaacatgcaggaaaaagtcaaaacgaatggaaaactggtgaagcaggagctcaaggatcgggagatggtggagactcaaataaatagcgtcaagtgttgggttcaggagaccaaagaatacctgggtaatcccactatagagatcgatgctcaactggaggaactccagatcctgttaaccgaggccacaaatcacagacagaatattgaaaaaatggcggaagagcagaaagagaagtacctgggactctacacaatcctcccttcagagttgtctctgcagctggccgaagtggctctcgatctgaaaattcgcgatcaaattcaggacaaaatcaaggaggtggaacagtccaaggccacatctcaggaactgtccaggcagatccagaaactggccaaggacctcaccacaatacttactaagcttaaagccaagactgacaacgtggtgcaggctaagaccgaccagaaggtgttgggtgaagagctggacgggtgcaactccaagctgatggaattggatgccgctgtgcagaagtttctcgaacagaacggacagctgggaaaacccctggcgaagaagattggaaaactcacagaactgcatcagcagacaattcgccaggcggaaaaccgactgtcaaaacttaaccaggcggcttcccatcttgaagaatacaacgagatgctagaactgatcctgaagtggatagagaaggccaaagtgttggctcatgggaccatcgcctggaatagcgcaagtcaacttcgagagcagtatattctgcaccagactctactagaagaatctaaagagatcgacagcgagctcgaagccatgactgagaagctgcagtatctgacctcagtgtactgcacagaaaagatgagccagcaggtcgctgaactgggcagggaaactgaggagctgaggcagatgattaaaatcagattgcagaacctgcaggatgctgctaaagatatgaagaagttcgaagccgagctaaagaaactgcaggcagcactggaacaggcacaggcgaccctgacatctcccgaagtgggcaggctctctctcaaggaacagctcagccaccgccagcatctactgagcgagatggagtccctgaagccgaaggtgcaggccgtccagctgtgccaatctgctctccggatcccagaagatgtagtggcttcactgcctctatgtcatgcagcgctccgcctgcaggaggaggccagcagactgcagcataccgcgattcaacaatgtaatatcatgcaggcagctgtggtccaatatgagcagtacgaacaggagatgaaacatctgcagcaactgatcgaaggcgctcaccgggaaatcgaggataagcccgtggcaacgtcgaatatccaggagctgcaggcgcagatatcgaggcacgaagaactggcgcagaaaatcaagggctaccaagaacaaatcgcaagcctcaacagcaaatgtaagatgctcaccatgaaggccaaacacgccaccatgctccttactgtcacagaggtggaaggtttagccgaaggcacggaggacctggatggtgagctgctccccacccccagtgcacacccttcagtggtgatgatgacggccggacgatgccacacgctgctgagccctgtgactgaggaatcaggagaagaagggacaaactccgaaatttccagcccacctgcctgccgttccccctcacccgtggccaacaccgatgcaagcgtcaatcaagacatcgcctactaccaggctctcagtgcagagcgcttgcagaccgatgctgccaagatccacccatctacaagcgcgtctcaggagttctacgagcctggcctggagccttccgccactgccaagttaggggacctgcagcggtcttgggaaactctgaaaaacgtgatttctgaaaaacagcgcactctctacgaagccttggaacgccagcaaaaatatcaagacagtcttcagtctatctctaccaagatggaagccatcgaactaaaactttccgaatcccctgaaccgggacgatctcctgagtcccaaatggctgaacaccaagctttgatggatgagatacttatgctccaggacgagattaacgaactgcagtcctcgctggcagaagagctggttagcgagtcttgcgaggcggaccccgctgaacagctggccctgcagtcgacactcacggtgcttgccgagcggatgagcacaatccgcatgaaagcctccgggaagcgccaactgttagaggagaagcttaacgaccagcttgaggagcagagacaagagcaggccttacaacggtaccgatgtgaggccgacgaactggactcttggttattgagcactaaagccacccttgacaccgccttatcacctcctaaggaacctatggacatggaagcacagctcatggattgccaaaacatgctagtcgaaatcgaacaaaaagtggtcgcactctccgagttaagtgtacataatgaaaatctgctactggagggaaaagcccacacaaaggacgaagcagagcagctggccggaaagttacggaggttgaaggggtctctcctggagctgcagcgcgctctacacgataagcagctgaatatgcagggcacagctcaggagaaagaggagagcgatgttgatctaaccgccactcagagccctggcgtccaggaatggctggctcaggcacgcacaacttggacacagcagcgccagtctagcctgcagcagcagaaggagctggaacaagagttagctgagcagaagagcctcctgcggtcggtcgccagtaggggagaagaaatccttatacagcactctgcggctgagacttctggcgacgctggggagaaaccggacgtcctcagtcaggaactaggcatggagggcgagaagtcttctgcggaagatcagatgcgcatgaagtgggaatcgctgcatcaggagttctcaacaaagcagaagttgctacaaaatgtgcttgagcaggaacaggagcaggtcttatacagccggccaaacagactgttatcaggcgtacctctgtacaagggcgatgtacctacgcaggataaaagcgctgtgacttccctgttggacggcttgaaccaggcattcgaggaagtatcatcacaatctggcggtgccaaaagacagagtattcacctggagcagaaattatatgacggggtgagtgcaacctcaacctggctggacgacgtcgaagagcgactgttcgtcgccaccgcacttttgcccgaggagaccgagacctgtctgttcaaccaggaaatcttagccaaagatattaaagagatgtcagaagagatggacaagaacaaaaacctatttagccaggcctttcctgagaacggcgacaaccgtgatgtaatcgaagacactttgggctgtctactgggcagactatccctcctggactccgtggtcaatcagcggtgccatcaaatgaaggaaaggttgcagcagattttgaacttccagaatgacctaaaagttttattcacttccctagctgataacaagtatatcattttgcagaagctggcgaacgtgttcgaacaaccagtggcagagcaaatcgaggctatccaacaggccgaggatgggctgaaagagttcgacgcagggattatcgagctgaagagacgcggagataagctgcaggtcgaacagcccagtatgcaggagctgagcaagctgcaggacatgtacgatgagcttatgatgattatcggatccagaaggtcaggtctgaaccagaacctgacactcaagagccagtacgaaagggctctgcaggacctggcggatctgttagaaactggccaggagaaaatggcaggcgaccagaagattattgtgtcctccaaggaagagatccaacagttactggacaaacacaaagagtattttcaggggctcgagagccacatgattttgactgaaacattatttaggaaaatcatatcttttgcagttcagaaagaaacccagttccacactgagctgatggctcaagcgagcgcggtgctgaaacgtgcacacaaaagaggtgtggagctggaatatatactggaaacatggagtcacctggatgaggaccagcaggagctcagcaggcaactggaagtcgtagagagttccatcccgagcgttgggctggtggaagaaaatgaagataggttgatcgatcgaatcacgctgtaccagcaccttaagtcttctctcaacgagtaccagccaaagctgtatcaggtcttggacgatggaaagagactcctcatcagcatctcatgcagcgacttggaatcccagctgaaccaacttggggaatgttggctgtcgaacaccaataagatgtcaaaggagttgcaccggctcgaaacaatccttaagcactggacccggtaccagagcgagagcgcggacctgatacattggctgcagagtgccaaggatagacttgagttctggacccagcagtccgtcactgtgccccaagaacttgagatggtgcgcgaccacttgaacgcatttttggagtttagcaaggaggtggacgctcaaagctccctgaagagctccgtcctctccacagggaaccagctactacgattgaagaaagtagacactgctaccttacgctctgaactatcccggattgattctcaatggacggacctcctgaccaacatcccagctgtccaggagaagctgcatcagctccagatggacaaattgccaagccgtcatgccatatccgaggtgatgtcctggatatccctgatggaaaatgttatccagaaagatgaggataatatcaaaaacagtatcggttataaggccatccatgagtatctgcagaaatacaaggggtttaagatagatatcaactgcaaacagttaacagtcgacttcgtgaaccagtcagtgctccagatctcaagccaggatgtggagagcaaacgaagcgacaagacagacttcgccgaacagcttggcgctatgaataaaagctggcagattctgcagggcctagtcaccgaaaaaattcagttattagagggactgttagagagctggtccgagtatgagaacaatgtacagtgcctcaaaacctggtttgaaacccaggagaagcggctgaagcaacagcatcgcataggagaccaagcttcagtgcagaacgcactgaaggactgtcaagatctggaggatttaataaaggccaaggagaaggaggtggaaaaaattgaacaaaatggactggcacttatccagaacaagaaggaggatgtgtctagcatcgtcatgagtacacttagagagctgggccagacctgggctaatttggaccacatggtggggcaactgaaaatcctgctgaagagcgtactggaccaatggtctagccacaaggttgcttttgataaaatcaattcttacttgatggaggccagatatagtctgtcaagatttagactactcacaggtagccttgaggccgtgcaggtgcaggtggacaacctccaaaacctgcaagacgatttggaaaaacaggagaggagcctgcaaaaattcggatctataactaatcagctgctcaaagaatgtcatcctcctgttacagaaactctcactaatacactcaaagaggtgaatatgcgctggaacaacttactggaggagatcgccgagcaattacagtcttccaaggccttgctccagttgtggcaacgatacaaggactactccaagcagtgcgcgtctaccgtgcagcaacaagaggaccgcactaacgagttactcaaggctgccacgaataaagacatcgcagacgatgaagtggccacttggattcaggactgcaatgatcttctgaagggactcggaacagtaaaagatagcctttttttcctgcatgagctgggtgagcagttgaaacagcaagtggacgccagcgctgcaagcgcaatacagagtgaccagcttagccttagccagcacctgtgtgccttggagcaggccctatgcaagcaacagacctcactacaggccggagtgcttgattatgaaactttcgcaaagtccctggaagctcttgaggcctggatagttgaggcggaggaaatcctccagggacaggatccttctcattctagcgacctctcaacgattcaggaacgaatggaagaactgaagggccagatgttaaaatttagctctatggctccggacctggacaggcttaatgagttgggctatagactgcccctcaatgataaagaaattaagcgtatgcagaatctaaatcggcattggtctttgatatcttcccagacaacagaacggttctctaaactccagagcttcttgctacaacaccaaacattcctggagaagtgcgaaacatggatggaatttcttgtgcagaccgagcagaaactggctgttgagataagcggcaattaccagcaccttctggagcaacagagggcccacgaactcttccaagcggaaatgttttcccggcagcagattttgcactccattatcatcgacggccagcgattgctagaacaaggccaggtcgacgacagggatgaatttaatctcaaactcactttactctccaatcagtggcagggcgttatcagacgggctcagcagcggcgagggataatcgacagccagattcggcagtggcagagataccgggagatggctgaaaaactaagaaaatggctggttgaggtcagttatctccccatgtctgggctggggtcagtgccaatacctctgcaacaggccaggacattatttgacgaggtgcagttcaaggagaaagtgtttctgcgacagcagggatcctatatcctgacagtggaggccggaaaacagctgctgttgagcgctgacagtggcgctgaagccgctctgcaggctgagctggcagagattcaggagaagtggaagtcagcatctatgaggttggaggaacagaaaaagaaactggcctttctactgaaggactgggaaaagtgtgagaaggggattgccgactcgctggagaagctgagaaccttcaagaaaaagctgtcgcagtccctccccgaccatcatgaagaactgcatgcagagcaaatgcgttgcaaggaactggagaacgccgtgggatcatggacagatgacctaacccaactgtctctgctgaaagacacactttccgcctatatttctgctgatgatatcagcatattgaacgagcgtgtggaactcctgcagcggcaatgggaggaattgtgccatcagttgtccctcagacggcagcagattggcgaacgcttgaacgaatgggccgtattcagtgaaaagaacaaggaactgtgcgaatggctgacacagatggaaagcaaggtgtctcagaacggggacatcttaatagaggagatgatcgaaaaactgaagaaggactaccaagaggagatcgcaattgcacaagagaataaaattcagctccagcagatgggcgaacggctggcgaaagctagtcatgagtctaaggccagcgagatcgagtacaagctcggaaaggtgaatgacagatggcagcatttgctcgatcttattgctgccagggtgaaaaagttaaaggaaacactggttgcagtccagcagctggacaagaatatgagcagcctgcgaacatggctggcccatattgaatcagaacttgcaaagccaatcgtgtatgacagttgtaatagcgaggaaatccagcgcaaactgaacgagcagcaggagttgcagcgggatatcgagaagcactcaacaggggtagcctcagtattgaacctctgcgaggtgttattgcacgactgcgacgcctgtgcaaccgatgccgagtgtgacagtatacagcaggccacgaggaacttggatagaaggtggaggaacatctgtgccatgtcgatggaacgaaggctgaagattgaagagacatggagactgtggcaaaagttcctcgacgattactcccgcttcgaagattggctgaagtccagtgagagaaccgcagcttttccatccagttcaggtgtaatttacaccgtcgcaaaggaagaactaaagaaatttgaggcttttcaacggcaggttcatgaatgtctgactcagctcgaactgattaacaaacagtataggcgccttgcaagggagaataggactgacagcgcctgttctctaaaacaaatggtgcacgaaggcaaccagcgctgggataatctgcagaaacgggtcaccagcatcctgcggagactaaagcattttattggccagagggaagagtttgagactgccagggattctatcctcgtctggctgaccgagatggacctgcagctgaccaacatcgaacacttttcagagtgcgacgtacaagccaagattaagcagttgaaggcatttcagcaggaaatcagcctaaaccataataagatcgagcaaatcatcgcccagggcgaacagcttattgagaagtcagagcctctggatgcagcaataattgaggaagagctagacgagctcagacgctactgccaggaggtcttcgggagggtggagcgttaccacaaaaagctcattcgcttgcccctgccagacgacgaacacgacctgtctgatcgcgagcttgaactggaggatagtgcggcactctcagatctccactggcacgatcgatctgcagatagcctcctctccccacagccgagctcgaacttgagtctcagccttgcacagcccctccggagcgagcggtcaggccgtgatacacccgctagtgtggacagcattcccctcgagtgggaccacgattacgatttgagtcgagaccttgaatccgcaatgtccagggccttgcctagtgaggatgaagaagggcaggatgacaaagacttctatcttcgtggcgcagtgggcctgtctgacgtgatgattcctgaaagcccagaggcgtatgtcaagttaactgagaacgcaataaaaaataccagtggagaccattccgccctggaatctcaaatccggcagcttgggaaagcactcgatgactctcggtttcaaatccaacagactgaaaatatcatacggtccaaaacacccacaggacccgagctcgacacgtcatacaagggctacatgaagctcctgggtgagtgcagttccagtatcgattccgtgaagaggctggaacataagctgaaggaagaagaggaaagcctccccggtttcgttaatctgcattcaactgaaactcaaaccgctggcgtgatagaccggtgggaacttctgcaagctcaggctctgtccaaggagctccgcatgaagcagaacctgcagaaatggcagcagttcaactccgacttgaattccatctgggcctggctgggagatacagaagaggaactggagcaactccaaagactggaactctctactgatatacagactattgagctccagatcaaaaaattaaaggagttgcaaaaagctgttgaccataggaaggccatcatcttgagcattaacctatgctcaccagagttcacccaggccgatagcaaggagtctcgggatcttcaagatcggctgagccaaatgaacggcagatgggatcgcgtgtgctctctgttggaggaatggcgagggttactacaggatgctcttatgcaatgccagggctttcatgaaatgagccacgggctgcttctaatgctggagaatatcgatcggcgaaagaatgagattgtgcctatcgattcaaatctggacgctgagattctccaggaccaccacaaacagctgatgcagatcaaacacgagctgctggaaagccagctccgagtggcaagtttgcaggacatgagctgccagctgcttgtgaacgccgagggtacagactgtctagaggcaaaggagaaggtccacgttatcggaaatcgactcaagttacttctcaaagaagtgtcacggcacataaaagaactggaaaaactacttgatgtttcaagtagccagcaagatctctcatcctggagtagcgcagatgagctcgacacgagcggctccgtctctccaacttccggtagaagcaccccgaacaggcagaaaacgcccagaggaaagtgctcgctctctcagcccggaccctccgtcagttcaccccacagccgatctactaagggaggcagtgattcgagcctctccgaacccggacctggcaggagcggccgagggttcttgtttcgcgtgctgcgcgctgcactccctttacaacttctgttactgctgttaatcggcctggcctgcttagtgcccatgtctgaggaggactatagctgcgcactgtctaataactttgctcgcagctttcatcctatgttgagatacacgaacggtccccctcctctatac

SEQ ID NO: 242070 - DNA, 26249 bp, synthetic construct
  misc_feature 1..26249: note = Description of Artificial Sequence: Synthetic coding sequence
  source 1..26249: mol_type = other DNA
atggccacgtctcgcggagcctcccggtgcccacgagacattgctaacgttatgcagaggctgcaggatgagcaggaaattgttcagaaaaggacgttcacgaagtggattaactctcatttagcgaagcgaaaacctcccatggtggtcgacgacctgttcgaggacatgaaggatggggtcaagctgctggcacttctggaggtgttaagcggccagaaactgccctgtgaacagggtagacgcatgaagcggatccacgcagtggccaacattggtacagccttgaaatttttggagggaagaaagtcaatgcacaggggcagccctattaagctcgtgaacatcaattctaccgacattgccgacgggcgaccttccattgtgctaggtttgatgtggactattatcctgtacttccaaatcgaagaattgacaagcaatttaccccagctccagtccctgtcctcctcagcatcatctgttgacagcatcgtctcgagtgaaaccccctcaccaccctctaagagaaaggtcacgaccaaaattcaggggaatgccaagaaggctttgttaaaatgggtacagtacactgcaggaaaacagacgggaatagaagttaaagattttgggaaatcctggaggagcggcgttgcctttcactccgttatccacgccatcagaccagaactcgtggacttagaaaccgtgaagggtagatcgaaccgtgaaaacctggaagatgcatttacgattgccgaaaccgaactcggaatcccaaggttactggatcctgaagacgtcgacgtggataagcccgatgagaagtccatcatgacttatgtggcccaatttctgaagcactatccagacattcataatgcctctactgacggacaggaggacgatgagatactcccgggattcccttcgtttgcaaattctgtgcagaactttaagagggaagaccgcgtgatctttaaagagatgaaggtgtggattgagcagttcgagagagacctgacgcgggctcagatggtagagtctaaccttcaggacaaatatcagagtttcaagcactttcgcgttcagtatgaaatgaagcgaaaacagatagaacacctgatccagccccttcaccgagacggtaagttatccctggaccaagccttagtgaaacagagttgggacagagttacgagccgcctctttgactggcatatacagctggacaaatcccttccagctcccctgggcacaatcggcgcatggctctatcgcgcagaggtggcgctgcgtgaagagattacagtccagcaggtgcatgaggagacagctaacaccattcagcgtaaactcgagcagcataaggacctgctgcagaatacggatgcccataaacgggcatttcatgagatatatcgcacccgttctgtcaacgggatacctgtccctcccgatcaactggaagacatggccgaacgctttcacttcgtgagtagcaccagtgaactacaccttatgaagatggagtttctggagctcaagtatcgactcctttccctcctcgtgctggcagagtccaaactgaagagctggattattaaatatggaaggagagagtctgttgaacaactgctgcagaattatgtaagttttatcgaaaattctaagttcttcgagcagtacgaagtgacataccagatccttaaacagaccgccgaaatgtatgtgaaggctgacgggagcgttgaggaagctgagaacgtcatgaagtttatgaacgagaccaccgctcaatggaggaacctctcagtggaagtgagatccgtgcggagtatgctggaagaagtgatctcgaattgggacagatacggaaacaccgtagcttcactgcaagcctggctggaggatgccgaaaaaatgctcaatcagagcgaaaatgccaaaaaggacttctttcgaaatctgccccactggatccagcagcacacggctatgaacgatgcaggaaattttttgatcgagacatgcgacgagatggtcagtcgggatttgaagcagcagttgctgctgctcaacggtcgctggcgagaactgttcatggaagtgaagcagtacgcacaggccgacgaaatggacaggatgaaaaaggagtacacagattgcgtggtcaccctgtccgccttcgccaccgaagcccataagaagctttccgagccccttgaagtatcattcatgaacgttaagctgctcatacaggacctcgaggacatcgagcagagggtgcccgtgatggacgcacagtacaagatcatcaccaaaactgcgcacctcatcaccaaagaaagtcctcaggaagagggcaaagagatgttcgcaaccatgtcgaagcttaaggagcaactcacgaaggtgaaggagtgctattctccactgctctacgaaagccagcagctcctgatccccctagaagaactcgagaaacagatgacctcgttttacgatagcctgggaaagattaacgaaatcataacagtgctggagagggaagctcaaagcagcgctctctttaagcaaaaacaccaggagctcttagcatgtcaggagaattgtaaaaagactctgacactaattgaaaagggatctcaaagtgtccagaagttcgtgacactctcaaacgtgctcaagcatttcgaccagacacggcttcagcgccagatagcagatatccatgtcgccttccagtctatggtgaagaaaacgggagattggaagaaacatgtagaaacaaattcccgactcatgaaaaagttcgaggagagtagagccgagctggagaaagtcctgcgcatcgctcaggagggtcttgaagagaagggcgatcccgaggagctcctgaggcggcacactgagtttttttcccaacttgaccagagggtcctaaatgccttcctgaaggcctgcgacgagctaactgacatcttgccagagcaggagcagcagggactgcaggaagcggttcggaaattgcacaaacagtggaaagacctccagggggaggccccttaccacttgcttcatctgaagatcgatgtcgagaaaaacagattcctggcctccgtggaggagtgtagaactgaactcgaccgcgagacaaagcttatgccccaagaaggctcggaaaagattatcaaggaacatcgcgtgttttttagcgataaggggcctcaccatttgtgtgagaagaggcttcagctgatcgaggaactgtgcgtaaagctgcctgtccgtgatcccgtccgcgatacaccaggaacgtgccacgtcactctcaaagaattgcgagccgctattgacagcacttaccggaagcttatggaggaccccgacaagtggaaggactatacctcccgtttcagtgaattcagtagttggatctctaccaatgagactcagctgaagggcatcaaaggagaagcgatagataccgcgaatcacggcgaagtgaaacgcgctgtcgaggaaattaggaacggggtgaccaaaaggggtgaaacattatcttggctcaaatctcgtctgaaagtgctgacagaagtatcttccgaaaacgaggctcaaaagcagggagatgagcttgccaaactgagctccagcttcaaggctctcgtaacgctgctgtctgaagtagagaagatgctatcaaattttggtgattgtgtacagtacaaggagattgtcaaaaacagcttggaagaacttatctccggaagtaaagaagtgcaggagcaagcggaaaaaattctggataccgagaacctattcgaggcacaacaactgctgcttcaccaccaacagaaaactaagcggatctctgccaaaaagagggatgtacagcagcaaatcgcacaggcccagcagggagaggggggtcttccagataggggtcacgaggaactgcggaaactggaaagcaccctggatggcctggagcgttcgagggagaggcaggaacgacgcatacaggtgactctgagaaaatgggagcgttttgaaactaacaaagagacggtcgtaaggtatctgttccagactggaagcagtcatgaacggtttctttcattctccagcttggaatcactcagcagtgaattggaacagaccaaagagttctccaaacgcaccgagagcatcgcggttcaagcagagaacctggtaaaggaggcttcagaaatccctctgggtcctcaaaacaagcaactgctgcagcagcaggccaaatccatcaaggagcaggtcaagaaactggaggacacgctcgaagaggatattaaaactatggagatggtgaagacaaagtgggaccactttggatccaatttcgagacgctgagtgtgtggattacagaaaaggaaaaggaactgaacgcgctggaaacttcctcttccgcgatggatatgcaaatttcccaaatcaaagtgactatacaggagattgagagcaagttgtcgtccatagtgggacttgaggaggaagcacagtccttcgcacaattcgttaccactggggaaagcgccaggataaaggccaagcttacacagattcggcgttacggcgaggagctccgcgagcatgctcagtgcctagaagggacgattctaggacacctttctcagcagcagaagttcgaagagaatctccgcaagatccagcagagtgttagcgagttcgaggacaagctggccgtccccattaagatttgctcttcagcgaccgagacctacaaggtattgcaggaacacatggatctgtgccaggcattggaatccctctcatccgccatcacagcatttagcgctagcgcgagaaaagtcgtcaaccgcgactcgtgcgtgcaggaggccgcagcattacagcagcagtatgaagatatattgcgccgagctaaagagcggcaaaccgctctggaaaatttgctggcacactggcaacgcctggagaaagagctgtcctcctttcttacttggttagaacgtggcgaggccaaagctagtagcccagagatggatatctcggccgacagggtaaaagtcgagggcgaactgcagctgattcaggcaagcagcagaaaatttgttagtcaggcctccttctacagcaagctcttgcagcttaaggagtccctgttttcagtcgcctcgaaagatgacgtgaagatgatgaaattgcacctggagcaactggacgagcgttggagagatttacctcaaatcattaataagaggattaacttcttgcagagcgttgtcgctgagcatcagcagtttgatgagctgcttctgtccttctcagtctggataaaattgttcctgagtgagctacagacgacatcggaaatcagcatcatggatcaccaggtggctctcacccgccacaaagaccatgcagctgaggtggagagcaagaagggagagctccagtctctgcagggacatctggccaagctgggcagtttgggaagggctgaggacttgcacctgttgcaggggaaggcagaggattgtttccaactgtttgaggaggcttctcaggtggtggaacggagacaactcgccctgtcccacttggcggagtttctgcagtcgcacgcctcgctgagcggaattttacggcaattaaggcagactgttgaagccaccaattctatgaacaaaaacgagtctgacttgattgaaaaagatcttaatgatgctttacagaacgcaaaagccctggaatcggctgccgtgtctctcgacgggatcctctctaaggcccaatatcatctgaagatcggcagctctgagcaaagaacaagttgtcgagccactgcagaccagctgtgcggggaagtggagcgcattcagaatttacttggtactaaacaatctgaagccgatgctttagcagtacttaaaaaagctttccaggaccagaaagaagagctgctaaagagcatcgaggacattgaggagcgcactgataaggagaggctcaaggagcccactcgccaggcactgcagcagcgactccgcgtttttaatcagctggaggacgagctgaattcccatgagcacgagctgtgctggctgaaagataaggcaaaacagatcgcccagaaggatgtggcatttgcgccagaggttgacagagaaatcaaccgcctcgaagtaacatgggatgacaccaaaagactgattcacgaaaatcagggccaatgctgtgggctgatcgatctgatgagagagtaccaaaatctcaagtccgctgtctccaaggtgctggagaatgcaagctctgtgatcgtcacgcggacaactattaaggaccaagaagacctgaagtgggccttcagcaagcacgagaccgccaagaataagatgaactacaagcaaaaagacttggataatttcacaagtaaaggaaagcatttgttaagtgaactaaaaaaaatccacagctcagatttttcacttgttaaaactgacatggaatcgaccgtggacaagtggttggatgtcagtgagaagctagaggagaatatggatagactgagagtctcactctctatttgggatgacgtgctgtccacacgggacgaaatagaggggtggagcaacaattgcgtgcctcaaatggcagagaacatatccaatctggacaatcacctccgagcagaggagctgctaaaagaattcgagagcgaggtgaagaacaaggccctgaggctcgaggaactacactcaaaggtaaacgacctcaaggagctgactaagaatctcgagactccacctgacctccagttcatagaagccgaccttatgcaaaagctcgaacacgctaaggagattactgaggtagccaaaggcactttgaaggactttactgcacaaagtacacaggtggagaagttcattaatgacataacaacttggttcacgaaggtggaagagtctctgatgaactgcgcccagaacgaaacgtgcgaagccctcaagaaggtgaaagatatccagaaggagttgcagagtcaacagtccaatataagctctactcaggagaatctcaactctctgtgccggaaatatcacagcgccgagctggagtcactgggaagggcaatgacagggctgataaaaaagcatgaagccgtcagccagctgtgctcaaaaacgcaggcttcactgcaggagagcttggagaagcatttcagtgagagcatgcaagagtttcaggaatggtttctcggggctaaagcagccgctaaggaatcaagcgatcggactggagactctaaagtgttggaggctaaactgcacgatctccaaaacattctggactcggtatctgacggccagagtaaactcgatgcagttacacaggaggggcagactttatatgcccatctgagcaaacagattgtgagctcaattcaggagcagattaccaaggctaatgaagagttccaagcatttcttaagcaatgcttgaaggacaagcaagccctccaagattgtgcttccgaactggggtcctttgaggatcagcacaggaaactcaatctgtggattcatgaaatggaagagcgattcaatacggagaatttaggagaaagcaaacagcacattcctgagaagaaaaatgaagtgcataaagttgagatgttcttaggagagctgttggccgcaagagagtcgctggataagctgagtcaacgtggtcaactactttcagaggaggggcacggtgcgggacaggagggtcgcctctgctcccagctcctcacaagccaccagaacctgctcagaatgactaaggagaaactcaggtcttgccaggtggcactgcaggaacacgaggcactggaggaggctctgcaatcaatgtggttttgggtcaaagctatccaggaccggctggcatgcgccgaaagtactttagggtccaaggatacgctggagaaacgcttatctcaaattcaggacatcctgcttatgaaaggcgagggggaagttaagctgaacatggctattgggaagggagagcaggccctaaggagcagcaacaaggagggtcagcgggttatacagacacagctggaaactctgaaggaagtgtgggcagacataatgtcctcatccgttcacgcacagtctaccttagagtctgtgattagtcagtggaatgactacgtcgagcgcaagaaccagctggagcagtggatggagtcagtggaccaaaagatagagcatcccctgcagccccagcccggtctgaaggagaaattcgtgctgctggatcatctccagtccattttgagcgaagcggaagaccacaccagggccctacaccgattaatcgccaagtctagagagttgtacgagaagacagaagatgaatcctttaaggacactgctcaagaggaactgaaaactcagtttaacgacatcatgaccgtcgcaaaggaaaagatgcgaaaggtggaggaaatcgtgaaagatcacctgatgtacctcgacgctgtacacgagttcactgattggctccatagcgctaaggaagaacttcaccgatggtctgatatgagcggcgatagtagcgccactcagaagaagctgtcgaagataaaagaactgatcgactcccgggaaataggtgcatctagactatccagagttgagtctctggcccctgaggttaagcagaatactaccgcaagcggttgtgagttgatgcacaccgagatgcaagcactgcgcgctgattggaaacagtgggaggactccgtctttcagacacagtcctgcctggaaaatcttgtgagtcagatggcactcagcgaacaagaattttctggccaggtggcccaactcgagcaggcacttgaacagtttagtgccttgctgaaaacatgggcacaacagctcactttactagagggcaagaataccgacgaagaaatcgtggagtgttggcacaaaggacaggaaattctggacgctttacagaaggctgaaccgcgaacggaggatcttaaatcccagctcaacgagctttgcaggtttagccgcgacttgagcacttatagcggaaaagtgagcggcttgataaaggagtataattgcctttgtctgcaggcctcaaaaggttgtcagaataaggagcaaatcttgcagcagaggttccgtaaggccttccgagattttcagcagtggctcgttaacgcaaagatcacaaccgctaagtgcttcgatataccccagaatataagtgaggtgagcacctccctgcaaaaaatccaggagttccttagcgagtccgagaacggtcagcacaaactgaatatgatgttgtccaagggggaactattgtcaaccttattgacaaaagaaaaggccaagggcatacaggccaaggtgactgcggcaaaggaggattggaagaacttccactcaaaccttcaccagaaggaaagtgctctggagaacctcaagattcagatgaaggatttcgaagtgagcgcagagccaatccaggattggctgtccaagaccgagaagatggtccatgaatccagcaacagactttacgatctgcccgctaaaaggcgcgaacagcaaaagctgcaaagcgttctcgaagaaatccactgttatgagccccagctgaatcgtctgaaggaaaaggcccagcagctctgggaaggtcaagccgctagcaaaagttttaggcaccgggtgtcccagctgtcgtctcagtacttggccctgagtaacctgacaaaagaaaaggtgagccggctcgacagaatcgtcgcagagcataatcagttcagtctgggaatcaaagagcttcaggattggatgacagacgcaatccatatgctcgactcttattgtcacccaacctccgacaagtccgtcttagacagccggacgctgaaattggaggccctcctcagcgtcaaacaagagaaggaaatccagatgaagatgattgttacccgtggagaaagcgtgctgcagaacacttctccagaaggaatccccactatacagcaacaattacagtctgttaaggatatgtgggctagtcttttgagtgctgggattagatgcaagtctcagctggaaggagcactgtcaaagtggaccagctaccaggacggtgtgaggcagttctcgggatggatggactccatggaagcaaatctgaacgaatccgagcggcagcacgctgagctccgcgataagacaaccatgctcggaaaagccaagctcctgaatgaagaggtcctgagctactcttctttgctggagaccatcgaggttaagggcgctggcatgacagaacactatgttactcaactggagctacaagatcttcaggagagatacagagctattcaagagcgtgccaaagaggcggtgaccaaatctgagaagctggtgaggctgcaccaggagtaccagagggatctgaaagcctttgaggtgtggttgggacaggagcaggaaaagctggatcagtattccgtcctcgagggggacgcacatactcatgagacaaccctgagggacctccaggaattgcaggtgcattgcgccgaaggccaggccctgcttaacagtgtcctacatacacgggaagatgtgatcccgtctgggatccctcaagccgaagacagggctctggagtccctgcgtcaggattggcaggcatatcagcaccgactgagcgagacccggacccagttcaacaatgtagtgaataaacttcggctgatggaacagaagttccagcaggtggatgaatggctgaagacggctgaagagaaaaaatggcatgaggaggtaactgcctatcgcgacgaggttgaagaagttggagccagggcccaggaaattcttgatgagagccacgtcaactctcgtatgggatgccaggccactcagcttacctccagataccaagccctcttactgcaagtcctggagcagatcaagttcctcgaagaggagatccaatccctggaggaatctgagagctcgctgtccagctattctgactggtacgggagcacacataagaattttaaaaacgtcgcgaccaagatcgacaaagtggatacggtgatgatggggaagaagctaaagaccctggaagtcctgctgaaggatatggagaagggacacagcctgctgaagagcgcgagggagaagggcgagagagcagtgaagtatctggaggagggagaagccgaaaggctccgaaaggagatccacgaccacatggagcagcttaaagagttaacttcaactgttaggaaggagcacatgactctcgagaaaggcttgcacttagctaaagaattctctgataaatgtaaagccctaactcaatggattgctgagtatcaagaaatcctgcatgtcccagaggagcccaaaatggaactttatgagaagaaagcacagctgtccaagtacaaaagcctgcaacagacagtcctgtcgcacgagccttccgtgaaaagcgtacgagagaagggggaggccctgttagagctagtccaggacgtcacgctcaaagacaagattgaccagctgcagtctgattatcaggatctgtgtagcatcggtaaggcaatgatggaggagatagctgggttcgaagatcgactaaacaacttgcagatgaaaggcgacacccttattggacaatgtgccgaccacctgcaggccaaactaaaacagaacgtccacgctcatctccaagggacgaaagattcatattcagccatttgtagcaccgcccagaggatgtaccaatcactagaacacgagctgcagaaacatgtaagtaggcaggacaccttgcaacagtgtcaggcctggctgtctgccgtacagcctgacctggagccgagccctcagccccctttgtcacgggcagaggctatcaaacaagtgaaacacttccgggctcttcaggaacaagccagaacatatctggacttgctttgcagcatgtgcgacctgtcgaacgcttcagtcaagaccacagctaaggacatccaacaaacagaacagacgattgaacagaaactggtccaggcacagaacttgacacaggggtgggaggagatcaagcatctcaagagcgaactgtggatttatttgcaggatgctgatcagcagctgcagaacatgaagcgccgtcactccgaattggagcttaatatcgcccagaacatggtgtctcaggtaaaggatttcgtgaaaaagctgcagagcaaacaagcaagtgtgaacaccataattgagaaagtgaacaaattgaccaagaaagaggagtctcctgagcacaaggagattaaccacctgaacgatcagtggctggacctgtgtcgacagtcaaacaacctgtgcctgcagagagaagaggacctgcagcgcacaagagactaccacgactgtatgaacgttgtggaagtgtttctggaaaagtttacaacggagtgggacaacttggcacggtccgacgccgaatcgacagccgtccatctcgaagcccttaagaaactcgcccttgcccttcaagagcgcaaatacgcaattgaggatctgaaggatcagaagcagaagatgatagaacaccttaatcttgacgacaaggagcttgtgaaggagcaaaccagccacctggagcagagatggttccagctcgaggaccttattaagagaaaaatccaagtgagcgtaaccaatctggaggagctgaacgtggttcaatctcgtttccaggagctgatggagtgggctgaggaacaacagcccaacattgccgaagctctgaaacagtcacctccgcctgatatggcccagaatctgctgatggatcacctagctatctgcagcgagctagaggcaaagcaaatgctgctgaagtccctgataaaggacgcagacagagtgatggccgacctggggctgaacgaacgccaggtgatacagaaggctctgtcagacgcccagagccacgtgaattgtttatccgacctggttggtcagaggcggaagtatcttaataaggcactgtctgaaaagactcagtttttgatggcggtttttcaggcaacatcacagatccagcagcacgagaggaagatcatgtttagggaacacatctgcctgttaccagatgatgtgtccaaacaggtcaaaacgtgtaagagtgcccaggcgtctttaaaaacataccaaaatgaagttacaggcctctgggcccaaggccgtgagctgatgaaagaggtgacagagcaggagaagtccgaagtgttgggcaagctgcaggagctacagtcagtctatgattcagtcttgcagaaatgctcacaccgcctgcaggaattagaaaagaacctggtcagtaggaagcacttcaaagaggactttgacaaagcttgccattggcttaagcaggcagatatcgtgaccttccctgagattaacctgatgaatgagtcatcagagctgcatacgcagttggcaaagtaccagaacattcttgaacagtctcctgagtacgagaacttgctcctgactctgcagaggacgggtcagacaatacttccttccctcaatgaagtcgatcattcatacctgtctgagaagcttaacgcactccctcgtcagttcaatgtgattgtggcactggctaaagataagttctataaggtccaggaagccatcttagccagaaaagagtatgcctctcttatcgagttaaccactcagtcgcttagcgagctggaggctcagttcctgcgaatgagcaaggttcccaccgaccttgccgtggaggaggccctctccttacaggacggctgcagggctatcctagacgaagtagccggattaggcgaagccgtcgatgaactgaaccaaaagaaggagggtttccgatcgaccggacagccatggcagcccgacaagatgctgcaccttgtaaccctctaccatcgattaaagaggcagactgaacaacgggtgtcactgctggaggatacgacttccgcttaccaagaacatgagaagatgtgccaacagcttgagagacagttgaagtccgtgaaggaggaacagagcaaagtcaacgaggaaacactgcccgcagaggagaaactcaagatgtaccattctctggctggaagtttgcaggactctggcatagtcttgaagcgcgtcactattcatctcgaggacctggctccacatctggacccgctagcatatgagaaggcccgtcatcagatccaatcttggcagggggaactgaagctactcacttcagccataggggagaccgttacagagtgcgagtcccggatggtgcagtcgattgatttccagacagagatgagtcgctcgctggactggctccggagagtgaaggccgaactcagtggcccagtctatctcgacttaaacttgcaggacatccaggaggaaatcaggaaaatccaaatccaccaagaggaggtgcagagctctctcagaataatgaacgctctgtctcataaagagaaggagaaatttacaaaggctaaggagctgatcagcgcggacctcgagcattcactggccgagctctcagaattagacggcgacatccaggaagccctgcggactcggcaagctaccttgacagagatttattcccagtgtcaacgatattaccaagttttccaggccgctaatgattggctggaggatgcccaagagctcctgcagctagctggaaacggtttggacgtcgaatcagcagaagaaaatctgaaatcccatatggagttcttctctactgaggatcagtttcatagtaacctggaagaactccattcactggtggctacattggacccactgatcaagccgaccggtaaggaagacctggaacagaaggtggcttcactggagctgcgctctcaacgcatgagcagagatagcggggctcaggttgacctgctgcagagatgcactgcacaatggcacgactaccagaaggctcgcgaagaggtgatcgaactcatgaatgacactgagaagaaattaagcgagttctccttgctgaagacttcttctagccacgaagcagaggagaagctaagtgagcataaagcccttgtaagcgtggtgaacagcttccacgagaaaatagtcgccctggaagaaaaagcctctcaactggagaagactggcaatgacgcatctaaggccaccctgtcacggtctatgaccaccgtatggcagaggtggactcggctgcgggctgtcgcacaagatcaggaaaagatcctggaggatgccgttgacgaatggaccggcttcaacaataaagtgaagaaggcaaccgaaatgattgatcagctacaggacaaactcccaggcagctctgcagagaaggcatcgaaagcggaattactcactctactcgagtatcacgatacgtttgtgcttgagcttgaacagcaacagtccgccctgggaatgctccggcagcagactctttcgatgctccaggatggcgcagctcccacgccaggcgaagagccgccactgatgcaagaaatcactgcaatgcaggatcgctgcctgaacatgcaagaaaaagtgaaaaccaacggaaaactggtcaaacaggagctgaaagaccgggagatggtggagacccagatcaatagcgtgaagtgctgggtgcaggaaacgaaagaatacctcggaaacccaaccatagaaatcgatgcccagcttgaggagttacagatacttctaacagaggcgacaaatcatcgtcagaacattgaaaaaatggctgaagagcaaaaggagaaatacctcggtctgtacacaatcctacctagcgaactttctctacagctggccgaagtggccttggacttgaaaatcagagaccaaatccaggataaaataaaagaggtagagcagtccaaggccaccagccaagagctttctaggcagattcagaaactggctaaggaccttacaaccatccttactaagctgaaggctaagactgataacgtggtacaggccaagacagaccagaaagtgctgggggaggagctggatgggtgcaattccaaactgatggagctcgacgccgctgttcaaaaatttttagagcagaacggccagctgggcaaaccacttgcaaaaaagatcggaaagctcacagaactccaccaacagaccatccggcaggcggagaaccggctcagtaaactgaatcaggccgcttcacacttggaggaatataatgaaatgctggaattaattcttaagtggatagaaaaagctaaggttctagcgcacggcaccatcgcttggaactcagcttcacaactgcgcgagcagtatatacttcaccaaactttgctcgaggaatctaaggaaatcgattctgagctcgaggcgatgacagaaaaactgcagtacctgacaagtgtgtattgcacagagaaaatgagtcagcaggtcgcagaactcgggcgagagacagaggaactgcggcagatgattaagattcggctgcagaatctccaggacgccgctaaagatatgaaaaagttcgaggccgaactgaaaaaattgcaggccgcattagagcaagctcaggctacactgacaagccctgaggtgggcaggttgtctctcaaagaacaactgagccaccggcagcacctactgtccgagatggagtccttgaagcccaaggttcaggccgtgcaactttgtcagagcgcactacgaatcccggaggacgtggttgccagtctgccactgtgccatgctgcgctcagactgcaggaagaggccagtcgcttgcagcacactgctatacaacagtgtaatatcatgcaggccgctgtggtacagtatgagcaatatgaacaggaaatgaaacatcttcagcagctcatagagggcgctcatagagaaatagaagacaaaccagtagcaacctcgaacatccaagagctgcaagcccagatctcacgccacgaagaattggcccaaaagattaagggttaccaggagcagattgcaagtcttaactccaaatgcaagatgctgactatgaaagccaaacacgcaactatgctgctgactgtgacagaggtagaggggttagccgagggcacagaagatctcgacggcgagctgttgcctacaccaagcgcccaccctagcgtcgtcatgatgaccgccggtagatgtcacactcttctatcacctgtgacagaggagtccggcgaggaggggaccaactctgaaatcagcagcccaccggcttgtagaagtcccagcccggtagccaatacagatgcctctgtgaaccaggacattgcatactatcaagctttatctgccgagaggttgcagactgacgcggcaaagatccatccaagcacatcagcctcacaagagttctatgagcctggactggagccaagcgccacagcaaagctgggagacctgcaacgttcatgggagaccctcaagaatgttatcagcgaaaagcaacgtacgctgtacgaggcgctcgaacgtcagcagaaataccaagattctctccagtccatcagcactaagatggaggcaattgaattaaagctgtccgaaagccccgaacctggacggagcccagagagccaaatggccgagcaccaggcacttatggatgagatcctcatgctgcaggacgaaattaatgagctgcagtctagtcttgctgaagagctagtctcagagtcatgtgaggctgaccccgcagaacagctggcattacagtctacccttacagtactcgcagagaggatgtctaccattcggatgaaggcctcaggtaaaaggcagctgctggaggagaaactgaacgatcagttggaggagcaacgacaggagcaagcactgcagcgctaccgatgtgaggccgacgagctagacagctggttgttgagcacaaaggccactttagacactgctctaagtccccctaaggaaccaatggacatggaagcgcaactcatggattgtcagaacatgttggtggagatcgagcaaaaggttgtggcattgtcagaactatccgtccacaatgaaaatctgctgctggagggcaaagcacacactaaggatgaagcggaacagctggcaggaaagttgaggagactgaaggggtctctgctggaactccagcgggctctgcatgacaagcaactcaacatgcaggggacagcacaggagaaggaggaatccgatgtagatttgaccgccacccagagccccggtgttcaggagtggctcgctcaggcacgaaccacttggactcagcagagacagagcagccttcagcagcaaaaagaactggaacaagagctcgccgagcaaaaatccctcctccgcagcgtggcatcccgaggggaggagattctgatacagcactcggccgcagaaactagtggtgacgcaggcgagaagcccgacgtcttatctcaggaattggggatggagggcgaaaagagtagcgccgaagatcagatgagaatgaagtgggagtccctgcatcaagagttttccacaaaacagaagttgcttcaaaacgtcctggaacaggagcaagagcaggttttgtattcgagacccaaccggctgctttccggcgttccgctgtataaaggtgacgtgcctactcaagacaaaagcgctgtgacatctctactggatgggctcaaccaagcctttgaggaggttagttctcaatctggcggtgctaagaggcaatccattcatcttgaacaaaagctatatgacggagttagcgcgaccagtacatggctcgacgacgttgaagagcgactatttgtcgctaccgcattgctgcctgaagagactgagacttgcctatttaaccaagagatccttgccaaagacataaaagagatgtctgaagaaatggacaaaaacaaaaacctgttcagccaggcgttccctgaaaatggtgacaacagggatgtgatcgaggacactcttggatgtcttctgggccgtctgagcctgctggattccgtcgtcaatcaaagatgtcatcagatgaaggagcggctgcagcaaatactgaactttcaaaatgacttgaaggtcttgttcaccagcctcgcagacaacaagtacatcatcttacaaaagctggccaacgttttcgaacagccagtagcggaacagatcgaagccattcagcaggccgaggatggtttgaaagagttcgatgccggtataatcgagctcaagcgtcgaggagacaagctccaggtggaacaaccctcaatgcaggaactcagtaagctgcaggatatgtacgacgaactgatgatgatcatcggaagtcggaggagcggcctgaatcagaacttaactctgaaatcccagtatgaacgggcactgcaagatcttgcagacctcctggagactgggcaggagaagatggctggggatcagaagattattgtgagcagcaaggaagaaatccaacaactactcgataagcataaggaatactttcaggggcttgaaagccatatgatcctgacagaaacacttttcaggaaaattatctcttttgcggtccagaaagaaactcagtttcacaccgagctcatggcgcaagcttcagccgtactgaaacgggctcacaagaggggtgttgagctggagtacatactggagacctggagtcacctcgatgaagaccagcaggaacttagccggcagctggaggtagttgagagcagcattccaagcgtaggcctggtggaggagaacgaggataggctgattgaccgaattaccctataccagcacctgaagagtagtctcaacgaataccagccaaagctttatcaggtgctggacgatggaaaacgactattgattagcatctcctgctctgatcttgaaagccagctcaaccagctcggagagtgctggttaagtaacacaaacaagatgtccaaggaacttcatcgacttgaaacaattctcaagcactggactcggtaccagagtgaaagcgcagatctgattcactggctgcagtccgctaaagaccgacttgaattttggacccagcagtcagtgacggtgcctcaagaactcgaaatggtacgggatcaccttaatgcctttttggaattcagcaaggaagtggacgcccaatcttccctgaagtcctcagtgctgagtacaggaaaccaattacttcggctcaaaaaagtggacacggccaccctgagaagtgagctatcccgaatcgatagccagtggaccgacttgttgaccaacatccctgcggtccaggagaagctgcatcagttgcaaatggataagctgccttcacggcacgctattagtgaggtgatgagttggatttctctgatggagaacgttatccaaaaggacgaggataacattaagaattccattggctacaaagccatccatgaatacttacagaagtataagggattcaaaatcgacattaactgcaagcaacttaccgttgattttgtgaaccagtcagtactacaaatctcaagccaggacgtggagtccaagcgaagtgacaaaactgatttcgcagaacaattaggcgcaatgaataagagttggcagatactgcaggggttggtgacggaaaaaattcagctactcgaagggctcttagagagctggtctgagtacgagaacaatgttcagtgcctgaagacatggtttgagacccaggagaaaagactcaagcaacaacatcgcatcggcgaccaagcttcggtgcagaatgctttgaaggactgccaggaccttgaggacctgatcaaggctaaggagaaggaggtcgaaaaaatcgaacaaaacggcctcgctctgattcaaaataagaaagaagacgtgagtagcatcgttatgtcaaccctgcgggaactcgggcaaacatgggccaacctggatcatatggtgggacaactgaagatcctgctcaaaagtgtgttagaccagtggtctagccataaggtggcatttgacaagataaatagttacctgatggaggctagatattctctgagccggtttcgtcttctaactggctctctcgaggctgtgcaggttcaagtggacaatctgcagaacctccaggacgacctcgagaaacaagagcgaagcttgcaaaagttcggaagcataaccaatcaactgcttaaagaatgtcacccccctgtgacagaaacactgacaaacacgctgaaagaagtaaatatgcgctggaacaatctgctagaagagattgccgagcagctgcaaagttcgaaagcactcctgcagctgtggcagcggtacaaggactacagtaaacaatgtgctagcaccgtgcagcaacaagaggatagaacaaatgagttgctcaaagcggctacaaacaaggatatcgctgatgatgaggtcgccacttggatccaggattgcaacgatctgcttaagggactagggactgtgaaagattcactgttcttcctccacgaactcggtgaacagctgaagcagcaggtggacgcttccgccgcaagtgcgatccaaagcgaccagctttccctcagtcagcacttgtgcgccctcgagcaagctctttgtaagcagcagaccagcctacaggctggggtgctggactacgaaacattcgctaaaagcctggaagcccttgaggcttggattgttgaggctgaggaaatcctgcagggccaggaccccagccatagtagcgatctatcaacaattcaggagcgtatggaggagctgaaagggcaaatgctgaagttctcaagcatggcacccgacctggacaggcttaacgagctggggtaccgcctgcccctgaatgataaggagataaaacggatgcaaaatttaaaccggcattggtcactgatttcttcgcagaccaccgagcgcttttccaaacttcagtctttcttgcttcagcaccagacatttcttgaaaaatgcgaaacatggatggagttcctggtgcaaaccgagcagaaactggccgttgagatcagcgggaattaccaacacctacttgagcagcagcgggctcacgaactctttcaggccgagatgttctcccgccagcaaatcttgcattcgataattattgatggtcagcggctgcttgagcagggccaggtggacgatcgcgatgaattcaatctgaagttgactcttttgagcaatcaatggcaaggagtgatccggcgagcacaacagaggcgtggcattatcgatagccagatccgacagtggcagagatatcgggagatggccgagaagctacggaagtggttggttgaagtgtcatacctccccatgtcaggactcggctccgtacccattccactccagcaggcacgcactttatttgatgaggtccagttcaaggagaaggttttcctccgtcagcagggatcttatatcttaactgtggaagcgggtaagcaattgttattgtctgccgattccggggctgaggcggctctgcaggcggagctggctgaaattcaggaaaagtggaaatcggcctcaatgcgactcgaggagcagaaaaagaagctggcattccttcttaaagattgggagaaatgcgagaagggcattgctgacagcctagaaaagctgagaacctttaaaaaaaaactgagccagtccctccccgatcaccacgaggaactgcacgcagagcagatgcggtgtaaggagctggagaacgcagtgggtagctggactgatgacctgacacagctgagcctgctgaaggacacactttctgcttatattagtgcagacgatatctctattctgaacgagcgggtggagctgctacagaggcagtgggaggagctgtgccatcaactgtcacttaggcggcagcaaattggagaaagattgaatgagtgggcggtattctctgaaaaaaacaaggaactctgcgagtggctgacccagatggaatctaaggtctcacagaacggcgacatcctaatagaggagatgattgagaagctgaaaaaagattatcaggaggaaatcgcaattgcccaggaaaataagattcagctccagcagatgggcgaaaggctagcgaaggcatcccatgagtctaaggcctccgaaattgagtacaagttgggcaaggttaatgatcggtggcagcacctgctggacctgatcgcagctcgcgtgaaaaaactcaaagaaacgctggttgcggtccagcagctagacaagaatatgtcttccctgcggacctggttggcccacattgaaagtgagcttgctaaacctatcgtttatgacagttgcaatagcgaggagattcaaagaaagttaaacgaacagcaggaactccagagagacattgaaaagcattcaaccggtgtggcctctgtgcttaacctgtgcgaagtattactgcatgactgcgatgcctgtgctactgacgcggaatgtgacagtatacaacaagcaacccgaaatctggatcgacgttggcgcaatatctgcgctatgtccatggagcggagactgaaaattgaggagacatggaggctgtggcagaagtttctcgatgactatagccggtttgaggactggctgaaatctagtgaacgcaccgcggcatttccaagcagtagtggggtcatttacaccgtggctaaggaagaacttaagaaatttgaggccttccagcgccaggtccacgagtgcctgacacagttagaactcatcaataagcagtacaggcgtcttgctcgcgaaaaccgaacagactccgcttgcagtctgaaacagatggttcacgagggcaaccagagatgggataatctgcagaagagagttacaagcattctcagaaggcttaagcatttcatcggacagcgagaagagttcgaaaccgcccgagactccatactggtttggcttaccgaaatggacttgcaacttacgaatattgagcacttcagtgagtgcgatgttcaagcgaaaattaaacagctgaaggccttccagcaggagatttccttgaatcataataagatcgagcagatcattgctcagggagagcagctgatcgagaaatccgagccactggatgctgcaatcatagaagaagagctggatgagctgaggcgttactgccaggaggtgtttgggagggtcgagaggtatcacaagaaacttattcggttgcctctgcctgatgacgagcatgatctgtccgatcgcgagttagagctggaagatagcgccgcacttagtgatcttcattggcatgacaggagtgccgattctctgctgtcacctcagccgagctccaacctctcactctctctggcccaacctctgagatcagaacgctcaggtcgagatacacccgctagcgttgacagcatcccattggaatgggatcacgattacgacctaagccgcgacctggagagtgccatgtctagggctctgccaagcgaggacgaagagggacaagacgataaagacttttacctgaggggcgcagtgggacttagcgacgtgatgattccagagtctccagaagcctacgtcaaactaactgagaatgccattaagaacacaagtggggatcatagtgccctggaaagccagattagacagcttggaaaggccctggatgattccagattccagatccagcaaaccgaaaatattatccgctctaagaccccaaccggacctgaacttgatacctcatataagggctatatgaaacttctgggcgagtgcagtagttccatcgattctgtgaaacgactggaacacaagttgaaggaggaggaggaaagccttccaggctttgtaaacctacatagcaccgaaacccagacagccggtgtgatcgatcgctgggaactccttcaggctcaggccttaagtaaggagcttcggatgaagcaaaacttgcaaaagtggcagcagtttaacagcgacctgaattccatttgggcctggttaggtgacaccgaagaggaactcgaacagcttcagcgcctcgaactctccacagatatccaaactatcgaactgcagatcaagaagctgaaggaactgcagaaagcagtggaccacagaaaagctattatactaagcatcaacctttgttcaccagaatttacacaggccgattccaaggagtctagagatcttcaggaccgattgtcccagatgaatggtcggtgggatcgagtctgctccctgctggaagagtggagaggtcttctgcaagacgcactgatgcagtgtcaaggatttcacgagatgtctcacggcttactgttgatgctggaaaacattgaccgcagaaaaaacgaaatcgtgccaattgactcaaacttggacgctgaaattctgcaggatcaccacaagcaactgatgcagatcaaacatgaactcctcgaaagtcaactgcgggtggccagcctgcaggatatgtcctgccagctcctggtgaacgcagaggggacagattgcttggaggctaaggagaaggtccatgtgataggtaacaggcttaaactgcttctgaaggaagtgtcaagacacatcaaggaactagagaagcttctggatgtgtcttccagtcagcaggacctgagctcctggagtagcgctgacgagctcgacacttccggctctgtcagcccaacttcgggtcgttcaacgccgaataggcagaaaacacctagaggtaaatgtagcctgtcccagcccggtccttctgtgtcatcgccacatagcaggagcacaaaaggtggcagcgactctagtctgtctgaacccggtcctggacgctccggtagaggattcctgtttcgagtgctacgagccgctttaccattgcagcttctgctcctgctgttgattggcctcgcttgtctggtgcccatgagcgaagaggactattcttgtgctctgtcaaacaacttcgcacgttcattccaccctatgctgcgatatacaaacggcccaccgccacttta

SEQ ID NO: 242071 - DNA, 2859 bp, synthetic construct
  misc_feature 1..2859: note = Description of Artificial Sequence: Synthetic coding sequence
  source 1..2859: mol_type = other DNA
atggtggtcgctgaggatctgtcggcactcaggatggccgaagattcctgtgtcgacgccgacctccccgactgcaattgcgatgttaccagagtgaagaagctgaaagagacactggtcgctgtccagcagctggataagaacatgtcctccctgcgaacctggttagctcatatcgaatccgagctagctaaaccaatagtttatgactcctgtaactcagaggagatacagcggaagctgaatgagcagcaggaactgcaacgggacatagagaagcattctacaggggtggcatctgtgctgaacctgtgtgaagtgctgctgcatgactgcgacgcttgtgcgaccgatgctgagtgtgacagcatccagcaggcaacccgaaatctcgacaggcggtggcgcaatatttgcgctatgtcaatggaacggaggctcaagattgaagaaacctggcgactttggcagaagttcctggatgattactcgcggtttgaagattggctaaagagcagtgaaagaaccgctgccttcccctcctccagcggagttatatacactgtggccaaagaagagctgaagaaattcgaagcctttcaacgacaggtgcatgaatgtcttactcagctggagctgatcaacaaacaataccgccgactggctagagaaaatcgcacagattccgcctgtagtttgaagcagatggtacacgaaggcaatcagcgttgggacaatctgcagaaaagggtgacatcgatactcagacgcctgaaacattttatcgggcagagagaggaattcgagacagcaagagactcaattctggtgtggctgaccgagatggatctgcagctcactaatattgaacatttctcagagtgtgatgtgcaggcaaaaatcaagcaactcaaggcatttcagcaagagatcagcctaaatcataataagattgaacagattatagcgcagggcgaacagctgatcgagaaaagcgaaccgctagacgcggctatcatcgaagaggaactggatgaactgcggagatactgtcaagaggtttttgggagagttgagcgctatcacaagaagctgatcagactcccactcccagatgatgagcatgatctcagcgatagggagcttgagctcgaagactcggccgcactctcagatcttcattggcacgatcggagtgctgattccctcctaagcccccaaccctcttctaatctgtcgctgtccctggcccagccacttcgctccgaacgatctggacgagatacccccgctagtgtcgacagcattcccttggaatgggatcacgattatgacctgagccgtgatcttgaaagtgccatgagtcgcgctctaccatctgaggacgaggaaggccaggacgataaggatttctacctgaggggagctgtggggctatctggtgatcactccgcgttggagtcacagattcggcagctcggtaaggctctggatgatagccgattccagatccagcagacagagaatataatccggagcaagacaccaacgggtccagaactggatacctcctataagggttatatgaaattactgggtgagtgttcatcctcaatagattccgtaaaaagacttgagcataaattaaaggaggaggaggaatctctgccaggattcgtgaatctccacagcaccgaaacacaaaccgccggtgttatagatcgctgggagctgctccaggctcaggctctgagcaaggaactgagaatgaaacagaatctccagaaatggcagcagtttaacagtgatctgaacagtatctgggcatggttaggcgacaccgaggaagaactcgagcagcttcagcgccttgagttatctaccgatattcaaaccatagagctacagataaagaaattaaaagagctccagaaagccgttgatcaccgcaaggcaataatcttgtctattaacctttgctctccagaatttacccaagcggacagcaaagagtcacgagacttacaggatagactttctcagatgaacgggcgatgggacagagtgtgctctttgcttgaggagtggagaggcctattacaagacgcactaatgcagtgccagggtttccacgaaatgtcacacggtttgctgctcatgttggagaacatcgatcggcgtaaaaatgaaatcgtcccaattgacagcaacttggatgcagaaattctacaagatcatcacaaacagctcatgcagataaagcacgagttgctggagtcacagttgagggtagctagtttgcaagacatgtcttgtcaactactggtcaatgctgagggaacagactgcctcgaagcaaaagaaaaggtgcacgtgataggcaacagactgaaactgctgctgaaagaggtgtcccggcatatcaaagagttagagaaacttctggatgtaagttcctcccagcaggacttatcatcctggtcttcagcggatgaactcgatacctcaggctccgttagtcccacatccggcagaagcactcccaatcgacaaaaaacaccaaggggcaagtgctctctgagccagcctggtccctcagttagtagcccgcactcacgcagcacaaaaggtggcagcgactcttccttatcagaaccaggccctggtagaagcggtcgtggattcttgttccgggtattgcgcgctgcactccctctgcagctcctactcctgctcttaattggattggcctgccttgttccaatgagcgaagaggattacagctgcgctttatctaacaattttgccaggagcttccatccaatgcttagatacaccaacggacctccccctctgtag

SEQ ID NO: 242072 - DNA, 20474 bp, synthetic construct
  misc_feature 1..20474: note = Description of Artificial Sequence: Synthetic coding sequence
  source 1..20474: mol_type = other DNA
atggcttcatctcccgagctgcctactgaagacgagcaaggcagctggggcatcgacgatctgcacattagtctacaggctgagcaagaagacacacagaaaaaagcttttacctgctggattaattcccaactggcacgccacacctccccgagcgtaatatcagatctcttcactgacatcaagaaaggccatgttctgcttgaccttctagaagtgttatcaggccagcagctccctcgtgacaagggttccaacacgttccaatgccgaattaacattgagcacgccctaactttcctaaggaaccggagcatcaaactgataaacatacatgtgacggatatcatcgacgggaatcctagcatcatcttaggtttaatctggactatcatcctccacttccacattgaaaaactggctcagactctctcttgcaactataaccagccgagcctggacgatgttagcgttgtggacagttctcccgcaagcagcccaccagccaagaaatgctctaaagtccaagccaggtggcaaatgagtgccagaaaggccctgcttctctgggcccaagaacaatgcgccacctacgaatccgtgaacgtgaccgacttcaagtctagctggcgcaatgggatggctttcctggcaattatccacgccctcaggcctgacctgattgacatgaagtctgtgaagcaccgttcaaacaaggacaacctccgcgaagcctttcgcatcgctgagcaggagcttaaaattcctagactgttagaaccggaagacgttgatgtggtggatcccgatgagaaaagcatcatgacgtatgttgctcagtttctacagtatagcaaagacgctccaggaacaggcgaagaagcccaggggaaagtcaaggatgccatgggatggctcacactgcaaaaagagaaactccagaagcttctgaaagactccgagaacgacacatacttcaaaaagtacaacagcctgttgtcattcatggagtcttttaacgaagaaaaaaagagctttctggacgtgctcagtattaaaagggacttagatgagttggataaggaccatctacaactgagagaggcatgggacggcctcgatcaccagataaacgcgtggaaaatcaagctaaattacgcattaccgcctccactgcatcagaccgaggcttggcttcaggaagttgaagaattgatggatgaagatcttagtgcttcacaggaccactcccaagcagtgaccttgatacaagagaagatgactctcttcaaaagtttgatggatcggtttgagcaccatagtaatatcctgttaacatttgagaacaaggacgaaaaccatcttccgttggttccgccaaacaaacttgaggagatgaagcgccgaattaacaatattcttgaaaaaaagtttattctgcttctcgagttccactactataaatgcttagtgctgggccttgtggatgaggtgaagagcaaactggacatctggaatataaaatatggatcgcgtgagtctgtggagcttttgcttgaagactggcacaagtttatcgaagaaaaggaatttttagctcgtctggacacatcattccagaagtgcggcgagatttacaaaaacctcgccggtgaatgtcaaaatatcaacaaacagtacatgatggtcaaatccgatgtgtgtatgtacagaaaaaatatatacaatgtgaaatcaactctgcagaaagtgctcgcctgctgggcgacttacgtggagaatctgaggcttctgagagcatgctttgaagagaccaaaaaggaggagatcaaggaggtgccgtttgaaaccctggcacagtggaacctggaacacgccacactcaacgaagcagggaatttcttagttgaggtctcaaacgacgtcgttggttcctctatatccaaagagctgagaaggttgaacaagaggtggaggaagctagtttctaaaactcagctggagatgaacctgccactgatgatcaaaaagcaggaccagcccactttcgacaattcaggcaatatattgtctaaagaggagaaggctacagtggaattctcaacagatatgagcgtggagctccctgagaattataaccagaacatcaaggctggggaaaaacatgagaaggagaatgaggaatttacaggccagctgaaggtggccaaagatgtggagaagctgattgggcaggtagagatctgggaagccgaggctaaaagcgttttggaccaagacgatgtcgatactagtatggaagagtccctgaagcacctcatagccaaaggaagtatgtttgatgagctgatggctcggagcgaggatatgttacagatggacatccaaaatatttcctcacaggagagcttccagcacgtcctgactacaggactgcaggctaagatacaagaggccaaggagaaggttcagattaatgtggttaaactcattgcagcactgaagaatctcaccgatgtgtcccctgatcttgacattaggctaaagatggaagaatcacagaaggaactggagtcctatatgatgcgcgctcaacagttgttgggccagcgggaaagccctggcgagctaataagcaagcacaaggaggccctcattatcagcaacacaaagagtctggctaagtacttgaaagccgtcgaggagctgaaaaataatgttacagaggatattaagatgtctttagaggagaagtccagagacgtctgtgcaaagtgggaaagtctgcaccacgagctctctctgtacgtacagcaactgaagattgacatagaaaagggaaagctttcggataacattttgaagctggagaagcagatcaataaggaaaaaaaattgattagacgcggacggaccaaaggactgatcaaggagcacgaggcttgcttctcagaggaaggctgcctatatcagctgaaccaccatatggaggtcctcagagagctctgtgaggagcttcccagtcaaaagagtcagcaggaagtaaaaagactgcttaaagactacgaacaaaagattgagcgcttgcttaagtgcgcttcagagattcacatgaccttacagcccacagccggtggaactagcaaaaatgaagggactatcacaacctcggagaaccgagggggagaccctcattccgaggccccttttgctaagtcagacaaccagccctctacagagaaggccatggagcctactatgaaatttagcctcgcttctgtgctgcgccctttgcaagaggagtccatcatggaaaaagattactcggctagcatcaactctctgttggaaaggtacgacacataccgcgatatactcgagcatcacttacaaaacaataagttccgcattacaagtgacttcagctccgaggaggatcggtctagtagctgcttgcaggccaagttgacggacctccaggttattaaaaacgaaaccgacgctagatggaaggaattcgaaatcatcagccttaagctggagaaccatgttaatgatatcaagaaaccatttgtaatcaaggagagagatacccttaaggaacgggagcgggaactgcagatgacgctcaacacacgtatggagtcgctggagaccgcactgcggttagtattgcctgtagagaaagcgtccctgctgctttgcgggagcgatctgcccctgcacaagatggctatccaggggtttcatcttattgatgctgatagaatttatcaacaccttcgcaacattcaggactccatcgctaagcagatagaaatctgcaaccggctggaagagcctggtaattttgtcctgaaggaacttcacccctttgatctccacgctatgcaaaatattatcctgaagtataaaacacagttcgagggcatgaaccaccgcgtccagaggtctgaggatactctcaaggcacttgaggattttctggcgagcctccgcacagccaaacttagtgctgagcccgtgacagacctgagcgcctctgacacccaggttgcccaggagaacacactgaccgtaaagaataaggaaggagaaatacacctgatgaaagataaagcaaagcacctagataaatgtctgaaaatgttagatatgtcattcaaagacgcagaaaggggagacgatacatcttgcgagaatctacttgacgccttctccatcaaacttagcgagacccatggctacggggttcaagaggagttcacagaagaaaataagctgctggaggcttgcatctttaaaaataatgaactgctgaagaacatacaggacgtgcaatcacagatcagcaaaatcggcttgaaggaccccactgtacctgccgttaagcaccgaaaaaagtctcttatccggctggataaagttctcgacgagtacgaagaggagaagcgtcacttacaggagatggctaactctctgcctcacttcaaagatgggcgagagaagaccgtgaatcagcaatgccagaacaccgtcgtactgtgggagaacacgaaggctttagtgaccgagtgcctcgaacagtgtggcagggtactggagctgctgaagcagtaccagaatttcaaatctattttgactacactgattcagaaggaggagtccgtcatctccctgcaggcctcatatatgggcaaagaaaatctgaagaagcggatcgccgagattgaaatcgttaaagaggagttcaacgagcatctcgaagtggtggataaaataaaccaagtctgcaaaaatctgcagttctatctcaacaagatgaaaaccttcgaggaacctccgttcgaaaaagaagcaaatattatcgttgatcggtggctggatatcaacgaaaaaactgaggactactatgaaaatctgggccgagctctggcgctgtgggataagctgttcaacctcaagaatgttatcgacgagtggacagagaaggcccttcaaaagatggaactccatcaacttaccgaagaggacagggagagactcaaagaagagcttcaagtccatgaacaaaaaacttctgagttctcacgcagggtcgctgagatccagttcctgttgcagagtagcgaaatacccttggaactgcaagtgatggagtctagcatcctaaataagatggagcatgtccagaaatgtctcaccggcgagagtaattgtcatgccctgtctggctcaaccgccgaactgagggaggaccttgatcaagcaaaaacccagatcgggatgaccgagagcctcttaaaagccctgagcccttccgactcattggaaattttcactaagctggaggagattcagcagcagatactgcagcaaaagcactccatgatcctgctagagaatcagatcggctgtttgaccccagagctgagtgaactgaaaaagcagtacgaatctgtgtcagacctgttcaacactaaaaaaagtgtgctgcaagatcactttagcaagcttctgaacgaccagtgtaaaaattttaacgactggtttagtaacatcaaggtcaacctgaaagagtgcttcgagtcgagcgaaacgaagaaatccgtggagcaaaaactacagaagctcagcgatttcctcacgcttgaagggcgaaactccaaaataaaacaggtggactccgtgcttaagcacgtcaaaaagcaccttccaaaggctcacgtaaaggaactgatcagttggttagtcggccaagaattcgagctcgagaagatggagtcaatttgccaggccagagctaaggagttggaagattccctgcagcaattattgcgcctgcaggatgaccaccgtaatcttcgcaagtggctgaccaaccaggaggaaaagtggaagggcatggaggaaccgggagagaagacagagctattctgtcaggcccttgccagaaaaagagagcagttcgaatcagttgcccagctcaacaatagtctcaaagaatatgggttcactgaagaagaggagatcattatggaggctacttgtctgatggacaggtatcagacccttcttagacaactaagcgaaatcgaggaggaagacaagctcctgcctaccgaggaccagagcttcaatgatctagctcatgatgtgatccactggataaaagaaatcaaagagtctttaatggtgctgaattccagtgaaggcaaaatgccactggaggaacgcatccagaaaattaaagaaattattctgcttaaacctgagggagatgcaagaattgaaacaatcatgaagcaggccgagtctagcgaggctccactggtgcaaaagacacttacagatatcagcaatcagtgggacaatactctgcatcttgcgtcaacatacttatcccatcaagaaaagcttctcctcgagggagaaaagtacctccaatcaaaagaggacctcaggcttatgctgatcgaattgaagaaaaagcaggaggctggctttgctctgcagcatgggcttcaggaaaaaaaagctcagcttaagatttataaaaagttcctgaaaaaggcacaggacctgacctccctcctcaaagaactaaagtctcagggcaactatctgctcgagtgcacaaagaatccctcctttagtgaggagccttggctcgaaatcaagcatctgcacgagtcactgctgcagcagctgcaggattccgtgcagaatctggatggccacgtgagggaacacgatagctatcaggtgtgcgtcactgatctgaataccaccttagacaacttttcaaaagaattcgtgagtttctcggacaaacctgtcgatcagatcgctgtcgaggaaaaattgcaaaaactacaggagcttgaaaaccgactcagcctgcaggatggaacactgaagaaaattctggccctcgccaagtcagtgaagcagaataccagctcagtggggcagaagattatcaaggacgatatcaaaagtctgcagtgtaagcagaaggacctcgagaaccgtctggctagtgccaaacaggagatggaatgttgcttaaatagtatcctgaaatcgaaaagatctactgagaaaaagggaaagtttactctgccaggtagagagaagcaggctacatctgacgttcaggagtctactcaggaatccgctgctgtggagaaacttgaggaagattgggaaattaataaaaacttcgttgagaacgtgatggcagtcagcaagaactgccatcacagtatgtatattttcgagtcgattgtgaagaacttcatcagcgacgagatgcaggattccgccgtcgagatggccatgagcaaacagctcagccttaacgctcaagagtcaatgaaaaacaccgaagacgagagaaaggtgaacgaactgcagaatcagccgctggagctggacactatgttacgtaacgagcagctggaggaaattgaaaaattatatacccagctcgaggccaagaaggcggcaattaagcccctggagcagaccgagtgcctaaataagacagaaactggggcattggtcctgcacaacatcggatactcggcccagcatctagacaacctgctgcaggcgctaataaccctcaagaagaataaggaatcccagtattgtgttttgcgcgacttccaggagtatttagctgcggtcgaatccagcatgaaggctctgctgaccgataaggagtcactgaaggtggggcctctagattcagtaacttatcttgacaaaattaaaaagtttatcgctagcatcgagaaggaaaaagactccctgggaaacttgaaaatcaagtgggaaaatttgagtaaccatgtaactgacatggacaaaaagctactggagtctcagattaaacaattggagcacggttgggagcaggtagagcagcagatacagaagaagtattcccagcaggtcgtggaatatgatgaatttaccactctgatgaataaagttcaggataccgagatcagccttcagcagcaacagcagcacctccaattgcgcctgaagtcaccggaagagagagcgggtaaccaaagcatgattgcgctcactaccgatctgcaggccaccaagcacgggttttcagtcctaaagggacaagccgagctgcagatgaaacgaatctggggagagaaagaaaaaaagaacctagaggatggaatcaacaatctgaaaaagcagtgggagactcttgagccactccacttggaggcagaaaatcaaatcaagaaatgtgatatcagaaacaaaatgaaggagaccatcctctgggccaagaacttgctgggagagctgaatccatccatcccattgctgccggatgacatactatctcaaatacgaaaatgcaaggtgacacacgatgggatactggctcgccaacagtcagtcgagtctctggccgaggaggtgaaggataaagtgccatccttgacaacatacgaggggagcgatctgaataacaccctcgaagaccttaggaatcagtaccaaatgctggtgctgaagtccacccaacggagtcagcagcttgagttcaaactggaagagaggtccaacttctttgcaatcatacggaagttccagttgatggtgcaggagagtgagacactgatcattcccagggttgaaaccgccgctacagaagccgagctcaagcaccatcacgtgactctggaagcttctcagaaagaattgcaggagatcgatagcgggatttctactcaccttcaggaactgacaaacatttatgaagagcttaatgtgtttgagcgccttttcctggaagaccagcttaagaatcttaagattcggaccaatagaatccagaggttcatccagaatacttgcaacgaggtcgagcacaaaattaagttctgtcggcaatttcacgagaagacgtctgcactgcaagaggaggccgacagtattcagaggaacgagctgcttctgaatcaggaggtcaacaagggggtaaaagaagagatttacaatctaaaggaccgattaaccgccattaaatgctgtattctgcaggttctgaagctaaagaaagtgtttgactacattggtctgaattgggactttagccagttagaccaattacagacgcaagtatttgagaaggaaaaggaacttgaggaaaaaatcaagcagctcgacacatttgaggaggagcatgggaagtaccaggccctgttaagcaaaatgcgcgctatcgacctgcagattaaaaagatgacggaggtggtactgaaagcaccggactccagtcctgaatcccgacgcctaaatgcgcagatcctctctcaaaggatcgagaaagccaagtgcctctgcgatgagattattaaaaagctgaatgagaacaagaccttcgatgacagcttcaaagaaaaggagatcctccagataaagctgaacgctgaagagaatgacaagctttacaaagtgctccagaacatggtgttggagctgtctccgaaggagttggacgagaagaactgccaggacaaactcgagaccagcctgcacgtgctcaaccaaatcaagagccagctgcagcagcctctcctcatcaatctcgagataaagcacatccagaatgaaaaggataattgtgaagcatttcaggagcaggtttgggctgaaatgtgcagtatcaaagccgtcacagctattgaaaagcagagggaagagaacagcagcgaggcatcagacgtcgagactaagctgcgtgaatttgaagacctacagatgcaattaaacacaagtatcgatctgcgtaccaacgtgctgaacgacgcctatgaaaacctgacaagatataaggaagccgtcactcgcgctgtagagtctatcacctcactcgaggccattattatcccctatcgggtcgacgttggaaatcctgaagaatctcttgagatgcctctgagaaaacaggaggagctggagagcacagtggctcatattcaggatctcactgagaagctgggcatgatttcttccccggaggccaagctgcagctgcagtacaccctgcaggaattggtgtccaagaattccgctatgaaggaagcgtttaaagctcaggaaaccgaagccgaacggtacctggaaaactataaatgctacagaaagatggaggaagatatatatactaatttatctaaaatggagaccgtcctgggacagtcaatgtcatctctccctctttcctacagggaggccctcgagcgcctagagcagtcaaaagctctagtcagtaacttgatctcaacaaaagaagagctgatgaaactgcgccaaattctgagactgctgaggttgagatgtactgagaacgacgggatatgtctcctgaagattgtctccgccctctgggagaaatggctctcactgctggaagccgcaaaggaatgggagatgtggtgcgaggagctgaagcaggagtggaaatttgtgagcgaagaaattgagagagaggctatcattctggacaacctccaagaggaacttcccgaaattagtaagaccaaggaagccgcaactaccgaagagttaagcgagctccttgactgcctgtgtcagtatggcgagaatgtagaaaagcagcagctgcttctgacattgctgcttcaacgtatcaggagtattcagaatgtgcccgagtcaagtggtgccgttgagacagtccccgctttccaggagatcacaagcatgaaagaaagatgcaataagctgctgcagaaggtgcagaaaaataaagaactagtccagacggaaatccaggagagacactccttcacgaaggagatcatagctttgaagaacttcttccagcagacaaccacatcgtttcagaatatggcctttcaggaccaccccgaaaaatcagagcagttcgaggaactccaaagcatcctgaaaaaaggaaaacttaccttcgagaacatcatggagaaactccgcatcaaatattcagagatgtacactattgtccccgctgagattgagagtcaggttgaagaatgccgaaaagcactcgaggatatagacgagaaaatttcaaatgaagtgttgaaatccagcccctcctatgctatgcgcaggaaaatcgaggagattaataacgggttacacaacgtagagaaaatgttgcagcagaagtccaagaatatcgagaaggcccaagaaattcagaagaagatgtgggacgagctggacctctggcattccaaactgaatgaactggattctgaggtacaggacattgtagagcaggaccctggccaggcacaagagtggatggataatcttatgattccatttcagcagtatcagcaggttagccagcgagccgaatgtcgaacatcacagctaaacaaggccactgtgaagatggaagagtacagcgaccttttgaaatctaccgaggcctggattgaaaatacgtcacacttactggcaaatcctgccgattatgatagcctgcgcactttaagtcaccatgcctccaccgtccagatggcgctggaagactccgagcagaaacataaccttttgcactcaatttttatggatttggaagacctgagcattatcttcgagacagacgagttaacacagtcgatccaggagctctcaaaccaagttaccgccttgcaacagaaaattatggagtcacttcctcagattcagaggatggccgacgatgttgtggctattgagagcgaggtgaaaagtatggagaaaagagtatctaaaattaagacaattctgctctcgaaggagatatttgacttcagccccgaggaacatcttaaacacggagaggtcatactggaaaacatcagaccaatgaaaaagacaatcgccgagatcgtcagctaccaggtcgaattgcgcttgcctcaaacaggaatgaaacctttaccagtgtttcaacgcacaaatcagctcctgcaggacattaaactgctggagaatgtgacgcaggaacagaatgagctattgaaagtcgtaatcaagcagacaaatgaatgggacgaagagatcgaaaatctgaaacagattcttaataattattctgcccagttcagtctggaacacatgtcgcccgaccaggccgacaagctccctcaattacagggcgagattgaacggatggaaaaacaaatcctgtccttgaaccaacgcaaagaggacctacttgttgatctgaaggccacagtgctgaacttgcaccagcatctgaagcaagagcaggagggagtagaacgtgatcggctccctgccgttacaagcgaggagggcggtgtggccgagagagacgcatccgaacggaagctgaatcggagagggtccatgagttatctggccgctgtcgaagaggaggttgaagagtcatcggtgaagagtgatcatgacaaagatatggaagaagacagagcaagtagctcatccgggacaattgtccaagaggcttatggaaagatcagtacgtccgataattccatggcccagattctgacaccggatagcctcaacactgagcaggggccagaatgctcactgcgccctaatcagacagaagagggaacaacccctccaatcgaggcggatacattggatagcagtgacgcccaaggaggactagaaccacgggtggagaaaactcgtccagagcccaccgaggtcctgcatgcttgcaaaacccaggtcgctgagctggagttgtggcttcagcaggcaaacgtggctgtcgagccagagacactgaacgccgatatgcagcaagtcttagagcagcagctagttgggtgtcaagcaatgctcacagagatcgagcacaaggttgcgtttctccttgagacttgcaaggatcaaggcctgggcgataacggggctacacagcatgaagccgaagccctgtctctgaaactaaagactgttaagtgcaatctcgaaaaagtgcagatgatgctacaagaaaaacattcagaggatcagcatcctacgatactgaagaagtcctccgaacctgagcaccaggaggcgctgcagccagtgaacctctccgaactagaaagcattgtcacagagcgtcctcagttctctagacaaaaggattttcagcagcaacaagtcctcgaactgaagcccatggaacagaaagattttattaaatttattgagttcaacgccaaaaagatgtggcctcaatactgtcagcatgacaacgacactacccaggaatctagcgctcgatatcccaccactgaggaactcaaaacttatactactcaattggaggacttgaggcaggaggcttcgaaccttcagacacaggaaaatatgacagaagaagcatatattaatctggacaagaaactctttgagctattcctaacactctcacagtgcctgtcatctgtggaggaaatgcttgagatgccacgtttgtatagggaggatgggtccggccaacaggtacactatgagacattggccctggaactgaaaaaactctatcttgcgctctccgataagaagggcgatctgctcaaggccatgacctggcccggagagaatactaacttgttattggagtgcttcgacaatttacaggtctgtttggaacatacacaggcagcggctgtgtgtcgctctaaatcacttaaggcaggtctggactataacaggtcctatcagaaggctgatgcctatactgtggagttggagaacgctgagagccgtgtggccaagcttcgcgacgaaggcgagaggttgcacttaccttatgcgttgctgcaggaggtctataagctggaggacgttttggactctatgtggggcatgctgcgagcccgttacacggaactgtctagtccatttgtgacggaaagccagcaggacgctttgctgcagggaatggtagagcttgtgaagataggcaaagaaaagttagcccatggtcatctgaaacagactaagtcaaaagtggcactgcaggcccagattgaaaaccacaaagtgttcttccagaagctcgtcgccgatatgctcctcattcaggcatattcagctaagatcctgccttctctgctgcagaatcgggaaaccttttgggctgaacaggtaacagaagtgaagatactggaggaaaagtcacggcaatgcggtatgaagctgcaaagcctcctgcagaaatgggaggagttcgatgagaactacgcctctctggaaaaggacctggagattctgatctcaaccctaccgagcgtgtctctggtggaggagaccgaggaacggcttgtagagcggattagtttctatcagcagattaaaagaaacatcggtggaaagcatgccaggctgtaccagaccttgaacgaggggaagcaactggtcgcttctgtgagttgccccgagttggagggccaaatcgccaaactggaagaacaatggttgagcctgaacaagaaaatcgatcatgagctgcacagactacaggccctcttgaagcatctcttgagatcagccttcctgggcgtctacaatagggactctgatcaactcactaaatggctggagagttcacagcacaccttaaactactggaaggagcagtctctcaatgtttctcaggacctggacactattaggtcaaatatcaataacttctttgagtttagcaaagaagtcgacgaaaagtcatccctcaaaactgctgtgatctccattggcaatcagttgctccacctgaaggagaccgacaccgccaccttgagagcctctctagcccagttcgaacagaagtggacgatgctgatcacccaacttccagacatacaggagaagcttcaccaactccagatggagaagttaccttcacggaaggctattacagagatgatcagctggatgaacaacgtggagcatcagacctctgatgaagactcagtgcactccccctcatcagctagccaggtcaaacatctcctccagaagcacaaggaattccggatggagatggattataagcagtggatagtagacttcgtgaatcaatctctcttgcagctgtccacatgtgatgtcgaatccaagcgttacgaacgtacagagttcgctgagcacctgggcgaaatgaatcgccaatggcacagggttcatggcatgttgaaccgtaaaatccagcacctcgagcagctgctcgagtcaattacagaatctgaaaataagatacagatccttaataattggctggaggcacaggaagaacgcctgaagacgcttcaaaagcctgagagcgtgatcagcgtgcaaaagcttttgctcgactgtcaagacatcgagaatcagctcgcgataaaaagtaaggctctggacgaacttaaacaaagctaccttacccttgaaagcggcgcagtgcctctcctcgaggatactgctagcagaatcgacgaactgttccagaaacggtcatcagttctaactcaggtgaaccagttaaagacatccatgcagagcgtgctacaggagtggaaaatctacgatcagctctatgatgaagtgaatatgatgacaatcagattttggtactgtatggaacactccaagcccgtagtcctctccctcgagaccttacggtgccaggtggaaaatcttcagtcccttcaagacgaggcagagagcagcgaaggatcttgggagaaactgcaggaagtcattgggaagctcaagggtctttgcccgagtgtggcagaaatcatcgaagagaaatgtcagaacacacacaagcgctggacgcaggtcaaccaagctatcgccgaccagttgcaaaaagcccaaagcttgctgcagctctggaaggcttattctaatgctcatggagaagccgctgccagattgaaacaacaagaggcgaaattccagcagctcgctaacatttccatgtcgggaaacaatctggcggaaatactgcctcccgctcttcaggacataaaggagttgcagcacgatgtgcaaaagacaaaggaagctttccttcagaatagctcagtcctggatcgcctcccccagcctgccgaaagctcaacgcatatgctcctccccggaccgctacactcgctgcagcgcgcagcgtacctggagaaaatgttgctggtgaaggctaatgagttcgaaaaccatgtgctggccctgactgcacagtctcccgacatcgagcacctgaacgaggtttccctcaaattgccgttgtcggatgtcgcagtgaagacactgcagaacatgaaccgccagtggatccgggcaacagccaccgctctagaaagatgcagcgagctgcagggcattggtctgaatgagaagttcctgtattgttgtgaaaaatggatccagctgttagagaagatcgaggaagccctgaaggtcgacgtggcaaactccctgcctgagctcttggaacagcagaagacatataaaatgcttgaagcagaggtgagcatcaaccagactattgcagacagctatgtgactcagtcactccagttgctcgatacaacagaaattgagaatcggccagaattcatcactgagttcagtaagctcaccgacaggtggcaaaatgccgtacagggagtgcgacagcgcaaaggcgatgtggatgggctcaatgcccacgtagcccgatgtggcggagcatctctaaaaaagcaggatctgcgatattccctgcacactgcgtgtggcgcagctctgctttgtaggtcgagtcatggggcaaacaaagagattcatttccagagaaggcggacaacctgtgccctcacattggaggccggagagaagctgttgctgaccacggacctaaaaaccaaggaatctgtaggtcgcaggatttcccagctgcaagattcttggaaagacatggaaccccagttagctgaaatgatcaaacaatttcagagcactgtagagacctgggatcagtgcgagaagaagataaaggaactcaaaagcaggctgcaggtgttgaaggcccagtccgaggatcctctaccagaactgcatgaggatctgcacaatgagaaggagctcattaaggttgctataaggaaacaagagatcgaggatcgcctgaacacctgggtggtatttaacgagaagaacaaggagctgtgcgcttggttggtccagatggagaataaagtccttcagaccgcagacatttcgatcgaggaaatgattgagaaactccaaaagcgaactgtcggcagagaggaagtgccggagagatgggaatgcgaaacgattgtcagcggtcacggcaccgaggaaagctgctttttgtcaatacggaagttccaccaggggagaggcctccatatcctgacttgtcagcttattccgcaggattgcatggaggagatcaacctgtttagtgaaaacaagctgcaacttaagcagatgggcgaccaacttattaaggcttctaacaagtctcgggcagcagagattgatgacaaattaaacaagatcaacgataggtggcaacatctgtttgacgtgattggcagcagcatggccgaccaaaccaattcaagatggatgtttttccagtggcctcgagggatccagagaactgtgacctggccatgggatcatctgtgcagctgcgccagcacagggcatactggccctttccacagttctgtgctgcgctgctttgagcagcatatagaattcggaatctaccggaggacatacaaggtgaacaaggagcttggcggagacaagaacggtcagaggtgtcctattatctatcctcacgggctggtgcagtgtattagacttggagaacccctgatccttaaacgcgtgaagaaactgaaagaaactttcgcttttatccagcaattggataaaaacatgtcaaatctaagaacttggttggcccgtatcgaaagcgaattgagtaaacccgtagtttacgacgtctgtgacgatcaggaaattcagaaacggctggctgaacagcaggatctgcagagggacatcgaacaacattcagcaggcgtggaatctgtgttcaatatctgtgacgtcctgctgcatgattctgacgcttgcgccaatgagaccgagtgcgattcgatccagcagacaaccagaagcttggacaggcgctggcgaaacatatgtgctatgtccatggaaaggcgaatgaaaattgaggagacctggcgcctgtggcagaagttcctggatgactactcgagattcgaggattggctgaagagtgccgagagaacagcggcatgcccaaactcgtcggaagttttatacacatctgcgaaagaagaactgaaacgcttcgagagacagattcacgagcgcctgacacaactggagctgatcaataagcagtatagaaggctggcgcgtgagaataggactgacactgcttcccggctcaagcagatggtccatgagggcaatcagcgctgggataacctccagcgcagggtcaccgctgtgctccggcgtctgcgccacttcacaaatcagagagaggagtttgaaggaactcgagagtcgattctcgtctggttgacagaaatggacttacagctgactaatgtcgaacatttctcagagtcggatgccgacgacaagatgcggcaactgaacgggttccagcaagagataacactcaacaccaacaagatagatcagctgattgtgttcggagagcaactgattcagaagagcgagcccttggatgctgttctgatcgaagatgaactggaagaactgcaccggtactgccaggaaggcctagaagacgaaaaagaagccagtgaaaacgaaacagacatggaggatcccagggaaatccaaaccgacagttggagaaagaggggtgaaagcgaggagccttcctccccccagagcctctgccatctggttgcccctggacatgagcgtagcggctgcgagacccccgtgtcagtggattctatacccctggaatgggatcataccggagacgtcgggggaagctcatcacacgaagaagacgaagaaggcccatattatagtgcgctctccggaaagtctattagcgacggccattcctggcatgtccccgacagcccatcctgtccagaacaccactacaaacagatggagggtgaccgtaatgtgccacctgtaccaccggctagcagcaccccatacaagcccccttacgttagcctgaattttactggaagcacggcgtacgtttgcgcttttgaccggtgggagatgattcaggctcaggagctgcacaacaagctcaaaatcaaacagaacctccagcaactgaatagcgacatatctgcaattacgacttggctcaagaaaaccgaagccgagctggagatgctgaaaatggccaaaccaccgtctgacatacaggagattgagctgcgagtgaaaaggctgcaggagatcctcaaagcattcgacacctacaaagcgcttgtggtgtcagtgaacgtgagctccaaagagtttcttcagactgaatcgcctgagtctaccgagctacagagtcgcctgaggcagctgagcctgctctgggaagccgctcagggagctgtcgactcttggcgcggaggactgcgtcagagcctgatgcaatgccaggatttccaccagctgagccagaacctcctgctgtggttagcctccgcaaagaaccggagacaaaaggcgcacgtaacagatccaaaggctgatccgagggcccttctggaatgtagacgcgagctcatgcagttggagaaggagttggtcgagagacagccccaggtcgatatgctccaggaaattagcaattccctcctgattaaggggcacggagaagactgtatcgaagctgaggagaaagttcacgtcattgagaagaaactgaaacagctgagggagcaagtcagtcaggatctgatggctctgcagggtactcagaatcctgcctcccctttgccctctttcgacgaagtggactccggcgatcagcctcccgcaaccagcgttcccgctccacgggctaaattcctgtaccccgctgtgcagtctagcgagaattataggcggcgaggcggagaccgcgagcagggtccacgtcaacatacagcaaccgctctccttcctctgaaaggcggacctggatcgcccaccccagcagccgcacctcctgcggcagccgcacccggattacctgctgcactgctgcgcagaaggctccagcttcattcggggcaacagttgtgccctgtgctgttgccccacgctgaggtgcatcagtgggccactccacacatcgaaggaattgccggacatagtgcaacccccccagctta

SEQ ID NO: 242073 - DNA, 20658 bp, synthetic construct
  misc_feature 1..20658: note = Description of Artificial Sequence: Synthetic coding sequence
  source 1..20658: mol_type = other DNA
atggccagtagcccagaactgcctaccgaggacgagcagggatcctggggaattgatgatctgcacatttcgctgcaggcagagcaggaggatacccagaagaaagccttcacttgttggataaactcacaacttgcccgacatacttccccaagtgtaatctctgatctgttcaccgacataaagaaggggcatgttctcctggacctgctcgaggtgctgtcggggcaacagctcccccgagacaaaggaagcaatacctttcagtgtcggatcaacatcgagcatgccctcacatttctgcggaaccgatcaatcaagttaatcaacatccatgtgaccgacatcatcgatggcaatccctccattattctcggcctgatttggacaataatcctccactttcacatagaaaagctcgcacagacattgtcctgtaactataatcagccatctttggacgatgtgtccgtcgtcgacagttctccagcctcctcccccccagccaagaaatgttcaaaggtccaggcaaggtggcagatgagcgccagaaaggcccttctgctatgggcccaagagcagtgtgccacatacgagagcgttaacgtaactgacttcaaaagctcatggcgcaatgggatggcattcctggccatcatacatgccttgcggccagaccttattgacatgaaatctgttaagcataggagcaacaaggataacttgcgggaagcgttcagaattgccgagcaggagctcaagatcccacgcctcctggaacccgaggatgtcgatgtcgtggacccagatgaaaagagcattatgacgtacgtcgcccagtttttgcagtactccaaggacgcacccggtacaggcgaggaagcacagggcaaggtcaaggatgctatgggatggcttaccttacagaaggaaaagttgcagaaattgctcaaggactcggaaaacgacacatattttaagaaatacaatagcctgctgtcctttatggaatcttttaatgaggaaaaaaaatcattcctggatgtgctcagtatcaaacgcgatcttgacgagctggacaaggatcacttgcagttgcgggaggcatgggacggtctggatcaccaaattaacgcatggaaaattaagttgaattatgccctccccccacccctgcaccagacagaagcgtggctgcaagaggttgaggagctaatggatgaagatctatccgcatcccaggaccactcccaagccgtgacactcatccaagagaagatgactcttttcaagagcctgatggaccgattcgagcaccattcaaacattctattgacttttgaaaacaaagacgagaatcatctgcctctcgttccacctaacaaactggaggagatgaaacggagaattaataacattctcgagaagaaattcattctcctgctggagtttcattactataagtgtctagtgctgggtctcgtggacgaggtaaagagtaaactcgacatatggaacatcaaatatggaagtagggaatccgtggagctgttactggaggactggcacaaatttatcgaggagaaagagtttctggctcgcttagacacctcctttcagaagtgcggggaaatttataagaacttggcaggggaatgccagaatattaacaaacagtatatgatggttaagtcggatgtgtgcatgtataggaagaacatatacaacgtcaagagcactctgcagaaggtgctggcctgttgggccacgtacgtcgaaaatctgagacttctacgtgcgtgtttcgaagagactaagaaagaagaaatcaaggaggtgccatttgagactctggctcagtggaatctggagcacgccacacttaatgaggcagggaattttttagtggaggtgagtaatgacgtggtggggtcgtcgattagcaaagagttacgcaggctgaataagagatggagaaagctcgtgtccaaaacccaattggagatgaaccttccactgatgataaaaaagcaagaccagccaacattcgataactcagggaacattttgtcaaaagaagaaaaagccaccgtggagttcagcacagacatgtctgtggagctgcccgagaactacaaccagaacattaaagcaggtgaaaaacacgaaaaggagaacgaggaattcaccggacagctgaaggtggctaaggatgttgagaagcttataggccaggtcgagatttgggaagcggaggctaagtctgtgttggatcaggacgatgtcgacacctccatggaggagtcactgaaacatctcatcgcaaagggtagtatgtttgacgagttgatggccagatctgaggacatgttacagatggacatccagaatatctcctcccaagaatctttccagcacgtcttgactactggtctgcaagcgaaaatacaggaagctaaggagaaggtccaaattaatgtggtgaaattgatcgcggctttaaagaaccttaccgatgtctcacctgatctggacattcgactcaaaatggaggagagtcagaaggagttggagagctacatgatgagagcgcagcagttgctgggccaacgcgagagccccggagagctgattagcaaacacaaggaagcattgataattagtaacacaaagtctcttgcgaaatatcttaaggcagtcgaagaactgaaaaacaatgtcacagaggacataaagatgagcttagaagaaaagtccagggatgtatgcgcgaaatgggaatcattacatcacgagttgtctctctacgttcagcagctgaaaatagacatagaaaagggtaaactgtctgacaacatccttaagctggaaaagcaaattaataaagaaaagaagctaatccgcaggggaagaactaaggggttaataaaagaacacgaggcgtgcttcagtgaggaaggctgcttgtatcagttaaatcatcatatggaggtgctgcgagaactatgcgaggagctcccttcacagaaaagccaacaagaggtgaaaaggctcctgaaggattacgagcaaaaaatcgagcgtctgttgaagtgtgccagcgagatccacatgacactgcagcctactgccggtggcaccagcaagaatgagggaactatcacgaccagtgaaaaccgaggtggtgacccccattcagaagcccctttcgccaaaagcgataaccagccaagcaccgaaaaagcgatggagccaaccatgaaatttagtcttgcaagtgttcttagaccactgcaagaagagtccattatggagaaggattacagcgcatcgataaatagcctcctggaaagatacgatacctacagagatattcttgagcaccaccttcagaataacaaatttagaattacatctgatttttcctccgaagaagatcggtcaagctcttgtctgcaagctaaactgaccgatcttcaagtcatcaagaatgagacggatgccaggtggaaggaattcgagattataagcttaaagctggaaaaccacgttaacgatattaaaaaaccattcgttatcaaggagcgggacaccttaaaggaaagggaaagagaactccagatgaccctgaatactagaatggagagcctggagaccgcattgaggctcgttcttccagtagagaaggccagtttgctgctctgcggctccgatctgcccctccataaaatggctattcaggggttccacctaatcgatgccgatcggatctaccagcacctgcgcaatattcaggatagcatagcaaaacagatcgagatttgcaaccgccttgaggagccaggcaatttcgtgttgaaagagctgcatccgttcgacctgcatgccatgcagaacataatcctgaaatacaaaactcagttcgagggcatgaatcatagggtgcaaagatcagaagacactctgaaagctttggaagactttttggccagtcttagaactgcaaagctgtcagccgagccagtgacggatttgtctgctagcgacacccaggttgcgcaggagaatacacttaccgtgaagaacaaggaaggtgagatccatctgatgaaggataaagcgaagcacctggacaagtgcctgaagatgctggacatgtccttcaaagatgccgagagaggcgatgacactagttgtgagaacctgcttgacgccttcagcattaagctgtcagaaacacatggatatggggtgcaagaagagtttactgaggaaaacaaactcttagaggcctgcattttcaaaaataacgaactgctcaagaatatccaagacgtgcagtcacaaatcagcaaaattggacttaaggatccaaccgtgcccgctgtgaaacaccgcaaaaagtcactgattagattagataaggtcttggatgagtatgaggaggagaaacgacatcttcaggaaatggctaattccctcccccacttcaaggacggcagagagaaaactgttaaccagcaatgccaaaatacagtggtgctgtgggagaataccaaggccctggtgaccgaatgcttagagcagtgtgggcgagtgctggaactactcaagcagtatcagaactttaagagtattctaactactctgattcagaaagaggagtctgtaatctccctgcaagcaagttacatgggaaaagaaaatctaaagaagagaattgctgagattgaaatcgttaaggaggagtttaacgaacatttagaggtcgtggacaagattaatcaggtatgtaagaacctccagttctacttaaataaaatgaagacctttgaggaaccaccattcgaaaaggaggcaaacattatcgttgatcgatggctggatatcaacgaaaagacggaggactactatgagaatctcggacgggcactggcgttatgggataaactgttcaaccttaaaaacgtgatcgacgaatggaccgagaaagctttgcaaaaaatggaactgcatcagctgaccgaggaagatcgggaaaggctaaaggaagaattgcaagtgcatgaacaaaagacttctgagtttagccgaagggttgcagagattcagttcctgctgcagagttccgaaatccctttggagctgcaggttatggagagctccattctgaataaaatggagcacgttcagaagtgcttaactggagagtccaactgccatgccttgagcggtagcacagcagagttacgggaggatctggatcaagccaagactcagatcggaatgactgaatctctcttgaaggctttatcgccctctgacagtttagaaatctttaccaaactcgaagaaatacaacagcagattctccaacagaagcattctatgatcctgctggagaaccagattgggtgtctcactcctgaattatcagagttgaagaaacagtatgaatctgtgagcgatctgttcaatactaaaaaatccgtgctgcaggaccacttctccaaactactgaatgatcaatgcaagaatttcaacgactggtttagtaacatcaaagtcaacctcaaggaatgtttcgagtcatccgaaacaaaaaagtcggtggaacagaagttacagaaactctctgacttcctgactcttgaaggtaggaatagcaaaatcaaacaggtggattctgtgcttaagcatgtaaaaaagcacctccccaaggcccacgtaaaagaactcatctcatggctcgttggccaggagttcgagctcgagaagatggagtccatttgccaagctcgcgctaaagagctggaggacagcctgcaacagctcctgcgcttgcaggacgatcaccgaaacctgagaaaatggctgacgaaccaggaagaaaagtggaagggaatggaggagccaggagaaaagaccgagctgttctgccaagctttggctagaaagagggagcagtttgagagcgtggcacagctcaataacagccttaaggaatatggctttactgaggaagaagagatcattatggaagccacctgcctcatggaccggtaccagactctcctgaggcagctctccgagatcgaggaggaagataagctcttgcctacagaagatcagtcattcaatgaccttgcgcatgacgttattcactggataaaggaaattaaagaaagtttaatggtgctgaactcctcggaaggcaagatgccacttgaggagcggattcagaaaatcaaagagataattctgcttaagcccgaaggagatgcacgcatagagaccatcatgaaacaagccgaatcttccgaggcacccctggtccagaagacccttactgatatatcaaatcagtgggataatactctgcatcttgcgagcacttacctcagtcaccaggagaaattgctactggaaggcgaaaagtatttgcagtccaaagaagacttgcggctgatgctgattgagttgaaaaagaagcaggaggccggattcgctttgcagcacgggttacaggaaaaaaaggctcagttaaaaatttacaaaaaatttctgaaaaaggctcaggatctcacttccctcttgaaggagcttaagtctcagggtaattatctcctcgaatgtaccaagaacccatccttctctgaggaaccgtggctagagatcaaacacctccatgaatccctgctgcaacaactgcaggactccgtgcagaacctagatggacatgtgcgggagcacgactcttaccaggtctgtgtgacagacctgaacacgaccctggataacttttcaaaagagtttgtctcattcagcgataaacccgtcgaccagattgccgttgaagagaagctgcagaagctccaggagctcgaaaacaggctgagccttcaagacggcaccctcaagaagattttggccttggccaaatccgttaaacagaatacaagtagtgtgggacagaaaattattaaggacgatataaagtcactccagtgcaaacagaaggacctggaaaataggttagcctccgccaaacaggagatggagtgttgcctcaatagcattctgaagagcaagcgcagcacggaaaaaaaggggaaatttacgctccctgggagggaaaagcaagctacatcagacgtgcaagaaagcactcaggagtccgctgccgtcgagaagctggaggaggactgggagatcaacaaagacagcgcagtcgaaatggccatgagcaagcagctgtcacttaacgcacaagaaagcatgaagaacactgaagacgaacggaaagtgaacgagctacagaatcagccactagagctcgacacaatgcttcggaacgaacaacttgaagaaattgaaaaactgtacacacaactcgaagctaagaaagcagccataaaaccgttggagcagacagagtgtctgaacaagacggagactggggctctggtactgcataacatcgggtactcagcacaacatctagataaccttttgcaagccctcatcacactgaaaaagaataaggagagccaatactgcgtgctacgcgattttcaggaatatctcgcagctgtggaatcaagtatgaaagcactgctcactgacaaggagtctctaaaggtcggcccattagactccgttacatacttagataagattaagaagttcattgcttctattgagaaggagaaggattctttggggaatctgaaaattaaatgggagaacctcagtaatcatgtgacagacatggacaagaaactgttggagagccagatcaagcagttagagcatggatgggaacaggtcgagcaacagatccagaaaaagtactcacaacaggtggttgagtatgatgagtttacaacactcatgaataaggtgcaggatactgagatttctctgcagcagcaacagcaacatctgcagctgcgtcttaaatctcccgaggagcgggctgggaatcagagcatgatcgcccttaccacggatctccaggccacgaaacacggatttagtgtgcttaaaggccaggcagagcttcaaatgaaaaggatttggggtgaaaaagaaaaaaaaaacctcgaagacggcattaacaatctcaagaagcagtgggaaaccctggagccccttcacctggaggccgagaatcaaatcaagaagtgtgacattcggaataaaatgaaagaaaccatcctttgggccaagaacctgttgggggagttaaatcctagcatcccgctactgcctgacgacatcctctcccagatcagaaaatgtaaggtgacacatgacggaattctagccaggcagcaatctgttgagagcctggccgaggaagtgaaagacaaagtgccctctctgacaacgtatgagggttctgacctaaacaacaccttggaagaccttaggaatcagtatcagatgcttgttctcaagtccacacaacgctctcaacaactagagttcaaacttgaggaacggtccaacttctttgcaatcatccggaaattccagctgatggtgcaggagagcgagactctcatcatacctagggtcgaaaccgccgctactgaggcagaactcaagcaccatcatgtaaccctcgaggcgtcccagaaagaacttcaagaaatcgactctgggattagcacccatctgcaggagctgacgaatatctacgaggagttaaatgttttcgagcggctcttcctggaagaccagttgaagaatctgaaaattcggactaacaggattcagcgtttcattcagaacacgtgtaatgaagtggagcacaaaataaagttctgtaggcagttccacgaaaagacctcggccctgcaggaagaagccgacagtatacagagaaacgagttattgctgaaccaagaggtgaacaagggtgtgaaagaggagatctataacctgaaggatcggttgacagctatcaaatgctgcatcctacaggtacttaaattaaaaaaggtgtttgattacatcggtctgaattgggatttctcccaactggatcagctccagacacaagtgttcgaaaaagaaaaagagttagaagagaaaattaagcagctggatactttcgaggaagaacacggcaagtatcaggccctgctctctaaaatgcgagccatcgaccttcagatcaagaagatgaccgaagtggtgcttaaggccccagacagctcccccgagagccgcagacttaatgcacagattctgtctcaacggattgaaaaggccaagtgcctatgtgatgagatcattaaaaagctgaacgagaataaaaccttcgatgattcctttaaagagaaggaaatcctgcaaattaaactgaatgcagaggaaaacgacaaactgtacaaggttttgcagaatatggtacttgaactgtcacccaaggagctcgatgaaaagaattgccaagacaagctcgagacgtcattacatgtgctcaaccagattaagtctcagttacaacaaccgctcttgataaacttggagatcaaacatatccaaaacgagaaagacaattgtgaagctttccaagagcaggtatgggctgagatgtgcagcatcaaggcagtgactgctatcgagaagcagcgtgaggaaaacagctcagaggcttcggacgttgaaactaagctgagggagttcgaggatctccagatgcaacttaatacgagcatcgacctgcgtaccaatgtgctcaacgatgcttatgagaatctcaccagatacaaagaagctgtgacccgagcggtcgagagcattacgagtctggaggccataatcataccctacagggtcgatgtagggaatccagaggagtcactagagatgcctctgagaaaacaggaagagttagagtccacagtagcccacatacaggacctcaccgaaaaactgggtatgatttcatcaccagaagctaaattacagcttcagtatactctgcaggagctggtgtcaaagaatagcgctatgaaggaggcctttaaagcccaggaaacggaggccgaaaggtatttggagaactacaagtgttacaggaagatggaagaagacatctatactaacttgtccaaaatggaaactgtgttgggtcagtctatgtcgtccctgcccctttcttatcgagaggccctggagagactggaacagtcaaaggccctggtgtctaatcttatttctacaaaggaagaactaatgaagttacgacagattctcagactactgaggttgcggtgtaccgagaacgatggcatctgcctcctcaaaattgtctccgcgctttgggaaaagtggctgagcctactggaagccgctaaagaatgggagatgtggtgtgaggagcttaaacaggagtggaaatttgtgagcgaggaaattgaaagagaggcgattattcttgataacctacaggaagagctcccagagattagcaagaccaaagaggctgccactaccgaagagttgtcggaactcctggactgcctttgtcagtacggggagaatgtggagaaacagcagctgctcctgactcttctgctccagagaattcgtagcattcagaatgtgcccgaaagtagcggcgcagtggagaccgtgcccgctttccaggaaattacgagcatgaaggagagatgcaacaaactgctgcagaaggtgcagaagaataaagagctggtccagactgagattcaagagaggcattctttcacaaaggagattatcgccctgaaaaatttcttccaacagacgacaacgtcattccagaatatggcattccaggatcatccagaaaaaagtgagcagttcgaggagctgcagtcaattctgaagaaaggaaagctgacgtttgaaaacattatggaaaaactgaggattaagtacagcgagatgtacaccatcgttccggctgagatcgaatcccaggtagaggaatgtaggaaagcactagaagatatcgatgagaagatctcaaacgaggtgctcaagagctccccaagttacgctatgagacggaagatcgaagagattaacaacggactgcacaacgttgagaagatgctgcaacagaaatccaagaatatcgagaaggcccaggagattcagaagaagatgtgggatgaactggatctctggcactctaagctaaatgagttggattccgaggtacaggacatcgtcgagcaggaccctgggcaggcccaagagtggatggacaacttaatgatcccttttcaacagtaccaacaagtgagccagagggctgagtgtagaactagccagctaaacaaagcaaccgtgaaaatggaggaatactcggacctgctgaaaagtacagaggcctggatagaaaacacgagccacctattggccaaccccgctgactacgactccctgcggacgctctctcaccatgcaagcaccgttcagatggccttggaagacagtgaacagaagcacaacctactgcattccatatttatggacttggaagatctgagtatcattttcgagacagacgagttgacccagtccatccaagagctgtccaatcaagtgaccgctctccaacagaaaatcatggaatcgttacctcagattcagcggatggctgacgatgtggtcgcaattgaatcagaggtcaagtctatggaaaagagagtgagcaagattaaaactatacttctgagcaaagagatatttgacttcagcccagaagagcacttgaagcatggagaagtgattctggagaacatcagacctatgaagaaaacaatcgcagaaattgtgtcttaccaggttgaactgagactcccacagacgggcatgaagccattgccagtgttccagcgaaccaatcagcttttgcaagacatcaaactgttggaaaatgtcacccaggagcaaaacgagcttttgaaggtggtgatcaagcagaccaacgaatgggatgaagagattgaaaatttaaaacagatcttgaataactactctgcccagttctcattagaacacatgagtccagatcaggccgataaacttccccaattgcaaggcgaaattgagcggatggagaagcagattctgagtcttaaccaaaggaaggaagacctgctggtggatctcaaagccaccgtactgaacctacaccaacatctcaagcaggaacaagaaggggttgaacgcgacaggctcccagccgtgacatccgaggaaggaggcgtagcagagagggacgcatccgaacggaagctcaaccgaaggggttccatgtcttacctggcagcagtcgaggaagaggtcgaggagagtagtgtgaaaagcgataacggcgacgagaaagctgagccctcgccccagagctggtctagtctctggaaacacgacaaagatatggaggaagatagagcgtcatcatctagtggaactatcgtccaggaagcatatggcaagatctctacaagcgataactcgatggcccagatccttacccctgatagcctgaataccgaacaggggccagagtgcagtctgcgaccaaatcagaccgaggagggtaccacacccccaatcgaagccgatacccttgatagctccgatgctcaagggggactcgaaccaagagtcgaaaagaccaggcctgaaccgaccgaggtccttcacgcctgcaaaactcaggttgctgagctagaattatggctccagcaagccaatgtggctgtggaaccagagacactgaatgccgacatgcagcaggtgctagagcagcaactggtgggttgtcaggctatgctgacagaaattgagcacaaggttgcctttctacttgaaacatgtaaggaccagggacttggcgacaacggcgctacacaacacgaggccgaggctctctctctcaaactaaaaactgtcaagtgtaatcttgagaaggtgcagatgatgttacaagaaaaacattcagaggatcagcacccaaccattttaaagaagtcctccgaacccgaacaccaggaagcactgcagccagtgaacctatccgagcttgaatccattgtaaccgagcggcctcagttcagtcgtcaaaaagacttccaacagcagcaggtcctcgagttgaaacctatggagcaaaaagatttcatcaaattcatagagtttaacgcgaaaaaaatgtggcctcaatattgccaacacgacaacgatactacacaagagtcatctgcaagtaatcaggccagtagtccagagaatgacgtgccggacagtatcttgagcccacagggccagaacggagataagtggcagtatcttcatcatgagcttagctccaaaattaagcttcctctacctcagctggtcgaaccacaggtaagcaccaatatgggcatattgccctctgtcacaatgtataacttccgatatcccactactgaggaacttaagacttacaccacccagcttgaagacctgcggcaggaggcctcaaacctgcagacacaggaaaacatgacagaggaggcctatattaacctggataagaaactattcgaactctttttgacactgagccagtgtcttagctcggtggaagagatgctcgagatgccacgactgtacagggaggacggcagcggacagcaagtgcactacgaaaccctggctctcgagctgaaaaaactgtacctcgcgctctctgacaaaaaaggcgatcttctcaaggctatgacttggccaggtgagaacacgaatcttctgcttgagtgttttgacaacctgcaggtgtgtctggagcacacccaggccgctgcagtatgtaggagcaagtccctgaaggccggactcgactacaaccgttcttaccagaatgaaattaaacgactgtaccaccagctaataaagtccaaaacatcactccagcagtctttgaacgaaatttcagggcagagtgtcgcagaacagctccagaaggcagatgcctacacagtggaacttgagaacgccgagtctagggtggctaagctgagagacgaaggcgagaggctgcacttaccgtacgcactgctgcaggaggtgtataagctggaggacgtactggattccatgtggggaatgctcagagccaggtatactgagctgagttctccttttgttactgaatcccagcaggacgcactgttacagggcatggtcgagttagtgaagataggcaaggaaaagctcgcccatggtcatcttaagcaaacaaaatccaaggtcgctctgcaggcccagattgagaaccataaggtattttttcagaagttagttgcagacatgctgctgatccaagcctactcagcgaagatcctcccctctctacttcaaaaccgggagactttctgggcagagcaagtaacagaagtcaaaatcttggaagagaaatcaaggcaatgtgggatgaagctgcagagcttactgcagaaatgggaagaatttgacgaaaattacgcgagccttgaaaaagatctggaaattctgatcagcacattaccctctgtcagtctggttgaagagaccgaagagagactggtagaaagaattagcttctaccagcagatcaagcgtaatattggcggaaaacacgcaaggttgtatcagacacttaacgagggcaaacagctggtggcctctgtgtcttgcccggagttggaaggacagatagccaagttagaagagcagtggctgtcactgaacaagaagatcgaccacgaactgcatcgtcttcaggctctcctgaagcacttgctttcctacaaccgtgactcagatcagttgaccaagtggctggagagttcccagcacaccctgaactactggaaagaacagtctctgaatgtaagccaggacctggacaccattcgcagcaatattaacaacttttttgagtttagcaaggaggtagacgagaaaagttctttgaaaactgccgtgatatccattgggaaccagctgcttcatcttaaggagacggacaccgcgacactgcgtgcctcgctagcccagtttgagcaaaagtggactatgctcattacacagctccccgatattcaggaaaagttgcatcagctgcagatggaaaaactgccctcccgcaaggcaattacagaaatgatatcatggatgaataacgttgagcaccagacctccgacgaagatagtgttcatagtccatcgagcgcctctcaggtgaagcatctactgcaaaagcataaagaatttagaatggagatggattataagcaatggatcgtggactttgttaatcaaagcttgttacagttaagcacgtgcgatgtggagtccaagcggtatgaacggaccgagtttgcagagcatctgggcgagatgaacaggcagtggcatcgcgtgcacggtatgttaaaccggaagatccaacatttagaacagctgctggagagtatcactgagagcgaaaataagattcagatccttaacaactggttagaggcccaagaagaacggctcaagactttgcagaaacccgagtcggttattagcgtgcagaagctgctgttggactgccaggacatagagaatcagcttgccataaagtcaaaggcattagatgaattaaaacagtcatacctgaccctggaatcaggtgccgtgcccctcctcgaagacaccgcctcaagaatcgacgagttatttcaaaaaaggagcagcgtcctgacccaggtcaaccagctgaagacttcaatgcagtccgtgctccaggagtggaaaatttacgaccagttgtacgatgaagttaatatgatgacaatacgattctggtactgcatggagcacagcaaacccgtggtgttgtccctggagacactcagatgtcaggtggagaacctccagtccctgcaggatgaagccgagtctagcgaaggatcctgggaaaaactgcaagaggtgatcggtaagttgaagggattgtgtccatctgttgccgagattattgaggagaaatgtcagaatactcataaacggtggacccaagtgaatcaggcaattgcagatcaactccagaaagctcagagcttactccaactatggaaggcttactctaatgcccatggcgaggctgccgctcgacttaagcaacaagaagctaagtttcagcaactggctaacatctctatgtctggtaacaacctcgccgagattctgccacctgccctacaggacatcaaggaactacaacacgatgttcagaaaaccaaggaggctttcttgcagaacagttcagtactcgacagattgccacagcccgcagagtcatctacgcatatgctgttgccaggacctctccactctctgcagagggcggcttacctcgagaagatgctgctggttaaggcaaatgagttcgaattcgtgctgtcacagtttaaagacttcggtgtaaggctagagtcccttaaggggctcatcatgcacgaggaggaaaatctggacaggctgcatcagcaggagaaggaaaaccctgactctttcctgaaccatgtcctggccttgaccgcacagtcaccagacattgagcatttaaatgaggttagcctgaagttgcctctgtccgacgtggccgtgaaaacactgcagaacatgaacagacaatggatccgggcaacagctaccgctttggagcgttgcagcgaactccaggggattggacttaatgagaaattcctctactgctgcgaaaagtggattcagctccttgagaaaattgaggaggctttaaaagtggatgtggccaactccctgccggaactgctagagcaacagaagacttacaaaatgcttgaagcagaggtatccatcaatcagactattgccgactcttatgttacacagagccttcagctgctagataccacagaaattgaaaaccgccctgaatttataacggagttctccaagttgacggataggtggcaaaatgcagttcagggagttaggcagaggaagggggatgttgacggcctcgttcgtcagtggcaggatttcaccacctctgttgagaatctgttccgtttcttgaccgatacctcacacctgctgtccgctgtcaagggccaggagcgatttagtctttaccaaaccaggagccttatccatgagctaaagaacaaagagatccacttccagcgcagaaggaccacctgcgcactcaccctggaagcgggtgaaaagctcctcctgactacagacctgaaaaccaaggagagcgtgggccgaagaatctcacagctgcaagattcctggaaggacatggagccacagctcgcagagatgatcaaacagttccaaagcaccgtggaaacctgggatcagtgcgagaagaagattaaagagttgaaatcacgcttgcaagtgctgaaggcccaatcagaagaccctcttcccgagcttcatgaggacctccataatgagaaggagctaatcaaggagctggaacaaagcctggccagctggacacagaacctgaaggagctccagacgatgaaggccgatctgactcggcacgtcctggttgaggatgttatggtgctgaaggagcagatcgagcatttgcaccggcagtgggaagacctctgtcttagagtagcgatccgaaaacaggagatcgaagatcgccttaatacatgggtggtttttaatgagaaaaataaggaactgtgcgcctggttagtacagatggagaataaggtcttacagacagccgatatcagcatcgaagagatgattgagaagctgcagaaggactgtatggaggaaattaatctgttttccgaaaacaaattgcaactgaaacaaatgggggatcagctgataaaggcgagcaacaagtctcgagccgcagagattgatgataagctgaacaaaattaacgatcgctggcagcacctgttcgacgtcattggtagcagagtgaaaaagcttaaagagacgtttgcgttcatccagcagcttgacaaaaacatgtcgaacttacgcacgtggctcgcccgtatagagagcgaactctccaaacccgtggtgtacgacgtgtgcgatgatcaggagatccagaagaggttggccgaacagcaagacctgcagcgtgacatcgaacagcactcagccggagtggagtccgttttcaatatctgcgatgtcctgctccacgacagcgacgcttgcgccaacgaaactgagtgtgactctatccagcagaccaccagatccctggaccgcagatggagaaatatctgtgccatgagcatggagcgaagaatgaagatagaagaaacatggcgtctctggcagaagtttctggacgattactctagatttgaggattggctgaagagtgctgaaagaacagcagcctgtcccaattctagtgaggtgctttacacctccgccaaggaggagctcaaacggttcgaagctttccagcgacaaatccatgaacggctgactcaattagagctgattaacaaacaatacagacggctggcacgtgaaaaccggaccgacactgcctccagattgaagcagatggtccatgaggggaatcagcgctgggacaatctccagagacgtgtgaccgcggttttacggaggctacgacacttcacaaaccagcgggaagagtttgaaggcaccagagagagcatattggtatggcttacagagatggatttgcagttgactaacgtggagcatttctctgagtcggacgccgatgataagatgcggcagcttaatggatttcaacaggagataactcttaatacaaataagattgatcagcttatcgtttttggcgagcagctaatacagaagagcgagcctctggatgccgtcctgatcgaggacgaactcgaagaactgcaccggtattgtcaggaggtgtttggccgtgtttctaggtttcatcgtcgtttgacttcctgcaccccaggcctggaggacgagaaggaagcttctgaaaacgaaaccgacatggaggaccctagagagatacaaacagatagctggcggaagcggggtgaatctgaagagccgagcagccctcaatccctgtgtcatttggtggccccaggccacgagagatccggctgcgaaacacccgtgtccgtggatagcatacctctcgaatgggatcacacgggagacgttggcggttctagtagccacgaggaggacgaggaaggaccctattacagtgccctaagcggaaaatctatctcagacggacattcctggcatgtcccagattcacccagctgtcctgagcatcactacaagcagatggaaggtgacaggaacgtcccaccagtgccgcctgctagttccacaccctataaacccccttatggcaagttgctcctcccacctggcacagacggtggtaaagaggggccaagagttctcaacgggaacccacaacaggaggacggagggcttgctggcattacggaacagcagtcgggcgctttcgatagatgggagatgattcaggcccaggaactccataataaactgaaaattaagcagaaccttcagcagctgaattcagacatctcagcaattacaacatggttgaaaaaaaccgaagctgagctggagatgcttaagatggccaaacccccttctgacatccaggaaatcgaactaagggtgaaacgccttcaggagatccttaaggccttcgacacctataaagcactggtagtgagcgtgaacgtgtcctcaaaagagttcttgcagactgagagccccgagtcaaccgagctgcagagcaggttgcgccagttgtcactgttatgggaagctgctcagggggctgtagattcatggcggggaggattgaggcagagcctgatgcagtgtcaggacttccaccaattatctcaaaacttgctgctttggttagcctccgcaaaaaatcgcaggcagaaggcacatgtgaccgatccaaaggctgatcctagggcactgctggagtgccgcagagagttaatgcaactggagaaggaactggttgagaggcagccgcaagtagatatgctgcaggaaatatcaaactccctactgataaagggacacggcgaggattgcatcgaggccgaagaaaaggtgcacgtgatcgagaaaaaactcaaacaactgagagaacaggttagccaggatctaatggccttacaagggacacagaatcccgcttcacctctgccttctttcgacgaggtggatagcggcgatcagcctcccgctacttcagtccccgctccacgcgcaaagcagtttagggccgtgcggactaccgaaggggaagaggagacggagagtcgcgtgccaggcagcacccgtccccagcgctccttcttatcacgggtggttagggcagccctgccccttcagctgctgctgttgctcctcttgcttctcgcttgcctgctgccaagttccgaggaggactactcttgcacgcaagcaaataatttcgctagaagcttctatcctatgctgcggtatactaacggcccaccgccaacttag

SEQ ID NO: 242074 - DNA, 804 bp, synthetic construct
  misc_feature 1..804: note = Description of Artificial Sequence: Synthetic coding sequence
  source 1..804: mol_type = other DNA
atggcctcatcgcctgaattacccaccgaggatgaacagggttcgtgggggattgatgacctccatatctctttgcaggctgaacaggaagatacacagaagaaggcctttacgtgctggataaattctcagttagcaagacacacatcgcccagtgtcatctcagacttgtttaccgacattaagaagggccatgtgctactcgacctccttgaggtcctatctggacagcagctgccccgagataaggggtcaaacacatttcagtgcaggatcaatatcgaacatgcactaacatttctgcgcaacagatccatcaagttgatcaacatccatgtgactgacatcattgatggaaacccaagcatcatcctgggtttgatctggactataatactccacttccatattgagaagctcgcccagactttgtcttgcaactataatcaaccttctctggatgatgtgtccgttgtcgatagttcgccagccagctcccctcctgccaagaaatgttctaaggtccaggccaggtggcaaatgtcagccaggaaggctctgctactctgggcccaggagcagtgcgcaacttatgaatctgtcaacgttactgatttcaagagcagttggaggaatggcatggcatttttagccattatacatgcactcagacccgatctaatcgatatgaagtcagtcaaacaccggtctaacaaggataacttacgcgaggccttccggatagccgagcaagagttaaagattcctagactgttagaacccgaagcctacaagaatttttag

SEQ ID NO: 242075 - DNA, 9813 bp, synthetic construct
  misc_feature 1..9813: note = Description of Artificial Sequence: Synthetic coding sequence
  source 1..9813: mol_type = other DNA
atggagaagctgcgaatcaaatacagcgaaatgtatacaatcgtgcctgccgagattgaaagccaggtggaggagtgccgaaaggcgctggaggacatagacgaaaaaattagtaatgaagtcctgaaatcgagcccaagctacgccatgagaagaaaaattgaagagataaataatggcctgcacaatgtggaaaagatgctgcagcagaagtccaagaatatcgaaaaagcccaggagattcagaaaaagatgtgggacgagctcgatctgtggcacagcaaacttaacgaattggatagcgaggtccaggatatagttgaacaagatcctggtcaggctcaggaatggatggataacctcatgatcccgttccaacagtaccagcaggtgtctcaaagagctgagtgtaggacatcgcagctcaacaaggcaacagtcaaaatggaagagtacagcgatctgctgaagtcaactgaggcttggatcgagaacacgtcccacctgctggccaaccctgctgactacgattcactgaggaccctgtctcatcacgcgtccactgtacaagacagcaaatgttttagaagcggcccacgacccaacatctacgttagctactatgtcaccgttatacaaatggccttggaggactccgaacagaagcacaatcttctccatagtattttcatggatctcgaagacttatccattattttcgaaaccgacgagctcacacaatcaattcaagagctgagcaatcaggtgacagctctccagcaaaagataatggaatccctgccacagatccagagaatggcggacgatgtggtcgcaatcgaaagcgaggtgaagagcatggagaaaagagtgagcaagataaagaccattttgctttccaaagagattttcgacttctcacccgaggagcacttaaagcatggcgaagtgatcttagaaaacatccggccaatgaagaagacaatagcggaaatcgtatcctatcaggtggagctccggcttcctcagaccggtatgaagcccctccccgtctttcaacggacaaatcagcttttacaagatatcaagttgctcgaaaacgttacccaggaacaaaacgaactgctgaaagtggtcatcaagcagaccaatgaatgggatgaagaaattgaaaacttaaagcagatcctaaacaactactccgcacagttttccctcgaacatatgtcacccgaccaggcggacaaactgccacagctccagggcgagatcgagcggatggaaaagcaaatactgtccctcaatcaacgcaaggaagatctgcttgtggacctgaaagctaccgtactgaatctacaccagcatctcaaacaggagcaggaaggcgtggaacgggatcggctgcccgctgtcacgtccgaagaaggcggagtcgctgagcgggatgcatccgaaagaaagctgaacagaaggggaagcatgagctacctggccgcagtagaggaggaggtggaagagagtagcgttaagtcagacaatggcgacgaaaaggccgaaccatctccccagtcctggagcagcctctggaagcacgacaaagacatggaagaggacagggcgtccagctcctctggcacaatagtgcaggaggcctacggcaagatctctaccagtgataattccatggcacaaatactgactcctgatagccttaacaccgaacaggggccagaatgctccttaaggcctaaccagactgaagaaggcactacacccccaatcgaagccgacactcttgattcttccgatgctcaaggcggtctggagccaagagtggagaagacacgacccgaaccaaccgaggtattacatgcctgcaaaacacaggtcgccgagctggaattgtggctgcaacaagccaatgtggccgtcgaacccgaaactcttaacgcagatatgcaacaagtgctcgaacagcagctggtgggctgccaggccatgttaactgaaatcgaacacaaagtagcttttcttctagagacgtgtaaggatcagggactgggtgataatggggcaacccaacacgaggccgaagctttaagtctgaagttaaagaccgtgaaatgtaatttggaaaaagtccagatgatgcttcaagagaagcactctgaggaccagcatccaacgatcctcaaaaagtcaagcgaacctgagcaccaagaagctctacagccggttaacctctctgagcttgaaagcattgtaaccgaacgacctcagttcagccggcagaaggacttccagcagcagcaggttctggagctgaagccgatggagcagaaggattttatcaaattcatagagttcaacgccaaaaaaatgtggccacaatactgccagcatgataacgataccactcaggagtcctccgcaagtaatcaggcatcctcacccgagaacgatgtgcctgattccatcctcagtccccagggtcaaaatggtgacaagtggcagtacctccaccatgaattatcaagcaaaattaagctcccgttaccgcagcttgttgagcctcaggtctcaacaaatatggggatcctcccatccgtgacaatgtacaattttcgttatcctaccacagaggaactcaaaacctacactacccagctggaggacctcaggcaggaggcaagcaatctgcagactcaagagaatatgaccgaggaagcctatattaacctcgacaagaagcttttcgagctttttctgaccctgagtcagtgcctgagttccgtcgaagagatgctcgagatgcctcggctctaccgagaagacggctccggccaacaggtgcactatgaaacattggccctcgagcttaaaaagctttatctcgcactttcagacaaaaagggcgacctcctaaaagccatgacatggcctggggaaaacacaaacttgctgctcgagtgcttcgataatttgcaagtatgcctggaacatacacaggcggcagcggtgtgccgatctaagtcactgaaagctggtcttgattacaaccgcagctaccaaaatgaaatcaagagactgtaccatcaacttataaagagtaagacatctctgcaacagagccttaacgagatatctggtcagtctgtagcagaacaacttcagaaagccgacgcctataccgtagaacttgagaatgccgaatcccgtgtcgcgaagttgagagatgagggcgaacgccttcacctgccttatgctctgctgcaggaagtttacaagctggaggatgtacttgactccatgtggggcatgcttcgcgctcgatataccgagctcagctcccctttcgtcactgagagccagcaagacgccctgcttcagggcatggtggaactagttaaaattggcaaggagaagctcgctcacggtcacctgaaacagaccaaatcaaaagttgcgctacaggcacagatcgagaaccacaaggtattttttcagaagctcgtggctgacatgctgctgatccaggcctactccgccaaaatccttcctagcctactccaaaaccgcgagaccttttgggccgagcaggtcactgaggtgaagattcttgaggaaaagtctagacaatgcggaatgaagctgcagagtctgctgcagaaatgggaagaattcgatgagaattacgccagcctggagaaagacttggaaattctcatctctactctcccaagcgtgtctctggttgaagagacggaggagcgactggtggaaagaatcagtttttatcagcagatcaaaaggaatatcggtggcaaacatgcccgactgtaccagacacttaacgaaggaaaacaactcgttgcctccgtctcgtgtcctgagttggaaggccaaatcgcaaaacttgaggagcaatggcttagcttaaacaagaaaatcgaccatgaactgcacaggctccaagccctgctgaaacatctgctctcttataacagagactccgatcagcttaccaagtggctcgagagtagtcagcacacactgaattactggaaggaacaaagcctgaacgtatctcaggatttagatacaatacggtcaaatattaataacttctttgaatttagcaaggaggtagatgagaaaagctctctcaaaactgccgttatcagcatcggaaatcagctcctccatctgaaggaaactgataccgcaaccctgcgggcttctctggcccagtttgagcagaaatggactatgctcataacccaattgccggacatacaggaaaagctacatcagcttcagatggagaagctgcccagccgaaaggcaattaccgagatgatttcatggatgaacaatgtggaacaccagacaagcgatgaagactcagttcatagtccctcttcggctagtcaagtcaagcacttgctgcaaaaacacaaagaattcagaatggaaatggactacaagcagtggatcgtcgattttgttaatcaatcactcctgcagctgagcacatgtgacgttgagtcgaagcggtatgagagaacagagttcgccgaacatctgggtgagatgaacaggcagtggcatcgtgtgcacggcatgctcaatagaaaaatccagcatctggagcagctattggaatccatcactgagagtgagaacaaaattcagattctgaataattggctcgaggcacaagaggaacggttaaagaccctgcagaagccggaatcggttatcagcgtgcagaaactgctgctcgattgtcaggacattgaaaatcaattggcaataaaatctaaggccctcgacgagcttaagcagagctacctgactctcgagtctggtgccgttcccctcctcgaggatacagccagcagaatcgacgaactctttcaaaaacggtcaagtgtcctgacgcaagtaaatcagttaaagacaagcatgcagagcgtgctccaggaatggaagatctatgaccaactgtacgacgaggtgaacatgatgacaatacggttttggtattgcatggagcattcaaagcccgtcgtgctctccctggaaaccctgcgctgtcaggtggaaaatctgcagtcgctccaagatgaagccgagagttctgagggatcatgggagaagctgcaagaggtgatcggcaaactcaagggcttatgtccgtccgtggcggaaatcatcgaggagaaatgccagaatacacataagcgctggacccaggtaaatcaggcaattgctgaccagctccaaaaggcacagtctctcctgcagctgtggaaggcttacagtaatgcccatggcgaagccgcagccagactgaagcaacaggaggccaaattccagcaactcgcaaacatatctatgagtggaaacaatctagcggagatcctgcccccagcactgcaagatataaaagaactgcagcatgacgtccaaaaaaccaaagaagcctttctgcagaatagcagtgtgcttgacagactcccccagcccgcagagtcttccacccacatgctgctgcccggacctttacactcactgcagagagctgcataccttgagaagatgttgttagtgaaagcaaatgagttcgaattcgtgttgtcacagtttaaggacttcggcgtgcgcctggagtcacttaagggactgatcatgcacgaggaggagaaccttgatcgactgcatcagcaggagaaggagaaccctgatagcttcctgaatcatgtgctggctttaaccgcccagtcccccgatatcgaacacctgaacgaagtgagcttgaaactgccgttatccgatgtcgccgtgaaaactctgcagaatatgaatcggcagtggatccgcgcaactgccactgccttggaacgctgctctgaactgcagggaatagggctgaatgagaagttcctctactgttgcgaaaagtggatccagctgctagagaaaatagaggaggccctgaaggtcgatgtggccaacagcctgcctgagcttttggagcagcaaaagacatataaaatgctcgaagctgaggtcagcatcaaccagactatcgctgactcgtacgtgacacagtccctacagctgttagacacaacggaaattgagaacagaccggagtttataactgaattttcaaaattgaccgatcgatggcagaacgccgtgcagggcgtgcgccaacgaaaaggcgacgtggacggcctggtcaggcagtggcaagattttaccacaagcgtagaaaacctcttcagattcctgacagatacaagtcatctacttagtgcagtaaaaggtcaggaacggttcagtctataccagacaaggagtctgattcatgaactgaaaaacaaagagatccatttccagcgcaggagaacgacatgcgctctgacgctcgaagcaggcgagaaattgttgctgacaaccgacctgaaaacaaaagagtcggtagggcgtcgcatcagccaattgcaggattcatggaaagatatggagccccaactcgctgaaatgatcaagcagttccagtcaactgtcgaaacctgggatcagtgtgagaagaagataaaggaactgaaaagtagactccaggtattgaaggcacagtccgaggatccgttgcccgaactacacgaagatctgcataatgagaaagagctaatcaaagagttagaacagagtttggcctcatggactcaaaatctgaaagaacttcagaccatgaaagcagatcttacccgtcatgttttggtggaggatgttatggtgctgaaagagcagatagagcacttgcatcgacagtgggaggacttatgcttgcgcgtcgctattaggaaacaagaaatcgaggaccggctcaacacctgggtagttttcaacgaaaaaaataaagaactatgcgcctggctggtacagatggagaacaaggtcctccagaccgccgacatctcgattgaggagatgatcgagaaactgcagaaggattgtatggaagagataaacctattctctgaaaacaagctgcagttgaagcagatgggggatcaactcatcaaagccagcaacaaatctcgagcggctgagattgacgacaaactgaataagataaacgataggtggcaacatctgttcgatgtgatcggcagcagggtgaagaagctgaaggaaacattcgcattcatacaacagctggataagaatatgagtaatcttagaacttggctcgcgaggatagagagcgagctgagtaaacctgttgtttatgacgtttgtgatgaccaagagattcagaagcgactggcagagcagcaagatttgcaaagggacatcgaacaacactcagccggagtcgagagcgtgttcaatatttgcgacgtgttgttgcatgatagcgacgcatgcgccaacgaaactgagtgcgacagcatccaacaaacgacaagaagtctcgaccggcgttggcgtaacatttgcgcaatgtctatggagagacgcatgaagatcgaggaaacatggcggctgtggcaaaagttcctcgacgactattcccggtttgaagactggctcaaatctgctgagagaacagccgcatgccctaatagctcggaggtactttacacctcagccaaagaagagcttaaaaggttcgaggctttccagagacagattcacgagaggctcacccagcttgaactgattaataaacagtataggcgtctggccagggagaaccgcactgacaccgccagcagacttaagcagatggtgcacgagggcaaccagcgttgggataatctgcaacgaagggtgaccgccgtgctcagaaggttgaggcattttacgaatcagcgcgaggagtttgaaggtacccgagaatccatactagtgtggctcacagagatggatctgcagcttaccaacgtggagcatttcagtgaatctgatgccgatgataaaatgaggcaactcaatggatttcagcaggagattactctcaatacgaataaaattgaccagcttatcgtctttggagagcagcttattcagaagagtgagccacttgatgcagtgctcatcgaagatgagttggaggagctgcaccgctactgtcaggaggtgttcggacgcgtgtctcggtttcaccgcagactgaccagttgcacccctgggttagaagatgagaaggaagcttcagagaacgagacagacatggaggaccccagggaaatccagacggacagctggaggaagcgaggcgagagcgaggagcccagcagcccgcagagtttgtgtcatctggtggccccagggcacgagcggtccggttgtgaaacgcctgtgtctgtggattcaattccactcgaatgggaccacacgggggatgtaggcggatcaagcagccatgaggaagatgaggaaggtccgtactactctgctctgtcagggaagtctatatctgacgggcactcatggcacgtgcccgactcaccctcttgtcccgagcaccactataaacagatggagggagaccggaatgtgccccctgtgccacccgcatccagcacaccatataagcccccatatggaaagttgctgcttccaccgggaactgatggtggaaaggagggacccagagtcctcaacggtaatccacagcaggaagacggcggtttagctggcatcacggagcagcagtctggcgcatttgaccgctgggagatgatccaggcccaggagctccacaataagcttaaaatcaagcaaaatctgcagcagttaaactccgatatcagcgccataactacatggcttaaaaaaaccgaggccgaattggaaatgctgaaaatggcgaaacctccctccgacattcaggagatcgagctccgggttaagcgactgcaggagatcctgaaagcttttgatacttacaaagcactcgttgtatcagtaaatgtgagcagcaaagaatttcttcagacagaaagccccgagtccactgaactacaaagtcggctgaggcagttaagcctcctttgggaggcagcccagggcgctgtagacagctggagaggagggctacgtcagtcactgatgcagtgccaggatttccaccaattgagtcaaaatctcctactgtggctggcctctgcaaaaaacagaagacagaaggcccacgtgaccgaccccaaagctgatcccagggccttactggagtgccgccgtgaattaatgcaactcgagaaagaactggtcgagcggcagccgcaggtggacatgctccaggaaatttccaattcactgcttattaagggccatggtgaggactgcatcgaggccgaggaaaaggtgcatgtaatcgagaaaaagctcaagcaactgcgagagcaagtgagtcaggatctgatggccctgcagggtacccagaaccctgccagtccactccccagcttcgatgaggttgattctggggatcagcctccagcaacctctgtccctgcacccagggcaaaacagtttcgcgctgttcggacaaccgagggagaagaggagactgaatccagggtccccggatccacgaggccccagaggtcctttctgtctcgcgtcgttcgggcagctctccctttgcaactgctcctcttgctgctcttgctactggcctgtttactgccttccagcgaggaggattattcttgcactcaggccaataatttcgcaagatccttttaccctatgctccgatataccaatggaccaccacctacatag

SEQ ID NO: 242076 - DNA, 20724 bp, synthetic construct
  misc_feature 1..20724: note = Description of Artificial Sequence: Synthetic coding sequence
  source 1..20724: mol_type = other DNA
atggctagctctcctgaactcccgaccgaagatgagcagggctcctggggaatcgacgatctgcatattagcctccaggcggagcaggaggacacccagaagaaggcctttacatgttggattaattcccagctggcacggcatacaagtccttccgttatctcagatctgtttacagacattaaaaaagggcacgtcctgctggatctcctcgaggtcctgtccggacaacagctaccaagggacaagggatccaatacattccagtgtaggatcaatatagaacatgctctgacattcctgcgtaataggtccattaaactgatcaatatccacgtgacagatattattgacggaaatccaagtatcatcctaggcctcatctggactataatactgcactttcatattgaaaagctggcccagaccctttcctgcaactataatcagcctagcctagacgacgtgagtgtagtggattcctcccccgcttcatcccctcctgcgaagaaatgttctaaagtacaggcccgttggcagatgagcgccaggaaagctttgctgctgtgggcacaggagcaatgcgcgacatacgaatcggtcaatgtgacagacttcaagtcttcgtggcggaacgggatggcattcctggcaatcatccacgcgctcagaccagacttgatcgatatgaagtctgtcaagcaccgatccaacaaggacaacctgcgagaggccttccgcatcgccgagcaggagctcaaaattccccgactcctggagcctgaagacgtcgatgtcgtggatcctgacgagaaatctattatgacctacgtggcccaatttttgcagtatagtaaggacgcccctggcacgggggaagaggcacaagggaaagttaaagacgccatgggttggctcacgctccagaaagagaagctccagaaactgctgaaggattccgagaacgacacatattttaaaaagtacaactctctgctgagctttatggagtcatttaatgaagagaaaaaatcttttctggacgtgctgagcataaagagagacctggacgagttagacaaagatcatttgcaactaagagaagcatgggacgggttggaccaccaaattaatgcttggaagatcaagctgaattacgctttgcccccacctctgcatcagaccgaggcgtggctgcaggaggtcgaggagttaatggatgaagatttgagcgccagccaggaccattcacaggctgtcaccctcattcaggagaagatgactctgttcaagtcccttatggaccgcttcgagcaccatagcaatattctattgactttcgagaataaggatgagaaccacctccctcttgttcctcccaacaagttggaagagatgaagcggcgaatcaacaatattctggagaaaaaattcattctgcttctcgagttccattattataaatgcctggtcctggggttggtggacgaagtcaagagcaagctggacatttggaatattaaatatggctcccgcgaaagcgtggaactgctcttggaggactggcacaagtttattgaagagaaggaattcctggcaagacttgacacatctttccagaaatgcggcgagatctacaaaaatttggccggagagtgtcagaatatcaacaaacagtacatgatggtgaagagcgacgtttgcatgtaccgcaagaacatatacaatgtcaagagcactttgcagaaggtgcttgcctgttgggctacctacgtcgaaaatctccgcctcctccgcgcttgttttgaggagacaaagaaagaggaaatcaaggaggtgcctttcgagacattggctcaatggaatcttgagcacgccacactcaatgaggccggtaacttcctggttgaggtaagcaacgatgtcgtaggaagctctatctcaaaggagcttcgcaggctaaataaacggtggcgcaaattggtaagtaaaacccagctggaaatgaacctgcctcttatgatcaaaaaacaggaccagcctactttcgataacagcggtaacattctgtccaaggaggaaaaagccaccgtagaattctctactgacatgagcgttgagttaccagagaactataaccagaacattaaggccggtgagaaacacgaaaaggagaatgaagagttcacaggacagctgaaagttgcgaaagacgtggaaaaactaattggacaagtagaaatatgggaagccgaagccaagagtgttctcgatcaggatgatgtcgatacgagcatggaggaatcgttgaagcaccttatcgctaagggttctatgttcgacgagttgatggccaggagtgaagacatgcttcagatggacattcaaaacatcagctctcaggagtcctttcaacatgtgctcaccacaggactgcaagcaaagattcaagaggccaaagaaaaggttcagatcaatgtggtcaagcttatcgcagcacttaagaacctgaccgatgtttcacctgatctggatatcaggctgaagatggaagaatctcagaaagagctggagtcatatatgatgcgtgctcagcaactgctaggccagcgggaatccccaggtgaactgatttctaaacataaagaggccctgatcatatcaaacacgaaaagcctggccaagtacctgaaggcagtggaagaactgaaaaacaacgttaccgaggatattaaaatgagcttggaggagaaaagtcgtgacgtttgtgccaagtgggaaagcctgcaccatgagctgtcactatatgtccaacaactaaaaattgatattgaaaaaggcaagctttctgacaatatcctgaaacttgagaagcagatcaataaagagaagaaacttataagacgcggacggacaaaagggttgatcaaagagcatgaggcatgtttctccgaggaaggttgcttataccagctgaatcaccacatggaggtgttgagagaattatgtgaggaactgcccagtcaaaagtcccagcaggaggtaaaaagactgctgaaggattacgagcaaaagatcgagaggctcctcaagtgcgcttcagaaatccatatgaccctacagccaactgccggaggaacttccaaaaacgaggggactatcacaacgtctgaaaatcgtggtggggacccacacagtgaagcaccattcgctaagtcagataaccaaccatctaccgagaaggctatggaacccacgatgaaattctcgctggccagtgtactccggcctctgcaggaagaaagcatcatggaaaaagactatagcgcatcaataaactcactgctggagaggtacgacacttaccgggacatcctggagcaccacttgcaaaataacaagtttcgtatcaccagtgatttctcctccgaggaggaccgatcttcttcttgtctgcaggcgaaactaacagatctccaggtgatcaagaatgaaactgacgcccgatggaaggaattcgaaatcattagcttaaaactggagaatcatgtgaatgatattaagaaaccctttgtcattaaggagagggatacacttaaggagagagaaagagagctgcagatgactctgaacactcgcatggagtcccttgagactgccttacggctggttctaccagtggagaaggcaagcttgctcttatgcggcagcgacctgcccctgcataagatggccattcaggggtttcacctgattgacgctgaccgcatctatcagcacctgcgaaacatccaggacagcatagccaaacaaatcgagatatgtaacaggctggaagaacccggaaacttcgtactgaaggaactccaccccttcgacctccatgctatgcaaaacatcatcctcaagtacaagactcagttcgagggcatgaatcatcgcgtccaaaggtcagaggacactctcaaagccttggaggatttcctggcctcccttcggacagcaaaactttccgcggaacccgttacggacctgagcgctagcgacacccaagtggctcaggagaatacactgacagtgaaaaacaaggaaggagagatccacttaatgaaagacaaagctaaacatctcgacaaatgcttgaagatgttagacatgagctttaaagacgccgaacggggtgacgataccagctgtgagaacttgctggacgcctttagcattaagttaagtgagacacacgggtatggagtccaggaggagtttacggaagaaaataagctgctggaagcctgtatattcaaaaataacgaacttctgaaaaacatccaggacgttcagagtcagatctctaagattggcttaaaggatccgaccgttcccgctgtcaaacatcgcaagaaaagcttgatccgcttggacaaggtgctagacgagtacgaggaggagaaaagacatctacaagagatggctaactccctgccacattttaaggatggccgagaaaaaaccgtgaatcagcaatgccaaaatacggtggtcttgtgggagaatacaaaggccctcgttacggagtgcctggaacagtgtgggagagtactggaactgctcaagcagtatcagaattttaaatcgatactaacaaccttaattcagaaagaagagtccgtaatctctttgcaggcctcctacatgggtaaagagaacctgaaaaaaagaattgccgagattgaaattgttaaggaggagttcaacgagcatttggaagttgtggacaagatcaatcaggtgtgcaagaatcttcaattctatctcaataagatgaagacattcgaagagccgccttttgagaaggaagcaaacataatcgtcgaccgctggctcgatatcaatgagaaaaccgaggactattacgagaacctggggagagccctagcactttgggacaagttatttaatctcaaaaatgtgattgacgaatggactgagaaggccctccagaagatggaacttcaccagctgaccgaagaggaccgagagcggctgaaggaagagttgcaggtgcacgagcaaaagacatccgaattctcacgaagagttgcggaaatccaatttctactccaaagcagcgagatccctctcgagctacaggttatggaatcctcgattctgaacaaaatggaacacgttcagaaatgccttaccggcgaatcaaactgtcatgccttatcaggttcgaccgccgagctgcgggaagacctggaccaggccaagactcagataggaatgactgagtcattattgaaggccctttcaccttctgacagtttagagatttttacaaaactggaggagatccagcagcagatcttgcagcaaaaacacagtatgattcttctcgaaaaccaaataggttgcctgacgccagaactgtcagaattaaaaaaacagtacgagagcgtgagcgatctgtttaacactaagaagtccgtcctgcaagatcacttctccaaactgctgaacgatcagtgtaagaattttaacgattggttttccaatatcaaggtaaacttgaaggaatgcttcgagtctagcgaaactaagaagagtgtcgagcagaagttgcagaaactatcagatttccttacactcgagggacgcaatagcaaaataaaacaggttgacagtgtgctcaaacacgtgaagaagcatctccccaaggcccacgtaaaggaacttatctcatggcttgttggacaggagtttgagctcgagaagatggaatccatctgccaggccagagccaaagagctggaggattctctgcagcagttgctgagactgcaagatgaccatagaaatcttaggaagtggctgaccaatcaggaagagaaatggaaaggaatggaagaacccggtgagaaaaccgagctgttctgccaggccctcgcgcgaaagcgcgagcagtttgagtccgtcgcccaattgaataattcactcaaggaatacggctttactgaggaagaagagatcatcatggaagccacatgccttatggacaggtaccagacactactccgtcagctttccgaaattgaggaggaagacaaactccttcccactgaagatcaaagctttaacgatttggctcatgacgtgattcactggatcaaagagatcaaagagtctttaatggtgctaaattcaagcgaggggaaaatgccactagaggaaagaatccagaagatcaaggaaatcatcctgttaaaaccggaaggtgacgcaaggattgaaaccatcatgaagcaggccgagtcctcagaggcaccattagtccagaaaactctgactgatatcagtaatcaatgggacaatacactccatttagcctccacatacctttctcaccaggagaagttactgctggagggggagaagtacctgcagagtaaggaggacctaagactgatgctgattgagctgaaaaagaagcaggaagcaggtttcgccctacagcacggcctccaggagaagaaagcacagctcaaaatctacaaaaaattcctgaaaaaagctcaagacctaactagtttgcttaaagaactgaagtctcagggtaactacctgcttgagtgcacaaagaatccgagtttctccgaagaaccatggctagaaattaaacacctgcatgagtctttattgcaacaacttcaagactcagttcagaacctggatggccacgttcgtgaacacgactcctatcaggtatgtgttaccgaccttaataccacactggataatttttctaaggagttcgtttctttttctgacaaacctgtcgaccagattgcagtagaagaaaaactccagaagttacaagagttggaaaacagactttccctgcaggatggcaccttgaagaagatcctggcgctcgctaaatcggtgaagcaaaatacaagctctgtgggtcagaagattattaaggacgatatcaagtctttgcagtgcaagcagaaagatttggagaaccgactggctagtgccaagcaagaaatggagtgttgcttgaacagcattctgaaatccaagcgctctacggagaagaagggaaagttcacactgcctggcagggaaaagcaagctaccagtgatgtgcaggagtcaacccaagagagcgccgctgtcgaaaaattagaggaagattgggagatcaacaaggactccgctgtcgagatggccatgtctaaacagctcagcttaaacgcgcaagagtccatgaagaatacagaggatgaaagaaaggtgaatgaactgcaaaaccagcctttagagcttgatacaatgctgcggaatgaacagctagaggaaattgaaaaactgtacacccagctggaggccaagaaggccgctatcaaaccattagaacagactgagtgtctcaataagactgagacaggcgcactggtgctgcataatatcggatactccgcacagcacctggataacttgctacaagcgctaattacattgaagaaaaataaagaaagtcaatactgcgtactccgtgactttcaggaatacttagcagcagtggagtcgtccatgaaagcacttctgacagacaaggaaagtctgaaagtgggcccacttgattccgtgacctatctggacaagatcaagaagtttattgccagcattgaaaaggagaaggactcgctgggcaacctcaagataaaatgggagaacctatccaatcacgtgacagacatggataagaagctcttagagtcgcagatcaaacagctcgaacacggttgggagcaggtggaacagcagattcagaaaaagtactcccaacaggtcgtggaatatgacgaatttacaaccctgatgaacaaagtgcaggacacggaaatcagcttacagcagcagcagcagcatctgcagctgcggctcaagagccctgaggagcgggctggaaatcagagcatgatagcactgaccacggatctgcaggctactaagcacggtttttccgtgctgaagggacaggccgagctgcagatgaaaagaatctggggcgaaaaagagaaaaagaacctggaggatggcattaacaacctgaagaagcaatgggagaccttagaacccttgcatttggaggcagaaaatcaaatcaaaaagtgcgatattcggaataagatgaaggagaccatattatgggctaagaacctgctgggggagttgaatccctcaatccccctccttcctgatgatatactcagtcagatcaggaaatgcaaagtgactcatgatggaatcttagctaggcagcagtccgtggagtccctggctgaggaagtgaaagataaagtgccatctctgactacctatgaggggagcgatctgaataacaccctggaagacctgaggaaccagtaccagatgctggtactgaagagtactcagcgaagccagcagttggaattcaagctggaggagaggtcgaactttttcgccattattaggaagttccagttaatggttcaggagtctgaaactcttataattcccagagtcgagaccgctgccaccgaagctgagctcaagcaccaccatgtgaccctggaggccagccagaaggagctccaggagatagactccgggatcagtacacacttgcaggagctcactaacatatacgaggagctcaatgtgtttgagaggctctttctcgaagatcagctgaagaatctcaaaatcagaacaaacaggatacaacggttcattcagaatacctgtaacgaagtggaacacaagataaaattttgcaggcaatttcacgagaagactagcgccctacaggaagaagctgactcaatccagagaaacgagttgctgttaaaccaagaagtgaacaagggcgtgaaagaagagatttacaatctgaaagatcgccttactgcaattaagtgttgcatcctccaagttttgaagctgaaaaaagtgtttgattacattggattgaactgggactttagtcagctcgaccagctgcagacacaggttttcgaaaaggaaaaggaattagaggaaaagatcaagcaactggatacttttgaggaagagcacgggaaatatcaagcccttctgtctaagatgcgtgctatagatctccagataaagaaaatgaccgaagttgtgctaaaggcccctgactctagccctgaaagccggaggctcaatgctcaaatactcagccagcgcattgagaaagccaaatgcctatgcgatgaaatcatcaaaaaacttaacgaaaacaagaccttcgatgattctttcaaggaaaaggagattttgcagattaagcttaacgctgaagagaacgacaaactgtacaaagtgctgcagaatatggtactagaacttagccccaaggagctcgatgaaaagaattgtcaggataaactcgagacttctcttcatgtgttgaatcagatcaagagtcagttgcagcagccactgctaatcaacttggagatcaagcatatccagaatgaaaaggacaactgcgaggctttccaggaacaggtttgggctgaaatgtgttctattaaggccgttaccgctatcgaaaaacagagggaagaaaatagttccgaggctagcgacgtagagactaaactccgagagttcgaggatctccagatgcaattaaatacttcaatcgatcttagaaccaacgtgctgaacgatgcctacgaaaatttgacacggtacaaggaggccgtgacacgagccgtggagtccatcactagtcttgaagctatcatcatcccataccgggttgacgtgggtaaccccgaggaatccctggagatgcccttgaggaagcaggaggagctggagagcacagttgcccatatacaggacttgaccgagaagcttggaatgatttccagtcccgaagccaagctgcagctgcaatacaccctgcaggagcttgtttccaagaacagtgccatgaaagaagcatttaaagcgcaggagactgaggccgaacgctacctagagaactacaagtgttatcgtaagatggaggaggacatctacaccaacctgagcaagatggaaaccgttttgggacagtccatgtcttcactgcctctctcctatcgggaagccttagagcgcctggagcagtctaaagcccttgtcagcaacttgatcagcaccaaggaggaactgatgaagctcagacagatcctcagactgctgagactccgttgtacggagaacgacggcatatgtttgctgaaaattgttagcgccctgtgggaaaagtggctgagtctgcttgaagctgccaaagaatgggaaatgtggtgcgaggagcttaaacaggaatggaagtttgtgtccgaggagattgagagggaggctattatcctcgacaatctccaagaggaactcccggagatctctaagaccaaagaagcagctactactgaagagctgagcgagcttctggactgtctgtgccaatatggcgaaaacgtcgaaaagcagcagctcttgcttacactcctgctgcaacgcataaggtctattcagaatgtgccagaatcatccggcgcagtagagactgtccccgctttccaagaaataactagcatgaaagagagatgcaacaaactgctgcagaaggtgcagaaaaacaaagaactagtccagaccgagatccaagaaagacactcttttacaaaggagatcatcgccttgaaaaacttttttcagcagactacgacctcatttcaaaacatggcttttcaggaccacccagagaagtcggagcaatttgaggagctccaaagcatcctgaaaaaagggaagcttacttttgaaaacatcatggaaaagctgcggattaagtactccgaaatgtacacaatcgtgcctgctgagatcgaatcccaggtggaggaatgtagaaaagccctcgaagacatcgacgagaaaatcagcaatgaagttttgaagagctctccttcctatgcaatgagaagaaaaattgaagagattaataacggactacataacgtcgagaaaatgctgcagcagaagtcaaaaaatattgagaaagctcaggagatacagaagaaaatgtgggatgaactagatctgtggcattcgaaattgaatgaactggactccgaggtgcaagacattgtggagcaggatccaggacaagctcaggaatggatggacaatctcatgatcccttttcagcagtaccaacaggtcagtcagagggcagagtgtaggacctcgcagttgaataaggccacggtaaagatggaagaatatagcgaccttctaaaatcaaccgaagcctggatcgagaacacttcccacctgctcgcaaatcccgctgactacgattccctgcggacattatcccaccatgcctccacagttcagatggctttggaggatagcgagcagaagcacaacctcctgcactctatctttatggatcttgaggacctttctatcatctttgagacggatgagctgacacagagcatccaggaactttcaaatcaggtaactgccctgcaacagaaaattatggagtctttgccacagattcagaggatggctgacgatgtggttgccattgagtctgaggtgaagagcatggagaaacgagtcagcaaaatcaagaccatccttctgagcaaggaaatattcgattttagtcccgaagaacacctcaaacacggggaagtgattctggagaatattcggcctatgaagaaaactatagccgagattgtttcctaccaggtagaactgagactgccccagacaggtatgaagccgctgcctgtgtttcagcgaacaaatcagctgctgcaggatattaaactgttggaaaacgtaacgcaggagcagaatgagttgctgaaggtggtgataaaacagacaaatgagtgggatgaagaaattgagaatcttaagcagatcctgaacaattatagtgcacagttttcccttgagcacatgagtcccgaccaggcagataaattgccgcaactccagggcgagatagagcggatggagaaacagatcctgtccctgaaccagcggaaagaggatctcttagtggatctgaaagccacggttcttaatttgcatcagcacctgaagcaggagcaagaaggcgtggagagggacagattaccggctgtcacaagcgaggaaggcggagtcgccgaacgcgacgcctccgaacgaaaactgaaccgcaggggttcaatgagctacttagctgccgtagaagaggaagtggaagaatcctccgtcaaatctgacaacggtgatgagaaagccgagccttccccacaaagctggtccagcctgtggaagcatgacaaagacatggaggaggaccgcgctagttcctcctcaggaacaattgttcaggaagcatacgggaagatttccacctctgataacagtatggcccagatattgacacctgacagccttaacacagaacagggacccgaatgctctttacgtcctaaccagacagaggaggggaccacgcctcctatcgaggccgatactctcgactcttcagatgcacagggcggacttgagcctcgtgtggagaagacccgcccagaacccactgaagtacttcatgcatgcaaaactcaggttgcagaactggagttgtggcttcagcaggcgaatgttgcagtcgaacccgaaactctcaacgccgacatgcagcaggtgctagaacaacaactggtgggatgtcaggcaatgttaaccgagatagaacataaggttgcgttcctgctggaaacatgcaaagaccagggactgggagataacggcgcaacacaacacgaagccgaagctctttctcttaagctgaagactgtcaagtgtaatttagagaaagtgcagatgatgctgcaggagaagcactcagaggatcagcatcccacaattctgaagaaaagtagcgaacccgaacaccaggaggctctgcagcccgtaaatttgagcgagctggaaagtatagtgactgagcgtccccagttcagtaggcagaaagacttccagcaacagcaggtattggaactgaagcccatggaacagaaggatttcataaagttcatcgagtttaacgccaaaaagatgtggccccagtactgtcagcacgacaacgataccacccaggagagcagcgcatccaatcaagcttcgagtcctgagaacgacgtaccggactctatcttaagcccgcagggtcagaatggggacaagtggcaatatctccaccacgagctgtccagcaagatcaagctgcctcttccccagctcgtcgagcctcaggttagcaccaacatgggcattctgccttcagtgactatgtacaatttccgatatcctaccaccgaggagctgaagacttacactactcagctcgaggacctcagacaggaggccagtaacctgcaaactcaggaaaacatgactgaggaagcttatatcaatttagacaaaaagctcttcgaactttttttaacactgtcccagtgtctttcgtccgttgaggagatgttggagatgccacgcctgtacagggaggatggttcaggccagcaagtgcattatgagaccctggccctagaactaaagaaactctacctcgccttgagcgataaaaagggcgacctgttgaaggccatgacttggcccggtgagaacacaaacttgctcctggagtgctttgacaatctgcaggtctgtttggagcacacacaggccgctgccgtttgccgcagcaagtcactgaaggcaggcctggactacaatagaagctaccaaaatgaaataaagcggctgtaccaccagttgatcaaatccaaaaccagcctccaacagtccctgaacgaaataagcggtcagagtgtggccgaacaactgcagaaagcagatgcgtacaccgtagaattggaaaacgcagaatctagggttgccaagcttagggacgaaggtgaacgcctacacctgccttacgctttgctccaagaagtctataagctcgaggacgtcctcgattcaatgtgggggatgctcagggcccgatatacagagttgtcatctccattcgtcacagagtcccagcaagacgcactgctgcaggggatggtcgaactggtaaaaatcggaaaggaaaagctggcacacggccatttaaaacagaccaagtctaaggtcgctctacaagcacagatcgaaaaccacaaagtcttctttcagaagcttgtggcagatatgttactgatccaggcgtacagtgctaagatcctcccatctttgctccaaaaccgggagacgttttgggccgagcaggtgacagaggtgaaaatccttgaagagaagagccgacagtgcgggatgaaattgcaatcccttctgcagaaatgggaggaattcgacgaaaactatgccagcttagaaaaagacttggagattctgatctcgactttgccgtctgtttctttggtggaagaaaccgaggagcgtttagtggagaggatctcattctatcaacagattaagcgcaacataggcggaaagcacgccagactgtatcagaccctcaatgagggcaagcagctggtcgcttcggtgagctgtcctgagctggaaggccagattgctaaactagaggagcagtggctgtccctcaataaaaaaatcgatcacgaactgcaccggctacaggccttgctcaaacatctgcttagctacaatcgggactctgatcagctcacaaagtggctcgagtcttcgcaacacacactgaactactggaaggagcagtcactgaacgtctctcaggacctggacacaattcggagcaatatcaataacttttttgagttttcaaaagaggtagatgaaaagagctccctaaagaccgcagtgatctcgattggaaaccagctgctgcatttgaaggagactgatacggctactttacgtgcttccttggcccagtttgaacagaaatggaccatgctaattacccagctgccagatatccaggagaaactccaccagctccagatggaaaagcttccaagtcggaaggccataacagagatgattagctggatgaacaatgtagagcaccagaccagtgatgaggactccgtgcactcacccagctccgcatcccaggtcaaacatttgctgcagaaacataaagaattcaggatggaaatggactacaagcaatggatcgtggactttgttaaccagtccctgctgcagctctctacttgcgatgtggagtcaaagcgttacgaacgaactgaattcgcggagcatttgggcgaaatgaataggcagtggcacagggtccatgggatgctcaaccggaagatacagcacctcgagcaacttctggagagtattaccgagagcgagaacaagattcagattctgaacaactggcttgaggctcaggaggagaggctcaaaacactgcagaagcccgaatccgtgatttccgtgcaaaaactcctgctggattgtcaggacattgagaaccagctggcaatcaagtctaaggcactggacgagttgaagcagagctatctcacccttgagtccggcgctgtaccactccttgaagatacagcctcaaggattgacgaattgttccagaagagatcgtccgttctgacccaggttaaccagctaaagaccagcatgcagagtgtattacaagagtggaagatatacgaccagctctacgatgaggtgaacatgatgactatacgcttctggtactgcatggagcacagcaagccagttgtgttatcgctcgaaacgttgcgctgtcaagtcgagaatctgcagtctcttcaggacgaggccgagtctagcgaaggctcatgggagaagctgcaggaagtgattggaaagctgaaaggactgtgccccagcgttgcagaaatcatcgaagagaagtgccagaacacacataaacggtggacacaggtcaaccaggccatagccgatcagcttcagaaggcacagtcgctcctacaactgtggaaggcgtatagtaacgctcatggtgaagcagcagccaggctgaagcagcaagaagccaaattccaacagttggcgaacattagtatgtccggaaacaacttggcagagattctccccccagcgctgcaggacatcaaagagctgcagcacgacgttcagaaaacgaaagaggccttcctgcagaattctagtgtactcgaccgactcccccagcccgcagagagttcaacgcacatgctgttaccaggacctctccattcccttcagcgcgctgcgtatctggagaagatgctgctcgtgaaagcaaatgaattcgaatttgtgctgagccagttcaaggactttggcgtgagattggagtcacttaagggactgatcatgcacgaagaagaaaacctcgatcgccttcatcaacaggaaaaggagaatcccgactctttcctcaatcatgtgttagccctgacggcgcagagtcctgacatcgagcacctgaacgaggtctccctcaagctgcctctgtccgacgtcgcggtgaagactctccagaacatgaataggcaatggatccgggcaacggccaccgcactggagcgctgctcagagttgcagggcatcggattgaacgagaaattcctgtactgctgcgagaagtggatacagctactcgagaaaattgaggaggcactcaaagtggatgtggccaattcgctgcccgagctgctggagcagcaaaagacgtataagatgctggaggctgaagtaagtattaatcagacaatcgccgattcctacgtgactcagagcttgcagctgttagataccaccgagattgagaatcgcccagagtttatcaccgaatttagcaagctgacagatcgttggcagaacgcagtgcagggggtacgtcagcggaaaggggatgtggacggactcgtgcgtcagtggcaagacttcacaacctccgtggagaatttgtttaggttccttaccgatactagccacttgctgagtgccgtgaagggccaagaacggttctctctataccaaactaggagcctgattcacgaacttaagaacaaggaaatccactttcaacgaaggcggacaacctgcgcccttactctggaagccggagagaagctgttgctgaccacagacctgaagaccaaagagtcagtaggaagaagaatcagtcagctacaggattcttggaaggacatggaacctcagttggctgagatgatcaaacaatttcagtccaccgtggagacatgggaccaatgcgagaagaaaatcaaggagctgaagtctcgcctgcaggtcttaaaggcccagtcagaagatcccctacctgaactgcacgaggatctccacaatgagaaggaactgatcaaagagctggagcagtctctggcgtcttggacgcagaacttaaaggagctgcaaactatgaaagcagaccttacaaggcacgtgttagtggaagatgtaatggtgctgaaagagcagattgagcacctgcacagacaatgggaagatctttgcctaagggtcgccattaggaagcaggagattgaggacaggctgaacacgtgggtggtttttaacgagaagaataaggaactgtgtgcatggctggtacagatggagaataaggttctccagaccgccgacatttccatcgaagagatgatcgaaaagttacagaaggactgcatggaggagatcaatttattttcagagaataagctgcagctgaagcagatgggtgatcagctgatcaaggccagcaataaatcccgtgcagccgaaattgacgacaaactgaacaagataaatgatagatggcagcatctgttcgacgtgatcgggtcaagggtgaagaaactgaaggaaacattcgcctttattcaacaacttgataagaatatgtccaatttgagaacctggctcgcacggatcgagtccgagctgtcaaaaccggtggtctacgacgtttgcgatgaccaggagatccagaagcggcttgccgagcagcaggatttacagagagatatcgaacagcacagcgcgggtgtggagtctgtattcaatatctgcgacgttctcctgcacgactcggacgcctgcgccaacgagacagagtgtgactctattcagcagactacccggtccttagatagacgctggcgaaacatttgtgccatgagcatggagcgcagaatgaagatcgaggagacttggcgtttatggcagaagtttctggacgattattctcgctttgaagattggctgaaaagtgccgaaagaaccgccgcatgcccaaactcctctgaagttctgtacacctctgcaaaggaagagctgaaacgttttgaggcctttcagcgccagattcacgagcgcctgacccaattggagctgattaacaagcagtatcggagactcgctcgcgaaaacagaactgacactgcatcacggctgaagcaaatggtgcacgaggggaaccaaagatgggacaacctgcagaggagggtcacagccgtcttgcgcaggttgcggcatttcacaaatcagcgcgaggaatttgaaggcacgcgcgaaagtatactagtgtggcttaccgaaatggatttacagctcacaaacgttgagcacttctcagagtctgacgctgacgataaaatgagacaacttaatggcttccagcaggaaatcacactgaataccaacaaaattgatcagcttatcgtgtttggggaacaattgattcagaagagcgagccacttgatgctgtgctgattgaggatgagcttgaggagctgcatcggtactgccaagaggtgttcggtagagtctcccggttccatagacgcttgacaagttgtactcccggactggaagacgagaaggaggccagtgaaaacgaaacagatatggaggatccaagagagattcagacagatagctggcggaagcgaggggaaagcgaggagcccagcagcccacagtctttgtgtcatttagtcgcccctgggcacgagaggagcggctgcgaaacaccagtttctgtggactctatcccactggagtgggaccacacaggggatgtgggaggaagctcaagccatgaagaggatgaggagggaccttattattcagcgctctccgacgtggagatcccagaaaaccccgaagcctatctgaaaatgaccaccaaaactctcaaagcttctagtggaaagagcatctctgacggtcattcttggcacgttccggacagtcccagctgtcctgagcaccactacaagcagatggagggagaccgcaatgtaccacctgtcccacctgcttcctccacaccttacaagccaccttacgggaagctgctgcttcctcccggaaccgatggcggaaaggaggggcctcgggtactcaacgggaaccctcaacaagaggacggcggattagcaggaatcacggagcaacagtccggtgccttcgaccgctgggaaatgatccaggctcaggaactacataataagctcaagatcaagcaaaatctccagcagctcaattctgatatctctgctatcaccacatggctcaagaaaactgaggccgagctagagatgctgaaaatggcaaaaccacctagcgacattcaggaaatcgagttgcgtgttaagcgactgcaggaaatcctcaaggcttttgacacctacaaggccctggttgtctctgtgaacgtgagttctaaggaatttttgcaaactgagtctccagaaagtaccgagttgcagagcaggctgcgacaattaagtttactttgggaggcagctcagggggctgttgattcgtggcggggaggcctgaggcagagcctgatgcagtgtcaggatttccaccaactttcacagaatctgctcctctggctcgcatccgctaaaaacagaagacagaaagcccacgtgaccgacccaaaggctgaccctagagccctgctggagtgtcgcagggaactgatgcagctggagaaggagctggtagagcggcaaccgcaagtggatatgcttcaggagatctcaaatagcttactgattaagggacacggcgaggattgcattgaggcagaagagaaggtgcacgtcattgaaaagaagctgaagcagctccgcgaacaggtcagtcaagacttgatggcattacagggcactcagaatccagccagtcctcttccttcgttcgacgaggttgatagtggggaccagccccctgccacgtctgtcccagccccaagggccaagttcagggccgtccgcacgacggagggggaggaagaaacagaatctagggtgccagggtctacccgtccacaacggagttttctgagcagggtggtgcgagcagctctgccacttcagctgctcctgttgctcctgctgcttcttgcatgcttgcttcccagttctgaggaggattacagctgtacccaggccaataattttgcccgaagcttttaccctatgctacgatataccaatggaccccctccaacctaa

SEQ ID NO: 242077 - DNA, 9812 bp, synthetic construct
  misc_feature 1..9812: note = Description of Artificial Sequence: Synthetic coding sequence
  source 1..9812: mol_type = other DNA
atggagaaactgaggattaagtactcagagatgtataccattgttcctgctgagatcgaaagtcaggttgaagaatgtcgcaaagccttagaagacattgacgagaaaatttctaatgaggtgttaaagtcatctccgagttacgcaatgaggaggaagatagaggagattaacaacggactccataatgtggaaaaaatgctccaacagaagagcaagaacattgagaaagcccaggagatacaaaagaagatgtgggatgagctggatctgtggcactctaagctgaatgaactggactctgaggtgcaggacattgtggaacaggatccaggtcaggcccaagaatggatggacaacttgatgatcccttttcagcagtaccagcaagtttcacagagagctgagtgccgcacaagccaattaaataaggccacggtcaagatggaggaatacagcgacctcctcaagagtactgaagcatggatcgaaaatacctctcacctgttggccaaccccgctgactatgatagcctgcgcacactcagtcatcacgcctccaccgtccaggactccaaatgttttcggagcggcccaagacctaacatatacgtgtcctattatgtaaccgtcatccagatggctctggaagacagtgaacaaaaacacaatcttctccattctatttttatggatttggaagacctgtcgatcatctttgagacagacgagctgacacaatctatacaggagctctcaaaccaggtaactgctcttcaacaaaagatcatggagagcctgcctcaaatccagaggatggccgatgatgtggtcgcgattgagagcgaggtgaagagtatggagaaaagggtgtccaagattaagaccatcctgttgtctaaggagatcttcgatttctccccagaagagcacctgaagcatggggaagttatactcgaaaatataaggcctatgaaaaaaaccattgctgagatcgtaagctaccaggtggagttacggctaccacagactgggatgaaaccactgcctgtttttcagagaaccaaccaactgctacaggatatcaagttattggagaatgtgacccaagaacaaaacgagcttttgaaggtagttatcaagcagactaatgagtgggacgaggagatcgagaatctgaagcagattctgaataattactcggctcaattctcccttgagcacatgtcccctgatcaagccgataagctcccacagctccaaggcgagatcgagaggatggaaaagcagatcctgtctttaaaccagaggaaagaggatcttttggtagacctgaaggccactgtcttaaacctccatcaacacctcaagcaggaacaggagggagtggagcgggacaggctgcccgctgtgaccagtgaggagggtggagtcgccgaacgagacgcttctgaacgaaaactgaacagacggggatccatgtcatacctcgccgcagttgaagaggaggtcgaggagtcctctgtgaagtccgacaacggagacgagaaggcagaaccttccccgcaaagctggtctagcttgtggaaacacgataaagacatggaggaggaccgcgcaagctcttcttcagggaccattgtccaggaggcttacggcaagatttccacttctgataatagcatggcccagattctgaccccagatagcctgaatacggagcagggccctgagtgctcgcttcgacctaatcagaccgaggagggtaccacgcccccaattgaggccgatactttggatagctcagacgctcagggcggattggagcctagggttgaaaagacgagaccagaacccacagaagtcctgcatgcatgcaaaacacaagtggcggagttggaattgtggctgcaacaggcaaatgtcgccgtggaacccgagacactaaatgccgatatgcagcaagtgctggagcagcagttggtgggatgccaggcaatgctgacagaaatagaacacaaggtggcattcctcctcgagacatgtaaggatcagggcctcggcgacaacggtgcaacccagcatgaggcggaggccttgtctctaaaactgaaaaccgtgaagtgtaacctggagaaagtgcagatgatgctgcaggagaagcattccgaggaccagcatccaactattctgaagaagagttctgaacctgagcatcaggaagctctccaaccagtgaacctgtctgagctggaatctatcgtgaccgagcggccacagttttctcggcagaaggacttccagcagcagcaggtgctagaattgaagccgatggaacagaaggatttcattaagttcatcgaattcaatgccaaaaagatgtggcctcagtactgccagcatgataacgacaccacccaggaatcatctgcgagtaaccaggcctctagccctgagaacgacgtacccgattcaatcctgtctcctcaaggacagaatggcgacaaatggcagtatctccaccacgaactgagttctaaaattaagctccctttaccccagctggtagagccacaggtctcgacaaacatgggcatcctgccgtctgttactatgtacaacttcagatacccaacaacagaggagctgaagacttacacaacgcagttagaagacctgagacaggaggctagcaatctacagacacaggagaatatgacagaggaggcttatatcaaccttgacaagaagttgttcgagctgttcctcacactgtctcagtgcctgtctagtgtggaggaaatgttggagatgccaagactttaccgggaggatggatctggacagcaagttcactacgaaacgcttgccttggaactgaagaagctttaccttgcacttagcgacaaaaagggagatctgctgaaagctatgacgtggcctggggagaatactaacctgctgcttgagtgcttcgataacctgcaggtttgcttggaacatacacaggctgctgctgtgtgcaggtctaaatccctgaaagccggtctggactataatcggagttatcaaaatgagattaagaggctttatcaccagcttatcaagagcaagaccagcttacagcagagtctcaacgagatctccggccagtccgtggcggaacaactccagaaagccgatgcttacacggtcgagttggagaacgccgaaagtagggtggctaagttgagagatgaaggggagaggctgcacctgccttacgccctcttgcaagaggtgtataaactagaagacgtacttgattctatgtggggtatgctgagagcccgttacacagagctgtctagcccattcgtgaccgagtcccagcaagacgcactgctgcaggggatggttgaactggtcaaaatcgggaaagaaaaactggcgcacgggcatttgaaacaaacaaaatccaaggtggcactgcaggcccagattgagaaccataaggtgtttttccagaagttggtcgctgacatgttgcttattcaggcttattctgctaaaatactcccctctttacttcagaaccgcgaaacattctgggcggagcaagtgacagaggtgaaaatcctggaggagaagagccggcagtgcggtatgaaactgcagagtcttctccaaaaatgggaggaattcgacgaaaactatgcatccttagagaaagatttagaaattctgatctcaaccctgccgagtgtatcactcgtggaggaaactgaggagagactggtggagcgtatctcattctaccagcaaatcaaaagaaacatcgggggtaaacatgcgagactgtatcagaccctgaacgaaggtaagcagttagtggcgtcagtcagctgccccgaactcgaaggccaaattgccaaactcgaagagcagtggctgtcactgaacaagaaaatcgaccatgagttgcatcgccttcaggctctcctgaagcacctgctgtcctataaccgcgacagcgaccagcttaccaagtggctggagagtagccaacatactctgaactattggaaggagcaatctctgaatgtgagccaggacctggacacaattaggagcaacattaacaattttttcgagttcagcaaagaggtggacgagaaatcatctctcaaaacggcggtgatctctataggtaatcagctcttacacttaaaggagacggacacagctactctgcgggcaagcctggctcagtttgagcaaaaatggacaatgctcattacccaactgcctgacatccaggagaagcttcaccaattacagatggagaaactcccttctcgtaaggccattacagagatgatctcctggatgaacaacgtggagcaccagacttccgacgaagactcagtgcactccccgtcctccgctagtcaggtgaaacatctgttgcagaagcataaggagttccgtatggaaatggattacaaacagtggattgtcgactttgtgaaccagagcttgctccagctgtcaacttgcgatgtcgagtctaagaggtacgagcggacagagtttgcagagcaccttggagagatgaatcgccagtggcacagagtgcacggaatgctcaaccgaaagatccagcacctcgaacagctccttgagagcattaccgagagcgagaacaaaatccagattttaaacaactggcttgaggcccaggaagagaggctgaaaaccctgcaaaaacccgagtccgtgatctccgtccagaaactcctgctagactgccaggacatcgaaaaccagctcgcaatcaagtccaaggccttggacgagctaaaacagagctatcttacactggaatccggcgctgttcccctcctcgaggatacggccagccggatcgacgagctcttccagaagcgaagctccgtcctgacccaggtcaatcagctgaagacgtcaatgcaatctgtgttgcaagaatggaagatttatgaccagctgtacgatgaagtcaatatgatgacaatcagattttggtactgcatggagcacagtaaaccggtcgttctgagcctggagaccctgagatgccaggtggagaacctgcaaagtctccaggatgaagccgagagctccgagggctcgtgggagaaactgcaagaggtcattggtaagttgaaaggtctctgtccctccgtagccgaaatcatcgaggagaaatgccagaacacacacaaacgttggacgcaggtgaaccaggccatcgccgaccagcttcaaaaggcacagtctttactgcaactgtggaaagcctacagcaacgctcacggagaggccgcagctagactgaaacaacaggaggctaagttccagcagcttgcaaacatttccatgtctggcaataatctggctgaaatccttccacccgctttgcaggacatcaaagaactgcagcacgacgtccaaaagactaaagaggcattcttgcagaacagctccgttctggacagactgccacagcctgctgagagctctacccacatgctgctccccggtcctctgcactctctccaaagagccgcataccttgaaaaaatgcttctagttaaggcaaatgaattcgagttcgttctttcacaattcaaagatttcggggtgcgattggaaagcctgaagggtctgattatgcatgaggaggagaatctggaccgcctccaccagcaagagaaggaaaatcctgattcgtttctgaatcatgtactcgcactgaccgctcagtccccggacatagagcaccttaacgaagtgagcttaaagttgccacttagcgacgtagccgtcaagacccttcagaacatgaatagacagtggatccgagcgacagccactgcgttggagcggtgtagcgagctgcagggaataggactgaacgagaaattcctctactgttgtgaaaaatggatccagctgttggagaaaatagaagaggccctgaaggtcgacgtcgccaatagcctgcctgagctgctggagcaacaaaagacgtataaaatgcttgaggccgaagtgtctattaatcagaccatcgccgactcctatgtcactcagagtttgcagttgcttgacaccacagagatcgagaacagacccgagtttatcactgaattcagcaagttgactgacaggtggcagaatgccgtacagggtgtgcggcaaaggaaaggcgatgttgatggactggtgaggcaatggcaagattttacaactagcgttgaaaatctgtttaggtttttaactgacacctcgcacctgctttcagccgtgaaaggacaggagagatttagtctttaccaaactcgctccttgatccacgagctgaaaaataaggagatacactttcaacgaaggcgcacgacctgtgcactgacactggaggcaggcgaaaaactgctactcactacggatctgaagacgaaggagagtgtcggtcgccgaatcagccagctccaggattcctggaaggatatggaaccccagctggccgaaatgattaagcaattccagagcactgtggaaacctgggatcagtgcgaaaagaagattaaagagctaaagtcacgcctgcaggtacttaaggcccagagcgaagatcctctgcctgagctacacgaggaccttcacaatgaaaaggagctgataaaggagttagagcagtcccttgcctcttggacacagaatctgaaagagctgcagactatgaaggcggacctcacccgccacgtgcttgttgaagacgtgatggtgctgaaagagcagatcgagcacctacaccgccaatgggaggatttgtgtctcagggtagctatccgaaagcaagagatcgaggatcgcctaaacacctgggttgtttttaacgaaaaaaataaagagttatgtgcctggctggtccaaatggaaaacaaagtcctccagacagccgatatctctatcgaggagatgattgagaaactccaaaaagactgcatggaagaaattaacctattctcagagaataaattacagctgaagcagatgggcgaccagctcattaaggccagcaacaaaagccgtgccgcagaaatcgatgataaactgaacaagatcaacgatagatggcagcacctgttcgatgtgatcggatccagggtgaaaaagttaaaagagacctttgccttcattcaacagttagataaaaacatgagcaacctgaggacctggctcgccaggattgagtccgagttgtctaagccagtggtctatgatgtgtgtgatgaccaggagattcagaagcggctggcagagcagcaggacctgcagagggatattgagcagcatagtgccggagtcgagtccgtgttcaatatatgtgacgttttgctccacgactctgacgcttgcgccaacgagaccgagtgtgactccatccaacagactacccgcagcttagaccgcaggtggagaaatatttgtgctatgtctatggagcgccgaatgaagatagaggagacctggcggctctggcaaaagtttctggacgattacagtcggtttgaggactggctgaagtccgccgaaaggacagctgcatgtcctaattcctctgaggtgctttacacatccgccaaggaagaactcaaacggttcgaagcctttcagcgacagattcatgaacggctgactcagttggagctcattaataagcagtaccgcagactggccagagaaaatcgtacagacactgcctcacgcctgaaacagatggttcacgaaggcaaccagcgatgggacaacctgcagcggagagtgaccgctgtgctgagaagattgcgccactttactaatcagcgagaggagtttgaggggacgcgggagagcatcctggtatggctcactgaaatggatctgcaactgaccaacgttgagcattttagcgagtccgatgccgatgacaagatgagacaactgaatggatttcaacaggaaataaccttaaacacgaataagattgatcaactcatcgtattcggagagcaactcattcagaaatccgaaccgctcgatgctgtgctcattgaggacgagctggaggaactccatcgttattgtcaggaggtctttgggagagtcagcagatttcataggagattgacttcatgcacacctgggctggaggacgagaaagaggcgtctgagaacgaaactgatatggaagatcccagggaaatccagacagactcctggcgcaagcggggtgaatctgaggaaccttcatctccacaatctctttgccaccttgttgcgcctggacacgagcggtccggctgtgagaccccagtgagcgtagacagcattcccctggagtgggatcacaccggtgacgtcgggggatctagcagccatgaggaggatgaagagggtccttattacagcgctttgagtggcaaaagcattagtgatgggcacagttggcatgtgcccgattcaccctcatgcccagagcaccattacaaacaaatggagggtgaccgcaatgtgcctccggtgccccctgcctcctctaccccttataaaccaccttatggcaagctgctcctgcccccaggcacggacggcggaaaggaggggcctagagtcctcaacggcaaccctcagcaagaggatggagggctcgccggtataaccgagcagcagtcgggggcattcgatcgctgggagatgattcaggcccaggagctgcataacaaactcaagatcaaacagaatttgcaacagctgaatagcgatatcagtgcaattactacttggctaaaaaaaactgaagctgagttggagatgctgaagatggccaaacccccaagcgacattcaagaaatcgaactgcgggtgaaaagactacaggaaatcctcaaggctttcgacacctacaaggcacttgtggtttctgtcaatgtaagtagtaaagaattcctccagaccgagtctcccgaatctacagaactccagtccagactcaggcaactgtcgttgctatgggaggccgctcaaggtgcagtcgacagttggcgcggtggcctgaggcaatccctcatgcaatgccaggacttccatcagctgagccagaacttactcttgtggctcgccagtgccaaaaataggcgccagaaagcgcacgtaacggatcctaaagctgatcctcgggcactcctcgaatgccgtagggaactgatgcagctcgaaaaagagcttgtcgagcgccaaccccaagtggacatgctccaggagattagtaatagtctgctgattaaagggcacggcgaagactgcatagaagccgaggaaaaggttcatgtgattgaaaaaaagctcaagcagctgcgtgagcaggtgagtcaggatctcatggcgctgcaggggacccagaatcctgcctccccacttccttctttcgacgaagtcgacagcggagatcagccccctgccacgtccgtgccagctccccgtgcaaaacaatttcgggcagtgagaaccacagagggcgaggaggagacagaatctagggtgcctgggtctacacgaccacagagaagctttctcagccgggtcgtgagggccgctttaccattgcagttgcttctgcttctccttttgctgctcgcctgcctgctgccttccagcgaggaggactattcatgcacacaggccaataacttcgctcggagcttttatcccatgcttagatatactaatgggcctcctcctacgta

SEQ ID NO: 242078 - DNA, 1290 bp, synthetic construct
  misc_feature 1..1290: note = Description of Artificial Sequence: Synthetic coding sequence
  source 1..1290: mol_type = other DNA
atggaaggtgataggaacgttccaccagtgccaccggcatcttctaccccttataagcccccatacgggaagctactgctccctcccggtaccgacggcggtaaggagggaccacgcgttctaaacggcaaccctcagcaagaggacggcggattggcagggatcactgaacaacagtctggagccttcgacagatgggagatgattcaggctcaggaactgcacaataaactaaagatcaagcagaacctccagcagctgaacagcgacatcagtgctattacgacctggcttaagaagaccgaggctgaactggagatgctgaaaatggccaaaccaccttctgatatccaagagatagaactgagggtgaagcgcttacaggagatcttaaaggcttttgacacctacaaagctctcgtggtgtccgtgaatgttagtagtaaggagttcctgcaaactgaatcacccgagtctacagaactgcagagcaggcttcggcaacttagcctcctgtgggaagcggctcagggcgctgtggatagctggaggggcggtctccggcagagtctgatgcagtgtcaaggatctaagacacgacctcgcagcgacgtgctgttttttaaggatttccatcagctctcccagaacttgctgttatggctcgcgtccgctaaaaacagaagacagaaggcccacgtgactgatcctaaggcggatccgagagctttactggaatgccggagagaattgatgcaacttgaaaaagaactggttgagcggcaacctcaagtggacatgttacaggagattagcaacagcttattgataaaggggcatggggaggactgcattgaggctgaagagaaggtccatgtcattgaaaagaaactgaaacaactgagggaacaggtgagccaagatctaatggccctacagggcactcagaaccccgcttcccccctgccctccttcgatgaagtggacagcggggatcagcctccagctacttccgtgcctgctccaagggcgaaattcagggccgtgcgtacgactgagggggaggaggaaactgagtccagggtgcccggaagcactcgccctcaacgaagttttctctcgagagtagttagagcggctctccctctacaactcctcctgttattactgttactgctcgcttgcctgcttccaagctccgaggaggattattcgtgtacgcaggctaacaattttgccaggagcttttacccgatgctgcggtatactaacggcccacctccaacctag

SEQ ID NO: 242079 - DNA, 1671 bp, synthetic construct
  misc_feature 1..1671: note = Description of Artificial Sequence: Synthetic coding sequence
  source 1..1671: mol_type = other DNA
atggaagatcctcgagagattcaaaccgattcctggaggaaaagaggagaaagcgaggaaccatctagtccacaatctctgtgtcatctggttgctccaggacatgagcggagtgggtgcgaaacacccgttagcgtcgactccatcccactagaatgggaccataccggggatgttggtggaagttccagccatgaggaagacgaggaggggccatattacagcgcactgagcgatgttgaaattccagaaaatcctgaagcctacctgaaaatgaccactaaaacactgaaggcatcaagtggcaaaagtatctctgatggacactcgtggcacgtgcccgattccccttcttgccctgagcaccactacaagcaaatggagggcgacaggaatgtacctcccgtgcctcctgcaagcagtaccccttacaagccaccctatgggaaattgcttttgccccctggtacagatggcggtaaagaggggccaagagtactgaacggcaacccccagcaagaggatgggggattagcaggtatcaccgaacagcagagtggggcatttgaccgatgggaaatgattcaggcgcaggagctacacaacaagctgaagatcaaacagaaccttcagcagctgaactctgatattagcgccattaccacatggcttaaaaagactgaggctgaacttgaaatgctgaagatggcaaagcctccctcagacatccaggaaattgagttacgagtcaagaggcttcaggagatcctcaaagccttcgacacatataaagcgttagtggtgtccgtgaacgtgagctctaaagaattcctgcagaccgaatctcctgagagcaccgagctacagtcacggctccgacagctgtctttactgtgggaagcggctcagggcgctgtggatagctggcggggaggcttaaggcagagtcttatgcagtgtcaaggtagtaaaacaagacccaggtctgatgtattatttttcaaggactttcatcagctgtctcagaacctactgctgtggctggccagcgctaagaaccgccgacagaaggcccatgtgacggaccccaaggctgatcccagggcccttctggagtgtcggcgagagctcatgcagctggagaaggagctggtcgaaaggcagccacaagtggacatgctgcaggaaatcagtaacagcctgctgattaagggacacggtgaggactgtatcgaagccgaagaaaaagttcacgtgattgaaaaaaaactgaagcagttaagagaacaggtctcacaggatctgatggctctccaggggacgcagaatcctgcctcccctcttccgtcattcgatgaagtcgattctggcgaccagccccctgccacgtctgttccagcccctcgcgctaagcagttcagagcggtcaggactaccgagggcgaagaggagactgagtcccgggtgccaggctccacgaggccacagcggagcttcttgtctagagtcgtacgcgctgcgcttcctctacagttgttgctgctgctgctgctgcttctcgcctgtttgctgccatcaagtgaggaagactactcctgcacccaagctaataatttcgccagatctttctatccaatgttgcgttataccaatggcccacctcccacctag

SEQ ID NO: 242080 - DNA, 2007 bp, synthetic construct
  misc_feature 1..2007: note = Description of Artificial Sequence: Synthetic coding sequence
  source 1..2007: mol_type = other DNA
atggtccacgagggaaatcagcgctgggacaatctgcaacggagagtcaccgcagtcctgcggcgactgcgccattttactaaccagcgcgaggaattcgaggggacaagggagagtatccttgtgtggctgacagagatggatctacaattaaccaacgtggagcacttctctgaaagtgacgcagacgataagatgagacaactcaacggctttcagcaggaaattacgctgaacaccaacaagattgaccagctgatcgtatttggagagcagttaatccagaagagcgagcctttggatgcagtgctgatcgaggatgagctcgaggaactgcatagatattgtcaggaagtctttgggagggtttccagatttcatcgacggctgacaagttgtactcctggtctggaggatgagaaagaagcttctgagaatgaaactgatatggaggatccacgtgaaatccagactgactcatggaggaagcgcggagagtccgaagagccaagctcaccccagtcactgtgccatcttgtagcacctgggcacgaaagaagcgggtgcgaaactcccgtctccgttgactcaatcccactggagtgggatcatactggggatgttgggggaagctcaagtcacgaagaggatgaggagggaccctattatagtgcccttagcggaaagtccattagcgatgggcactcatggcacgtgcccgattctccctcttgccctgagcaccactacaaacagatggagggggataggaatgtccctcctgttcccccagcctcaagcactccatacaagcccccatacggaaagctactattgccgcctggaacagatggtgggaaggaagggcctagggttctgaacggaaatccgcagcaggaggatggtggccttgcaggaattaccgagcagcagagcggggcattcgacagatgggagatgatccaggcacaggaactgcacaataaactgaagatcaagcagaacctgcaacaactgaactcggacatcagtgcaattaccacctggctgaaaaagacagaagcggagctggaaatgcttaagatggcaaagccaccttccgatatacaggaaatcgagctgagagtcaagcgtctccaggagatccttaaagctttcgatacctataaggcgttggtggtcagtgtgaacgtcagttctaaggagtttttacagacagaaagccctgaatcaacagaactccagtccaggctgcgtcaattgagtctgttgtgggaggccgcacagggggcagtagactcctggagaggaggcctgcggcagtctttgatgcaatgtcaggatttccaccaactgtcgcagaacctactactgtggctggccagcgctaaaaaccgcagacagaaggcccatgtgaccgatcccaaagcagacccacgcgctttgctagaatgccggagagagctgatgcagttggaaaaggagctcgtggaacgacagccacaggtcgacatgctgcaggagattagtaattccttgcttatcaaagggcacggggaggactgcatcgaggcagaagaaaaggtgcacgtaatcgagaaaaaactgaaacagttgcgtgagcaagtgtctcaggacctgatggctttgcagggaacgcaaaatcccgcatcaccactcccaagtttcgacgaagtcgactcgggcgatcagcctcctgctacgtccgtgcccgctccacgcgcaaagcagttcagggccgtgcgaaccactgagggggaggaagagacagagtccagggtgccgggtagcacccggcctcagcgttccttcctgtcccgcgtagtcagagccgcactgcccctccagctgttactgctactcctactcctcctggcttgtttgctgccaagtagtgaggaagattattcctgcactcaagcaaacaattttgcccgaagcttctacccgatgttgcggtatactaacgggcctccacccacttag

SEQ ID NO: 242081 - DNA, 10626 bp, synthetic construct
  misc_feature 1..10626: note = Description of Artificial Sequence: Synthetic coding sequence
  source 1..10626: mol_type = other DNA
atggaagaagacatttacactaacctttccaagatggagactgtcttaggccagagcatgtcctccctaccactttcctatcgcgaggcgttagaacggctggagcagagtaaagcgcttgtaagcaatctgatcagtactaaagaagaactgatgaagttgaggcagattctgcggcttctgcgattgagatgtactgagaatgatggcatctgccttttgaaaattgtgagcgcactctgggagaagtggctatccctcctcgaagcagcaaaggagtgggaaatgtggtgcgaggagctcaaacaagagtggaagtttgtgagcgaagaaattgagagagaggcaatcatcttggataatctgcaggaagagctgcctgaaatatcaaagactaaggaggctgcgaccaccgaggagcttagtgagcttctcgactgcttgtgccagtacggcgaaaacgtggaaaagcaacagctgctactgacgctccttctgcagcggataaggtccattcagaatgtgcctgagtcctccggagccgtcgaaactgtaccagccttccaagagattacatctatgaaggagagatgcaataaactgctacaaaaggtccagaagaataaggagctggtccagaccgaaatccaggagaggcattctttcactaaagaaattatagctctgaagaacttctttcagcaaaccacaacctcgttccagaatatggccttccaggaccaccccgaaaagagcgagcaatttgaagaactgcaatcgatcctgaagaagggaaaactgacgttcgagaacatcatggagaagctacgaatcaagtacagcgaaatgtacacaatagtgcctgccgagatagaaagccaggtcgaagagtgccggaaagctctggaggatatcgatgagaagatttccaacgaggttctgaaatcgagtccatcttatgcgatgcgccgtaagattgaagaaataaataatggcttgcacaatgtcgagaagatgctccaacagaagtctaagaacatcgaaaaagcacaggagatccagaagaagatgtgggatgagcttgatctgtggcactctaagctcaacgagctcgatagtgaggtgcaggacattgtggagcaagatccgggacaggctcaggagtggatggataaccttatgatcccattccagcagtaccaacaagttagtcaacgagctgagtgtcggaccagtcagctgaacaaggcaacagtgaagatggaggagtattcagatttgcttaaaagtacagaggcgtggatcgaaaataccagtcatctgctcgctaacccagctgactacgactccctccggaccttgtcccatcacgctagtactgttcagatggccctggaggacagcgagcagaagcacaacctgctgcactccatattcatggatctcgaggacctctccatcatcttcgaaaccgacgagcttacccagtccattcaggagctgtctaaccaagtcacggcactgcagcagaaaataatggaatcactgccacagatccagcggatggcagacgatgtcgtcgctatcgagtccgaggtgaagtccatggaaaaacgcgtgtctaagattaagacgatcctactgagcaaggaaatttttgactttagcccggaggaacacctgaagcatggtgaggtgatattagaaaatatcaggcccatgaagaaaaccatcgccgaaatagtctcttatcaagttgagcttagactgccacaaacaggcatgaagccactcccagtttttcagcggaccaaccagctgttgcaggacatcaagctcctcgaaaatgtgacccaagagcagaatgagcttctaaaggtagtgatcaaacagactaacgaatgggatgaggaaatcgagaatcttaagcagatactgaacaattatagcgctcagttcagcctggaacacatgtcccctgaccaagcagacaaattgccacaactgcagggagagatcgaacgcatggaaaagcaaattctttctctcaatcaacggaaggaggacctgctggtagacctgaaggcaacagtgcttaatcttcaccaacatctgaagcaggaacaagaaggcgtcgagagagatcgtcttccagcagttaccagtgaagagggaggcgtggcagaaagagatgcatcagagcgaaagttaaatcgtcgcggttcgatgagctaccttgccgctgtggaagaagaagtggaagaatcaagtgtgaagagcgataatggcgacgaaaaggctgagccatccccacagtcttggtctagcctatggaagcatgataaggatatggaggaagaccgcgcttcaagcagttccggtaccatcgtgcaggaggcttatggcaagatcagcacctctgacaactccatggcccagattctgacaccggacagtttgaacactgagcaaggacctgagtgtagcttgcgaccaaatcaaactgaggagggcactactcccccaatcgaggctgatactttggatagtagcgatgctcagggcggactggagcctagggtggagaagacacgcccagagcccaccgaggtactgcatgcctgtaaaactcaagtcgctgagctcgagttgtggctacagcaggccaatgttgccgtggagccagaaacgctgaacgccgacatgcagcaggtcctcgagcagcagctagttggctgccaggctatgcttacagagatcgagcataaagtcgcctttctgctagagacctgcaaggaccagggcctgggcgataatggagcgacacagcacgaagctgaagcactgtccttgaagctgaagacagtgaagtgcaatctcgagaaagtacaaatgatgctccaagaaaaacactcagaagaccagcatccgacaatattaaagaagagtagcgaacccgagcaccaggaagccctgcagcctgtgaaccttagtgagctggagtctatcgttactgagcgacctcagttttcccgacaaaaggacttccagcagcagcaggtcctcgagctgaaacccatggagcagaaggatttcatcaaatttatagaattcaacgcaaaaaaaatgtggccacagtactgccagcacgacaacgacacgacacaggagtccagcgccagcaatcaggcatcatcacccgagaatgacgtgcccgactccattttatcgccccagggtcagaatggtgataaatggcagtaccttcatcatgagttaagtagcaagataaagctgccactgccacagctggtggagccccaggtgtcaacaaatatgggtatcctccccagtgttacgatgtacaattttcggtaccctacaactgaggagctgaaaacgtataccactcagctggaagacctccggcaagaggcttctaatctccaaacccaggaaaacatgacggaagaggcatacatcaacctggataaaaagctgttcgagctgttcctcacattgtctcagtgtctgtctagcgtcgaagaaatgctagaaatgccccgactataccgcgaggatgggtcagggcagcaggttcattacgagacgttggcacttgagttaaaaaaattgtatctggccctctcagataaaaagggggacttgctcaaagcaatgacctggccaggggagaataccaacttgctcttggaatgcttcgataatcttcaggtctgtctggaacatacacaggccgcagcagtgtgccggagcaaatcactcaaagccggactggattataacagatcctatcaaaacgaaatcaagaggctttaccatcagcttatcaaatccaagacctcgctccagcagtccttaaatgagataagcggccagtctgtcgcagaacagctgcagaaggctgatgcctacactgtagagttggagaatgccgagagtagggtggccaagctacgggacgagggtgaaaggcttcatcttccatacgccctgctgcaggaggtatataaactggaagacgtcctcgactccatgtggggaatgctcagagccaggtacaccgagctatctagtccttttgtgacagagagccagcaggatgcgttgcttcagggaatggtggaattggtcaaaatcggaaaagagaagctggctcacgggcacttgaagcagacaaaaagtaaggtcgctcttcaggcccagattgaaaatcataaagtgttcttccagaaactggtggcagacatgctattaatccaagcctactcagccaaaatcctgcctagcttactccagaatagagagacattttgggcggagcaggtcacagaggttaaaattctggaggaaaagagccggcaatgtgggatgaagctccaatctctgttgcagaagtgggaagaattcgacgaaaactacgcctccctcgaaaaagacctcgagattctcatctccactctcccgtctgtcagcctggtagaggagacagaggaacgattggtagagcgcattagtttctatcagcaaataaagcgtaatattggcggaaagcatgcacgcctgtaccagacactgaatgaaggaaaacagttagtagccagcgtcagctgccctgagcttgaagggcaaatagccaagctggaagaacagtggctttctcttaataaaaagattgaccacgagttgcaccgcctccaggctctcttgaaacacttactttcttataatagggattctgatcagttaaccaaatggctagagagcagccagcacaccctaaattattggaaagaacagagcctcaatgtttcccaggatcttgataccatccgctccaatattaacaacttcttcgaatttagcaaagaggtggatgaaaagagtagccttaaaaccgcggtgatcagcatcgggaaccagctgctccatctcaaggagaccgacactgccactctgcgtgcgagcctggcacagttcgagcagaaatggaccatgttaatcacgcagctgccagacatccaagaaaaattgcaccagcttcagatggagaagctgccatcacgaaaagccatcaccgagatgatcagctggatgaacaacgtcgaacatcagacatccgacgaagattcagtgcattctccatccagcgcctctcaagtcaagcacttgctgcaaaagcataaggaattccgcatggagatggactacaagcagtggatagtcgattttgttaatcagagtctcctccagttgtctacttgtgatgtggaaagtaagcggtacgagcgaaccgagttcgccgagcatctgggcgagatgaaccgacagtggcaccgggtgcacggaatgctaaatagaaagattcaacaccttgaacagttgcttgaatctatcactgagagcgagaacaaaatccagattttgaacaactggcttgaggcacaggaagaaaggctaaagacacttcagaaaccagagtctgttataagcgtccagaaattgctgctcgactgtcaagacattgaaaatcagctcgccatcaaatcgaaggccctggacgaactgaagcagtcttatctgaccctggaatccggggctgtgcctctgctggaggatacagcaagcaggatcgatgaactgtttcagaagcggtctagtgtgctgacccaggtgaaccagcttaaaacctcaatgcaaagtgtgctacaagagtggaagatctacgaccaactgtatgacgaggtcaacatgatgacgatacgcttctggtactgtatggagcactccaaaccagttgtgctctcacttgagacgctccggtgtcaggtggagaacctccaaagcctgcaggacgaggccgaaagtagcgaggggtcatgggagaaactccaggaagtgatcgggaaattgaaaggcttgtgtccctctgtcgctgaaatcatcgaggagaagtgtcagaatacccacaagcggtggacgcaagtgaatcaggccattgccgaccaacttcagaaggcacagtcactgcttcagctttggaaagcgtattccaacgcccacggggaggcggcagccagactaaagcagcaggaagctaaattccagcagctggcaaatatcagcatgtcagggaacaacctggccgagattctgcctccggctctgcaagatattaaagaacttcagcatgatgtgcaaaaaaccaaggaggctttcctgcagaactcctccgtgctggaccgcctcccgcagcctgccgagagctctactcacatgttactgccaggacctctgcactccctgcaaagagcagcatatcttgagaagatgctcttggtaaaagccaatgagtttgaatttgtgctatcccagttcaaagactttggggtgcggctcgagtctttgaaagggctgattatgcacgaggaggaaaacctcgacagactccaccagcaggagaaagagaaccctgactcttttttgaatcacgttctggccctcaccgcacagtcccctgacatcgagcatcttaatgaggtgagcctcaaactgcctctgagcgatgtagcggtaaaaaccctgcagaatatgaatcgacagtggataagagccacagccaccgccctggaaaggtgcagcgagctccagggtatcggtctgaatgagaaattcttgtactgctgtgaaaagtggatccagttgttagagaagattgaagaagccctaaaagttgatgtggctaactctcttccagaactgctggagcagcagaagacgtataagatgctcgaggctgaagtgtccataaaccagaccattgcagactcctatgtcacccagtcattacagctcctggacacaacggagatcgaaaaccgccctgaatttataacggagttttctaaactgactgaccggtggcaaaatgccgtccagggcgtcagacagcgaaaaggtgacgttgacgggctcgtgaggcaatggcaggacttcaccacaagcgtcgagaacctgttcagattcttgacagacacatcacatctgctctctgctgtcaaaggccaggagagattttccctgtaccagactcgctctctcatccacgagttgaagaacaaggaaattcattttcaaaggaggcgaacaacttgcgcattaacactggaggctggggagaaactgctcctgaccacggacttaaagacaaaggaatccgtgggacgcaggatttcgcaacttcaagacagctggaaggatatggaaccacagctggccgaaatgataaagcaattccagtctaccgtggagacgtgggaccagtgcgagaaaaagattaaggaactcaaaagcagactccaagtgctcaaggctcagtcggaggatccgcttccagagttacacgaagacctgcataatgagaaagagttaattaaggagttggagcagtctctcgcaagttggacacagaacttgaaagagctgcaaactatgaaggccgatttgacccgacacgtcctggtcgaagacgtgatggtgctgaaggaacaaatcgagcatctccaccgccagtgggaggatctctgcttacgggtggctataaggaagcaagagatcgaggaccgtctgaacacttgggtcgtgttcaacgagaagaacaaggagctctgcgcctggctcgtgcaaatggagaacaaagtcctgcagacagccgatattagtatcgaagagatgattgaaaagttgcagaaggattgcatggaggagatcaatctgtttagcgaaaacaagctgcaactaaagcagatgggggaccagttaatcaaagcgagcaacaaaagccgagccgctgaaatcgatgacaagctgaataagatcaacgaccgatggcaacatcttttcgacgtgatcggcagtcgtgtcaagaagctgaaagagacttttgcattcattcagcagctggacaagaacatgtcaaatttgaggacatggctcgctcggattgaatcggaactgtccaaacccgtggtgtatgacgtttgtgatgaccaggagatacagaagagactcgctgaacaacaggacctgcagagggacatcgagcaacatagtgcaggtgtagaatccgttttcaatatctgcgacgtgctgttacacgattccgacgcatgtgccaacgaaacggagtgcgattccattcaacaaaccaccagaagcctggaccgcagatggaggaacatttgtgccatgtccatggagagacggatgaagattgaggagacatggcgcctttggcaaaaattcctggatgattatagccgtttcgaggactggcttaaatccgccgagcggacagccgcatgtccgaactcatcagaggtattatacacgtcagccaaggaagagctgaagcggttcgaggcttttcaacggcagatacacgaacgcctgacgcagttggagctcatcaacaagcaatatcgcaggctggctagagaaaacaggacagacacggcctcgcgcctcaaacagatggtccatgagggaaatcagagatgggacaatctccaaagaagagtgacggcggtgctgcggcgacttcggcactttaccaatcaacgcgaagaatttgaagggactagagagtcaatcctcgtatggcttaccgagatggatttgcagctgacaaacgtcgagcacttcagcgagtcagacgctgatgacaaaatgagacagctgaacggcttccagcaagagatcacactgaacaccaacaagatcgatcagctcatcgtgtttggagagcagctgatacagaagtccgagccgctggatgccgtgctgatagaggatgagctggaggagctacaccgctactgtcaggaggtatttgggagagtaagcaggttccataggcgcctgacttcctgtacacccggactggaagatgagaaagaggcctcagagaatgaaaccgatatggaggatccgagagaaatccagacagactcctggagaaagcggggagagagtgaggaaccctcttctcctcaatccctttgccacctcgtggcccctggtcacgaacggtccggatgtgaaacgcctgttagtgtggatagcattccccttgagtgggatcacacgggggacgtgggtggatcaagctctcacgaggaggacgaagaaggtccctattactccgcactctcggacgtggagattccagagaacccggaagcttacctgaagatgacaaccaaaacgttaaaggcaagtagtggcaagtcaatcagcgatgggcattcatggcatgtgccggactccccaagctgtcctgaacatcattacaaacagatggaaggcgataggaatgtcccacctgtcccgcctgcttcctcgacaccctacaagcccccttatggaaagctcctcctgccccctggaaccgacggaggaaaggaagggcctcgtgtgttgaacgggaacccccagcaggaggacggaggacttgccggtattacagagcagcaatctggcgcattcgaccgctgggagatgattcaggctcaggaactgcataacaagctgaagataaagcagaatttacaacagctgaactcagatatcagcgcgattacaacatggctgaaaaaaactgaagcggaactggagatgctgaagatggctaaacccccatctgacatacaggagatagaattgcgcgtaaaacgcctgcaggagattttaaaggcatttgatacttataaagctctggtggtctccgtcaacgtttcatcaaaagagtttctgcagaccgagagccctgaatcaacagaactccagagtagattaaggcaactctcactgctatgggaggccgcacaaggtgccgtggatagttggaggggtggactgcgacagagcctgatgcagtgccaggactttcatcaactgtcccagaacttactgctgtggctggcatccgctaagaataggagacagaaggcacatgtgaccgacccaaaggccgatccaagagccctgctcgagtgtcggagggagctgatgcagctcgagaaggagctggtggaaagacaaccccaggttgacatgcttcaagagattagtaactctctactgataaagggccacggagaagactgcatcgaggcggaagagaaggtgcacgtgatcgagaaaaaattgaaacagctgagagagcaggttagccaggatttgatggcattacaggggacacaaaaccctgcaagcccattgccctcctttgacgaggtcgactccggcgaccaacctcccgctacatctgttcccgcaccgagggccaagttcagggccgttcggacgaccgagggcgaggaggagacagagtccagagtgcccggatccacccgtcctcagcgttcctttcttagccgcgtggtgcgcgcagcgctgccgctgcagctcctgctgctgctgctcctgttacttgcatgcctgctaccgtcctctgaggaagattattcgtgtacccaggcaaacaacttcgccaggagtttttatccaatgttaaggtacaccaacggtccaccccctacataa

SEQ ID NO: 242082 - DNA, 2292 bp, synthetic construct
  misc_feature 1..2292: note = Description of Artificial Sequence: Synthetic coding sequence
  source 1..2292: mol_type = other DNA
atgagtatggagaggaggatgaaaattgaggagacctggagattgtggcagaaattcctcgacgactatagccgcttcgaagactggctgaaatctgccgagcgcacagcagcttgtccaaactcatccgaagttctgtatacctcagccaaggaagaactgaaaaggtttgaggcatttcagcgccaaatccacgagagactcactcagcttgagctcataaataagcagtatcggcgattagcgagggaaaaccgcactgacaccgcctcacggctcaaacagatggtgcacgaaggcaaccagcgctgggataacctccagcggagggttaccgctgttttgagacggctgcggcactttaccaatcagagagaagagttcgagggcacacgcgagagtattctggtgtggctgacagagatggatctccagctgactaatgtagagcacttttccgaatcagacgctgatgataagatgcgacagttaaatggattccagcaggagataactcttaacaccaacaagatcgaccagttaatagtgttcggggagcaactgatacagaaaagcgaacctctggatgctgtgttgattgaggatgaactagaagaactgcacaggtactgccaggaggtgtttggtagggtgtcccggtttcacagacgccttacctcttgcaccccaggactcgaggatgaaaaggaggcttctgagaacgagacagatatggaggatcccagggagatccaaactgatagttggcggaaaagaggcgagtccgaggagcctagcagtcctcaaagtctgtgccatctggtggcccctggccatgagcgtagtggatgcgagacaccagtgagcgttgacagcattcctttggagtgggatcatacaggggacgtcggaggatcttcttctcatgaagaggatgaagaagggccatactattctgccctgagtgggaagagcatttcggacggccacagctggcacgtgcctgacagtccatcttgccctgagcatcactacaaacagatggagggagaccggaatgttccccctgtcccaccggcttcctctaccccttataaacccccttacggcaagctactattgccccctggcacggacgggggaaaagaagggcctagggttcttaacggtaatcctcagcaggaggatggaggtctggcaggcatcacagaacaacagagcggcgcattcgacagatgggaaatgatccaagcccaggaattgcataacaaactcaagatcaaacagaacttgcaacagttgaattcagatatatcagctattaccacttggctcaagaaaacagaagcagaactcgaaatgctgaagatggccaagccaccgagcgatatccaggagatcgagcttcgagttaagcggttgcaggagatcctgaaagccttcgacacatacaaggctttagtcgtgagcgtcaacgtcagcagtaaagaattcctgcaaactgagagcccagaatcgacagagctgcagagtagactgcgtcaactgtccctgctctgggaggcagcacagggagctgtggactcatggcggggtgggctgagacaatcacttatgcagtgccaggactttcaccagttatcccagaaccttctgttatggctggcttcggcaaaaaacaggaggcagaaggcacacgtcaccgaccccaaggccgaccctcgcgcactcctggaatgtcgtcgagaattgatgcagctggaaaaggaactggtggaacgtcagccacaggtcgatatgctgcaggagatcagcaattcactcctgatcaagggccacggagaggactgtattgaagccgaggaaaaagtgcacgtcatcgagaaaaaactgaaacaactccgcgagcaggtgtcacaagacctaatggcccttcagggtacgcagaaccccgctagtcctcttccctcattcgacgaggtcgattccggggaccagcccccagccacatccgtccctgccccaagagcaaagcagtttagggccgtgcggacaactgaaggcgaggaagagactgagtccagagtgccaggcagtacgaggccccagcggagctttctcagcagagttgttagggcagcgctaccactacaactactgcttctcttgttactcctgctggcctgtctcttgccgagctccgaggaggattactcgtgtacacaggccaacaatttcgctcgcagtttctatcctatgctccgttatacgaacggtccaccccctacatag

SEQ ID NO: 242083 - DNA, 7250 bp, synthetic construct
  misc_feature 1..7250: note = Description of Artificial Sequence: Synthetic coding sequence
  source 1..7250: mol_type = other DNA
atggagcagttccccaaagagaccgtagttgaaagctcaggcccaaaggtgctggagacagctgaggagattcaagaaagaaggcaagaggttctgactaggtaccagtccttcaaagagcgagtggccgaaagagggcaaaagttggaagacagctaccacctgcaggtatttaagcgagacgcagatgatctcgggaaatggattatggaaaaggttaatatcctgaccgacaagtcttacgaggaccccaccaatatccaagggaagtaccagaagcaccagtctctcgaagcagaagtgcagactaagtccaggcttatgtccgagctggaaaaaacccgagaagaacgctttaccatgggacattcagctcacgaggagaccaaggcacatatcgaggaactccgtcatctctgggatctgctgctggagcttactcttgaaaaaggtgaccagctcctcagggccctgaagtttcagcaatacgtgcaggaatgtgccgacatccttgaatggatcggagacaaggaagctattgcaaccagtgtggagctgggcgaggattgggaaagaacggaggtgttgcacaaaaaatttgaggattttcaggtggaactggtggctaaggagggtagagtagtggaggtgaatcagtacgccaacgaatgcgccgaggaaaatcatcctgatcttcccctaatccagtctaaacagaacgaagtgaacgccgcatgggaacggcttcgcggactggccctgcagagacagaaggctctgtccaacgccgctaacttgcagcggtttaagagagatgtcacggaagcaattcagtggatcaaagagaaggaacctgtgttgacatctgaagattatgggaaggacctggtggcatccgagggtctgttccactctcataaagggctagagaggaacctggccgtgatgagcgacaaggtgaaggagctctgcgcgaaagccgagaaactgactctgtctcaccccagcgacgcccctcagatacaagaaatgaaggaagatttggtgtcctcatgggaacacattagggctttagccacctcgcggtacgaaaagctccaagcaacctactggtatcaccggttctcttccgatttcgacgaactgagtggatggatgaacgaaaaaactgctgcaataaacgcagacgagctccctacagacgtggccggaggtgaagtcctgctggatagacaccagcagcataaacatgagattgatagctacgatgatagattccaaagcgctgatgagacaggacaagacctcgtcaatgcaaaccacgaggccagcgatgaggtacgggagaagatggagatactcgacaacaattggaccgcgctgctcgaattatgggatgagaggcacagacagtacgagcaatgccttgacttccatctgttttatagggactccgaacaagtggactcgtggatgtcaagacaggaagccttcctcgagaacgaggatcttggaaactccctgggctctgctgaggctctgctgcaaaaacatgaggacttcgaggaggcattcacggcgcaagaagagaagattatcaccgtggacaaaacggctacaaaactaataggcgacgaccactatgattccgaaaacatcaaagctattagggacgggctgttggctcgcagagatgctcttagggaaaaggccgctacccgaaggaggctgctgaaagaaagcctgctgctccagaaactgtacgaagattcagacgatctcaagaactggatcaataagaaaaagaagctggccgatgacgaggactataaggacatccagaatctgaagtcccgcgtccagaaacaacaggtattcgagaaggaactagcggtcaataagactcagttagagaatatacagaaaacaggccaggaaatgatcgaagggggtcactacgcctcggacaatgtgactaccagactaagcgaggtggcaagcttgtgggaagagttactggaagccaccaaacagaagggaactcaacttcatgaggccaatcagcagcttcagtttgaaaacaatgccgaggacctgcagcgatggctggaggacgtggaatggcaggtgactagcgaagactatggcaagggcctggcagaggtacagaatcggctgcggaagcacggactcctggaaagcgctgtggctgctaggcaggatcaggtggacatcctaaccgatcttgccgcttacttcgaagagatcgggcacccagattctaaggacatcagggccaggcaagaatccctcgtctgtagatttgaggctctgaaagaacctcttgctacccgcaaaaagaaactcctggacctactgcacttacaactcatttgccgcgacacagaagacgaggaagcttggatccaagagaccgaacctagcgctacttctacttacctcgggaaggatctgatcgcaagtaagaaattattgaatcggcatcgagtgatactggagaatatagctagtcatgagcctcgcatccaggagatcacagaacgagggaacaagatggtggaagaaggacacttcgcagctgaggatgtggccagcagagtgaaaagcctgaatcagaatatggagtccctccgagctcgcgcagccaggaggcagaacgacttggaggccaatgtgcagttccagcaatatttagcagacttgcatgaagcagagacctggataagagagaaagaaccaatcgttgataataccaactacggggcagatgaggaagctgccggtgctttgctaaagaagcatgaggcctttttacttgatctcaattccttcggggattccatgaaagcactgcggaatcaggccaacgcatgtcagcagcaacaggcggcacccgtggagggcgtggcaggcgaacagcgcgtcatggctctgtacgactttcaggcgaggagccccagggaggtcaccatgaagaaaggggatgtgctcacccttttgagcagcataaacaaagattggtggaaggttgaggctgcggaccatcaggggatcgtgcctgctgtatatgttaggcgactggcgcacgacgaattccctatgcttcctcagagacgccgtgaggagcctggtaatatcacacagcgccaagaacagatagaaaaccagtatcgctctttgctcgatagagcggaagagcgaaggaggcgactgctgcagcgatacaatgagttcttactggcgtacgaagcaggtgatatgctcgagtggatacaagaaaaaaaggcggagaatactggggtggagctggacgatgtgtgggaattacagaaaaaatttgacgaattccaaaaggacttgaatacaaatgaacctcgactgcgcgatatcaataaagtggccgacgacttgctttttgaaggcctgctgaccccggaaggagcacaaattcgtcaagagttgaatagccgctggggcagtctgcagaggctcgccgacgaacagcgccaattgctcgggtcagcccacgctgtagaggttttccaccgcgaagctgacgatacaaaagaacagatcgagaaaaaatgccaggccctgagcgccgctgatccaggaagtgatttgttttcggtccaagcgctccagcgtcggcatgaaggcttcgagcgggatctggtgcctttgggagataaagtgaccatccttggggaaaccgccgagcgcctgtctgaatcccatccagacgccactgaggatttgcagcgtcagaagatggagctcaatgaggcgtgggaggatcttcaaggccgaaccaaggacaggaaagaatctctgaacgaagcccagaagttttatctgttcctcagcaaagcacgcgacctgcaaaactggattagctccataggaggtatggtctcctctcaggagctggctgaagacctgactggaattgagattcttctggagagacaccaggaacatcgcgcagacatggaggccgaggcccctacctttcaagccctcgaggatttcagcgctgagctgatcgattcaggtcaccacgcatcccccgaaatcgaaaaaaaactgcaggctgtgaaattagaacgcgacgacctggaaaaagcgtgggaaaaacggaaaaagatcctggatcaatgtctcgagttacagatgtttcaagggaactgtgaccaagtggagtcttggatggtcgcaagagaaaatagtctgcgctccgacgataaaagttcgctagatagcctggaggctttgatgaagaaaagggacgatctggacaaagcgattaccgcccaggagggaaagattaccgacctggaacatttcgccgagtctctaattgccgacgaacattacgctaaagaggagatcgcgacccgactgcagcgcgtgttggaccgatggaaggcccttaaggcacagctgatcgacgagcgcaccaagctgggcgactacgcaaatctgaaacagttctatcgcgaccttgaagaattggaagagtggatctcagagatgctccccaccgcgtgtgacgagtcttataaagatgctacaaatatacaacgaaagtatctgaaacatcagactttcgcacacgaggtggatggccgatccgagcaggtgcacggggtgatcaatcttggcaattcactgatcgagtgttccgcatgcgatgggaatgaagaggccatgaaagaacagctagagcagctcaaagaacactgggatcatctgttagagcgcacgaacgacaaaggcaaaaaactgaacgaggcttccaggcagcagcgctttaatactagcattagagatttcgaattttggctcagcgaggccgagactctgctggctatgaaggatcaggccagggacctagcatcggctggaaacctgctgaaaaaacaccagctacttgaaagggaaatgcttgcccgagaagacgcactaaaagatctgaacacccttgcagaggatttgttgagctcgggaacatttaatgtcgaccaaatagtgaagaaaaaggataatgtgaataaaaggttcctgaacgtgcaagagctggccgcagcacaccatgagaagctcaaggaagcttacgccctgtttcagttcttccaggatctggatgacgaggagtcttggatcgaggagaagctcatcagggttagcagtcaggactacgggagggatctgcagggagtacagaatttgctgaagaaacacaagcgcctggaaggagaattggtggcacacgagcccgcaattcaaaatgtgctggacatggcagagaaactaaaggacaaggccgctgtgggtcaggaagaaatccagctgaggttagcccagttcgttgaacattgggagaagttgaaggagctcgctaaggccaggggactgaagcttgaggaatcattggagtacctccagtttatgcagaacgccgaggaggaggaagcctggatcaacgaaaaaaacgctttggccgtgaggggggattgcggcgatacactggccgcaacccagtccctgctgatgaagcacgaggcactggagaacgacttcgccgtgcacgaaactagggtgcaaaacgtgtgcgcgcaaggggaggacatcctgaataaagaggaaagtcagaataaggagatttcctcaaaaatagaggctctgaacgagaaaaccccatcccttgccaaggcgatcgccgcatggaagttacaactggaggatgactatgcgttccaggagtttaactggaaggcggacgtggtagaagcatggatcgcagacaaggaaacttcattgaagaccaatggcaacggggcagatctgggcgactttctgaccctgctggctaagcaagatactcttgatgccagcttgcaaagctttcagcaggaaaggctaccagaaattaccgatctcaaggataagcttatatccgcgcaacacaatcagtcaaaggccatcgaagagcggtacgccgctttgctgaaaaggtgggagcagctgttggaggcctcggccgttcaccgccagaaactcctcgagaagcagctgcctctgcagaaagctgaagatttattcgtggagttcgcgcataaggcgtcagcccttaacaattggtgtgaaaagatggaagaaaacctgtcagagccggtccactgtgtcagtctgaatgaaattcgccagctacagaaggatcacgaggattttctcgcctctctggcaagggctcaggcagatttcaagtgtctgctagaattagatcagcagattaaagctctcggcgtgcccagtagtccttatacatggctgaccgtggaggttctggagcgaacatggaagcaccttagcgatatcatcgaagagagggagcaggaattgcagaaggaggaggcccgacaagttaaaaactttgaaatgtgccaggaattcgaacagaacgccagcacattcctgcaatggatactggagacaagggcatacttcctggacggctcgctgctgaaggagaccggtactcttgaaagccagctcgaagccaataaaaggaagcagaaggaaatccaggccatgaaaagacagctgactaaaatcgtagacctgggagacaatcttgaggacgccttgatcctggatattaagtactccaccatcggcctggcccaacagtgggaccaattgtaccagcttggtctgcggatgcaacacaacctcgagcagcagatccaggcaaaggacataaagggcgtgtctgaggagaccctcaaggagtttagcactatttataaacactttgacgaaaaccttaccggccgtctcactcacaaggagttccggtcttgcctcagggggctgaactactacctcccaatggttgaggaggatgaacatgaacctaaattcgagaagttcctggacgctgtcgaccccggaagaaagggctatgtcagcctagaggattatactgcgtttctgattgacaaggaaagcgaaaatatcaagagctctgacgaaatagagaacgccttccaggccctcgctgagggtaaatcctatataactaaggaagatatgaagcaggccctaacaccagagcaggtgtctttctgcgcaacacacatgcagcagtatatggacccgaggggcaggtctcatctctccgggtacgactacgttgggtttaccaattcctacttcggaaacta

SEQ ID NO: 242084 - DNA, 7259 bp, synthetic construct
  misc_feature 1..7259: note = Description of Artificial Sequence: Synthetic coding sequence
  source 1..7259: mol_type = other DNA
atggagcaatttcccaaagaaactgttgtcgaatcaagcggccctaaggtccttgagactgccgaggaaatccaagagagaaggcaggaggtgctcacaagatatcaaagctttaaagaaagagtcgctgagaggggtcagaagcttgaggactcctaccacttgcaagtcttcaaacgggacgcagacgacctggggaaatggatcatggaaaaagtcaacattctgaccgacaagtcctacgaggatcctaccaatatccaggggaagtatcaaaaacatcagagcctggaggccgaggtacaaaccaagagtcggcttatgtcagaactggaaaagacgcgggaggaaagattcacaatgggacattctgctcacgaggagacaaaggctcacatcgaagagctgcgccatctttgggacttgcttttggagctcaccctggaaaagggcgatcaacttttgcgcgctctcaagtttcagcagtacgtccaggaatgcgccgatatattagaatggatcggagataaagaagccatcgctacatccgtcgagttgggcgaggattgggagaggactgaggtcctccacaagaagttcgaggacttccaggtggaacttgtggccaaagaaggaagggtggtggaagtcaaccagtacgccaatgagtgcgccgaagagaatcatcctgacttgcctctaatccagtccaagcagaatgaggtcaacgcagcatgggaaagactacgcggtctggctttgcagcgccagaaggccttaagtaacgccgcaaacctacagcggttcaaaagagacgtcactgaagcaatacagtggatcaaggaaaaagaacctgtgttaacaagcgaggattacggcaaggaccttgtggcctctgaggggcttttccactcccacaaaggattggagcggaacctggcagttatgagcgataaagtcaaggaactatgcgccaaagccgaaaagctgacactgtcccatcccagtgatgcccctcagattcaggagatgaaggaggacctggtgtcttcatgggagcacattcgagccctggccacgagtcggtacgagaagttacaagccacttattggtaccacagattttccagcgactttgatgagttatctgggtggatgaatgagaagaccgctgcaatcaatgctgatgaactgccgaccgatgtggctggcggagaagtgttattggaccgccaccagcagcacaagcacgaaattgattcatacgatgaccggttccagtccgccgatgagactggccaggatttagtgaatgctaaccatgaagcttccgatgaagtacgagagaagatggagattctagacaacaactggactgccctcctcgagctgtgggatgagaggcacagacagtatgagcagtgtcttgattttcacctcttctatagagattctgagcaggtggattcctggatgtcccgccaggaagcctttcttgagaatgaggaccttgggaactctctagggtcagccgaggccctgcttcaaaaacacgaggactttgaggaggctttcacagcccaggaagagaagataatcacagtcgacaaaacagcgacaaaactgatcggggacgaccactatgattcggaaaatattaaagccataagagatggcttacttgctcggagggacgctctgagagaaaaagcggctaccagacgcagactgctgaaagagagtctcctactccagaagctgtacgaggattccgatgacttaaaaaattggattaacaagaaaaagaagctagctgatgatgaggactataaagatattcaaaacctaaagtctagagtccagaagcagcaggtttttgagaaggaactggcagtcaacaaaactcagctggaaaatatccagaagacaggtcaggagatgatcgagggcggtcactatgcatccgacaacgtgacgaccaggctgtccgaggtggcctctctgtgggaggagttactagaggccactaagcagaaggggactcagctgcatgaagccaatcagcagttacaattcgagaataatgcagaagatctgcagcgctggctggaagacgtggagtggcaagtcaccagcgaagattatgggaaggggctcgcagaggtgcagaatcggctgcggaaacatggactcctcgaatccgccgtagcagccaggcaggaccaagtggatattttgaccgacttagccgcatactttgaggagataggtcatcctgactcaaaagatattagagcacgtcaggagtccttggtgtgccgcttcgaagcacttaaagagccactcgccacgcgtaagaagaagttgcttgacctgcttcatctgcaattgatatgtcgagataccgaggatgaagaggcgtggatccaggagaccgaaccctccgcgacgtccacgtacctcgggaaagacctgatcgccagcaagaagctgctgaaccggcatagggtgatacttgagaacatcgcgagccatgagcctcggatacaggagatcaccgaacgcggtaacaaaatggttgaagaaggtcacttcgcagccgaagatgttgcaagccgggtgaagagtcttaaccagaatatggagtcactgagggctcgggctgccagaaggcaaaatgatctggaagcaaacgtacaatttcaacaatatttggctgaccttcacgaagctgagacatggattagggaaaaggagccaatcgtggataacaccaattacggtgcagatgaggaagcagctggcgctctgctgaaaaaacatgaagccttcttactggatctgaatagtttcggagattccatgaaggccctgagaaaccaggctaatgcctgccagcagcagcaggcagctccagttgagggcgtcgcgggagagcaaagagtgatggccctgtacgatttccaggccagatccccgagagaggtcacaatgaaaaaaggcgacgtgcttactctgttgtcaagcattaacaaagattggtggaaggtggaggctgcagatcaccaaggtattgtgcccgctgtctacgtccggaggcttgcccacgacgaatttccgatgctgccccaacgccgacgggaggagccgggaaacatcacacaacgtcaggagcagatcgagaatcaatataggagcctgctcgatcgtgccgaagaacggaggcggagactgttgcagcgctacaatgaatttcttctcgcatacgaggccggagatatgctggaatggatacaggagaagaaagctgaaaacaccggggttgagcttgatgacgtttgggagctgcagaagaagttcgacgagttccagaaagaccttaacactaatgaacctagattaagagacattaacaaagtagccgacgacctgctgtttgaagggctgctgaccccagagggagctcagatccgccaggaattgaactccaggtgggggtcacttcagcggctggccgatgaacagcgccaattgctagggagcgcccatgctgtggaggtattccatagggaggctgacgacaccaaggagcagattgagaaaaagtgtcaagcattgtctgctgcggaccccggaagcgatctcttcagtgtacaggccctgcagagaagacatgagggattcgaacgggatttagtcccattaggggacaaagtgacgattctcggcgagaccgctgagaggctctccgaaagtcatcctgatgcgacggaggatctgcagagacagaaaatggagctgaacgaggcctgggaggatctgcaaggacgcaccaaggaccgaaaggagagcctaaacgaggcacagaagttctacctatttcttagcaaggccagggatttacaaaattggatatcatctattgggggtatggtgagttcgcaagaactcgccgaagatttgaccggaattgaaattttgctggagcggcatcaagagcatagggccgacatggaggctgaagcacctacttttcaagctcttgaggatttcagcgctgagctgatcgatagtggccaccacgcttccccggagattgagaagaaactgcaggcggtcaaattagaacgcgacgatcttgagaaagcctgggagaagcggaaaaaaatcctggatcagtgcctggaactgcagatgttccaagggaactgcgaccaagtggaaagctggatggtggctcgcgaaaattcacttcgatctgatgacaaaagcagcctggacagtctcgaagctcttatgaaaaaacgagatgacctggataaggccataaccgcccaggaaggaaaaataactgacttggaacatttcgctgagtcactcatagctgatgagcattatgcaaaagaggaaatagcgaccaggctgcagcgggtgctggaccgttggaaggcactcaaagctcagctgatcgatgaaagaaccaagctgggggattatgccaacctgaagcagttttacagggatctcgaagagctggaagaatggatttctgagatgctccccactgcctgcgatgaatcgtataaagatgccacgaacatacagcgaaagtatctgaagcatcagacatttgcacacgaggtggatggcagatcagagcaggtccatggcgtcattaatctgggcaattctttgattgaatgcagtgcgtgcgacggcaatgaggaggcgatgaaggaacagcttgagcagctaaaggagcactgggaccacctgttggagcgtacaaacgacaaggggaagaagcttaatgaggcctcaagacaacagagatttaatacaagtatcagggactttgaattttggctgtccgaggctgagacacttttggctatgaaagaccaggcccgagacctggcttcagccggaaacctcctgaagaagcaccaactgctggagcgagagatgttggctcgggaggatgcactcaaggatctaaataccctcgcagaggacttgctctcatctggcacatttaacgtggatcaaatcgttaaaaagaaggacaatgtcaataagagattcctgaatgtgcaagaattagcggctgcacatcacgagaagctgaaagaggcctatgccctttttcagttcttccaggatctggacgacgaagaaagttggatcgaagagaagctcattcgggtgagcagccaggactatggcagagacctccagggagtgcagaaccttttgaagaagcacaagcgattagaaggagaactggtagctcatgaaccagcgatccaaaacgtcttagatatggcagagaagcttaaggataaggccgcagtgggacaggaagagatccagttaaggctggctcaattcgtggaacattgggagaaactgaaggagctcgctaaggcgagggggttgaaactggaggaatctctagagtatctgcaatttatgcagaatgctgaagaggaggaggcctggatcaacgagaagaacgccctggccgtgcgcggtgactgtggggataccctggccgcaacccagtccttacttatgaaacacgaagccctagaaaatgacttcgccgtacatgagaccagggtgcagaacgtgtgcgcacagggcgaggacattctgaataaagtcttgcaagaagaaagccagaataaagagattagctctaaaattgaggccctgaacgagaaaaccccctcactggcgaaagccatcgctgcgtggaagcttcaactcgaggacgactacgcattccaggaatttaactggaaggctgacgttgtggaggcctggattgccgacaaagagacatctctgaagaccaacggaaacggcgcagacctgggtgattttttgaccttgttggccaaacaagacacacttgatgcaagtctgcagtccttccagcaggagcggctccccgagattaccgacctgaaggacaagctgatcagcgctcagcataaccagtccaaagctattgaagaacgatatgctgccctgcttaagcggtgggaacagctgctagaagcttccgcagttcaccgccaaaaactgctggagaaacaactgcctttgcaaaaagccgaggacctgttcgttgaatttgctcataaagcctcagctttgaacaactggtgcgagaagatggaggaaaatttgagcgagccagtgcattgtgtttcgctgaacgagattcgccagctccagaaagaccacgaggacttcctggcaagtctcgcacgtgcacaggccgattttaagtgcctcctggaactggatcagcagatcaaagccttaggggtgccttcctctccatacacctggcttacagtggaggtgcttgaacgcacctggaagcatctaagcgatataatcgaggagcgtgagcaggaactccagaaggaagaagcgaggcaggttaaaaatttcgaaatgtgccaagagttcgagcagaatgctagcacttttctacagtggattcttgagacccgggcatactttctcgatggcagtcttcttaaagaaaccggcactctggagagccagctggaggctaataagcgcaagcaaaaggaaatccaggcgatgaaaaggcaactgacgaagatcgtggatctgggtgacaatcttgaagatgcccttattctcgatattaagtattcgaccataggcctcgcccagcagtgggaccagctataccagctggggcttagaatgcagcataacctggaacagcagatccaggctaaagacataaaaggcgtcagcgaggaaactctgaaagaattttctactatctacaagcactttgatgagaacctgactggccgtctgacgcataaagagtttcgctcttgcctgagaggccttaactattacctccctatggtggaggaggacgaacatgagccgaagttcgaaaagtttctcgatgctgtggaccccggtagaaagggttatgtatcactggaggactatacggcgttccttatcgataaggagtccgaaaacataaaaagttcagatgagatcgagaatgcgttccaggcgctcgcagaaggaaaatcctatattaccaaagaggatatgaaacaggctctgacccctgagcaggtaagtttctgtgctacgcatatgcagcagtacatggaccccagaggcagatcccacctgagcgggtatgactacgtgggattcaccaatagctatttcggaaatta

SEQ ID NO: 242085 - DNA, 7433 bp, synthetic construct
  misc_feature 1..7433: note = Description of Artificial Sequence: Synthetic coding sequence
  source 1..7433: mol_type = other DNA
atggacccgtcaggagtgaaggtcctggagacagctgaagatattcaggagcgacgacaacaggtgctggaccgttaccatagatttaaagagttgtccaccctgaggcggcagaagctagaggactcttaccgttttcaatttttccaacgcgatgccgaggagttggagaaatggatccaagaaaagctccaaatcgcctcagacgagaactacaaggaccccaccaatctgcaagggaagctgcagaaacaccaggccttcgaggctgaagtgcaggccaattcaggcgctattgttaagctggatgagacaggaaacttgatgatctccgaaggccactttgcaagcgagaccattcgcacccggctgatggagctgcaccgacaatgggagctcctgctcgaaaagatgcgggagaaagggattaaactgctccaggcgcagaaactggtccagtacctgcgcgagtgtgaggacgtaatggattggattaacgataaggaagctattgttaccagcgaggagttggggcaggatctagagcacgtggaggtactccaaaagaaattcgaggagttccagaccgatatggcagcacatgaagaacgcgtcaacgaagtcaaccagtttgccgctaagctgatccaggagcagcaccccgaggaagagcttataaagactaaacaggatgaagtgaacgccgcttggcagcgacttaaaggattagctcttcaacggcaggggaaattgttcggtgccgctgaggtacagagatttaatcgggatgtagatgagaccatatcttggataaaggagaaggaacagctgatggccagcgatgatttcggacgggatctggcctctgtccaagctcttttaaggaagcacgagggactcgagagagacctggccgctttggaggataaggtcaaggcactgtgcgccgaagcagaccgcctccagcagtcccatcctctaagcgccacccaaattcaggtcaagcgagaagaactgataaccaattgggaacagatccgaacgctggccgcagagcgccatgcccgactcaacgactcttataggttgcaacggtttctggcggatttccgagacctcacaagttgggtgacagaaatgaaggccctgatcaacgccgatgagctagcctctgacgtggcaggcgcagaggccttgcttgaccgccatcaggaacataagggagagattgacgcccatgaagactctttcaaatcagctgacgagtctggccaggctctattagccgcaggtcactacgcaagtgacgaagtgcgtgaaaagttaacggtgctgtccgaggagcgggctgcgctactggagttgtgggagctccgcaggcagcaatatgagcagtgcatggacttgcagctattctaccgggacaccgaacaggttgacaattggatgtcgaagcaggaagccttcctgcttaatgaagatctcggcgactccctggattctgtggaagcccttctgaaaaaacatgaggattttgagaaaagtctcagcgcccaagaagagaagatcacagccctcgacgagttcgctacaaagctcatccaaaataatcactacgctatggaggatgtcgccacaagacgcgacgcccttctgtctcggaggaacgctctgcatgagagagccatgaggagaagagcccagctcgccgattctttccatctccagcaattttttagagacagcgatgaactgaaatcatgggtgaatgagaagatgaagactgccaccgacgaggcatacaaggacccatctaatctccagggaaaagttcagaagcatcaggccttcgaggccgagctgtcagccaaccagtcccgcatcgacgccttggagaaagcgggtcagaaactcattgacgtcaaccactacgccaaggatgaagtggccgctaggatgaacgaggtcatctccctctggaagaaactgctggaggctacggagttaaaaggaatcaaactcagagaggccaatcaacagcagcaattcaacagaaatgtcgaagacattgaattgtggttatacgaggtcgaaggccacctggctagcgatgactacggaaaagaccttacgaatgtccagaatctccagaaaaagcatgctttgctggaggccgatgttgccgctcatcaggaccggatcgacggcataaccatacaggccaggcaatttcaggatgctggacacttcgatgctgagaatatcaagaagaagcaggaggctcttgtagctagatatgaggcactcaaagagcctatggtggcaagaaagcaaaaactcgctgattctttgcgactgcaacagttgtttcgggacgtcgaagacgaggaaacatggatacgagagaaagaacccattgccgcttccacaaacagaggcaaggaccttattggtgtgcaaaacttactcaagaaacaccaagcactgcaggcagaaattgccggacacgagcccagaatcaaggctgtgacccagaagggcaacgctatggtcgaagaagggcacttcgctgccgaggatgtgaaggcaaaacttcacgaactgaaccagaagtgggaagctctcaaagctaaagctagtcagcgccgtcaggacctagaagacagcctccaagcacagcagtacttcgctgatgccaacgaagccgagtcctggatgagagaaaaggaaccgatcgtggggagcacggattacggcaaggacgaagactccgcggaggcgcttctcaaaaagcacgaggccctgatgtcagacctgtcagcatacgggagctcaatacaggccctgcgagagcaggctcaaagctgccgacagcaggtggcccctaccgatgatgagactggcaaagagctggtgctggcattatatgattaccaggagaagtccccacgagaggtaactatgaagaagggggacattttaacccttctcaactccaccaacaaggattggtggaaggtcgaagtgaacgaccgacagggcttcgtgccggctgcttatgtcaagaagctcgatcctgcccagagcgcaagtcgcgagaacctgcttgaggagcagggatcaatagcattaagacaggaacagattgacaatcagacgagaattaccaaagaggccggttctgtatccctcagaatgaagcaagtggaagagctttaccatagtctgctcgaacttggagagaagaggaagggcatgctggaaaaatcttgtaagaagtttatgcttttccgtgaggcaaatgagttacagcagtggattaacgaaaaggaggccgctctcactagcgaggaagtcggtgcagacctggaacaagtcgaagtcctgcagaaaaagtttgacgacttccagaaggacctcaaggctaacgagagccgcctgaaagatataaataaggtcgcagaggatctggagtctgagggtctaatggccgaggaggtccaggcagttcagcagcaagaggtctatgggatgatgcctagggatgaaactgatagtaaaacggcaagcccttggaagtcggccaggctgatggtgcatactgtcgccactttcaattctattaaggagctcaacgaacgctggagatcccttcaacagttggccgaggaacgcagtcagctactggggagtgcccatgaggtacaacgcttccaccgggatgctgacgaaacaaaggagtggatcgaagaaaaaaatcaggcactgaatactgataattatggacacgatctggcttctgtgcaagccttgcagcgaaagcacgagggattcgagagggacctggctgccctgggagacaaagttaattctctcggtgaaacagcggaaagactgattcagtcgcacccggagagcgcagaggacctgcaggagaagtgtaccgaactcaaccaggcttggtcatcactaggaaagcgagctgaccagaggaaggctaaattgggggactcccatgacctgcagcgctttctaagcgattttagggacctgatgagctggattaatggtatacgtgggttggtatcttcagacgaactggccaaagacgtcacgggagccgaagcccttctcgagcgccaccaggagcaccggacagagatcgatgctcgggctggcacttttcaggcatttgagcaattcggacaacagttgctagcccacggccattacgcatcacctgagatcaagcagaagctggacatactcgatcaagagcgagccgacctggaaaaggcgtgggtgcagaggagaatgatgctggaccagtgtcttgagttgcaattattccatcgcgattgcgagcaggccgagaactggatggctgccagagaagcttttttgaacacggaagacaaaggagattcattagacagcgtggaagcgctcattaagaagcatgaggatttcgacaaggcaattaatgttcaggaggagaaaatcgccgcactccaagccttcgcagatcaactgatagcggctggccattatgccaaaggagatattagcagtcgcaggaacgaggtgctggataggtggagaagactgaaggcccagatgattgagaaaagaagtaaactcggcgagtcacagacccttcagcaattctcgagagatgtcgacgaaattgaggcctggatctccgaaaagctgcagaccgcctctgacgaaagctacaaggaccccacgaatatccaggtttcccttatgctcagcaagcaccagaaacatcaagcatttgaagcagagctccacgcaaatgccgacaggatccgtggcgtgatcgacatgggcaattccctgattgagagaggtgcctgcgcaggctccgaggacgccgtcaaggcgcgtctggccgctcttgcagaccagtggcagtttttagttcagaagtctgcagagaagtcacagaagctcaaggaagctaacaaacaacagaacttcaacaccggaataaaggattttgatttttggctgtccgaagtggaagctttgcttgcaagtgaggactatggtaaagatctagccagcgtcaacaacctgttaaagaaacaccagctgctggaagccgacatctccgcccatgaagatagacttaaagacctgaactctcaggctgactctctgatgactagttctgcctttgacacctcccaggtgaaggacaagagagatacaatcaatggacggtttcagaaaataaaaagtatggctgcatcgagaagagctaagctaaatgagtcccacagacttcatcagttttttagagatatggacgatgaggagtcatggatcaaggagaagaagctgctggtggggtctgaagactacggccgtgatttgactggggtccagaatttgaggaaaaagcataagcgcctagaagcggaactcgccgctcacgaacctgctatccagggggtgctcgatactggcaagaagctgagcgacgacaatacgataggaaaggaagagattcagcagagactggcccagttcgtggagcactggaaagagctgaagcagctggccgctgcccgtggccaacggctcgaggaaagtcttgaataccagcagttcgtcgctaacgttgaggaggaggaggcttggattaacgagaagatgactctcgtggccagcgaggactatggggacaccctcgccgcaatacaaggactgctgaaaaagcacgaagcatttgagacggacttcacggtgcacaaggaccgggttaatgacgtttgcactaatgggcaggacctgattaaaaagaacaaccatcacgaggaaaacatcagctcaaagatgaagggcctgaatggcaaggtcagcgatctcgagaaagcagccgctcagagaaaggcgaaactcgatgaaaacagtgcatttctccaattcaactggaaagctgatgtcgtggagtcctggattggagaaaaggaaaattctctgaagactgacgattatggcagagaccttagtagtgtccagacactgctgacgaaacaggagaccttcgacgctggtctccaggcattccagcaggagggcatcgccaatattactgccctcaaggatcagcttcttgccgcaaaacatgtgcagagtaaggccatcgaggcgcgtcatgcttccttaatgaagagatggagccagttgctggcgaactcagctgctagaaagaaaaaattactagaagcacaaagtcatttccggaaagtagaggatctatttctgaccttcgcaaagaaagccagtgcctttaactcatggtttgagaatgcagaggaggatctgaccgacccggtacggtgcaattctctagaggagattaaagctcttagggaagcccacgacgcatttcgttcgtcactgagctccgctcaggccgacttcaaccagctcgccgagctcgacaggcagattaagagctttcgcgtcgcttcaaatccctacacttggttcaccatggaagctctcgaggagacctggaggaaccttcaaaagattattaaggaaagagagctggagctacagaaagaacagagacgccaggaagagaacgacaaactcagacaggaatttgcccaacatgctaatgccttccaccaatggattcaagagactaggtgccagccagcgggagcctcctgtatggttgaggagtccgggaccctggaaagccagttggaagcaacaaagcgcaaacatcaagaaattcgtgcaatgcgatcacaactgaagaagatcgaagacctcggggcagccatggaagaggccctaatattagacaataagtacacggagcatagcacagtgggcctggctcagcaatgggatcagttggaccagctgggcatgcgcatgcagcataacctggaacagcagatccaggccaggaatacaacaggcgtgaccgaagaagcgttgaaggaattcagcatgatgtttaaacatttcgacaaagataaatctggaaggctcaatcaccaagaattcaagagttgtctcagaagtctgggctacgacctgccaatggttgaggagggcgaacccgatcccgagttcgaggccattctcgataccgttgatccaaaccgcgacggacatgtgtccctacaggaatatatggcttttatgatctcccgtgagacggagaacgtgaagtcctcggaggaaattgaatcagcgtttagagccctcagctcagagggcaagccgtacgtcactaaagaagagctatatcagaatctgactcgcgagcaggcagattattgcgtgagccatatgaaaccatacgtcgacgggaaaggtcgggaactacctactgccttcgactacgtagagttcactagaagcctcttcgttaatta

SEQ ID NO: 242086 - DNA, 7358 bp, synthetic construct
  misc_feature 1..7358: note = Description of Artificial Sequence: Synthetic coding sequence
  source 1..7358: mol_type = other DNA
atggatcctagcggggtgaaggtcctggaaacagcagaggatatccaggaaagacgccagcaggtgctggatcgctatcacagatttaaagaacttagcaccctgaggaggcagaagctggaagattcatacagattccaatttttccaaagagacgcagaggagttggagaagtggatccaggaaaagttgcaaattgccagcgatgaaaactataaggaccccaccaatcttcagggaaagttacagaaacaccaagccttcgaggcagaggtgcaggcgaactccggcgctatcgtgaagctggacgagaccggaaacttgatgatatcagaggggcactttgcctcggaaactatccgaacaagactgatggaactgcatcgccagtgggagctactgctggaaaaaatgcgtgaaaaaggcatcaagctcctgcaggctcaaaaattggtccagtacttgagagagtgcgaggacgtcatggactggataaatgataaagaggcaatagtgacctccgaagagctgggacaggaccttgaacacgttgaggtgttgcagaagaaatttgaggaatttcagacggacatggctgcacatgaagaaagagtgaatgaggtgaaccaattcgccgctaagctgatacaggagcaacacccagaggaagagttaatcaagaccaagcaagacgaggtcaacgccgcttggcagcggctgaaggggctagccctgcagcgccaggggaagctgttcggcgctgccgaagtgcaacgtttcaatcgtgacgtggatgagacaatttcctggatcaaggaaaaggagcagctgatggctagcgatgattttggtagagatttagctagcgtgcaggccctcctgagaaagcacgaaggactggagcgtgatctggccgctctggaggataaggtaaaagccctctgcgccgaagcagatcgtctacagcagtctcaccctctgtctgccacccagatccaggtgaaacgggaggagctcatcaccaattgggaacagatccgtactctggctgccgaacgccacgcaaggctgaacgactcttacagactgcagcggttcctggctgattttcgcgacctgactagctgggtcacagagatgaaggcactgatcaacgccgatgaactcgcaagcgacgtagccggagctgaagccctgcttgaccggcaccaagaacacaagggtgagatagacgcccacgaggattccttcaagtccgccgacgaatcagggcaggcgttactggcagcgggacactatgcatctgacgaagtacgtgaaaagctgacagttttaagtgaagagagggccgcattgctggagttgtgggaactgcggcgtcagcaatatgagcaatgcatggatctgcagctgttttatcgggacacggaacaggtcgataactggatgtctaagcaggaggcatttcttctgaacgaggacctcggggattccctagattctgttgaagccctgctcaagaaacatgaggactttgagaaatccttgtctgctcaggaggagaagatcacggctttggacgagtttgccacaaagctgattcagaacaaccactatgcgatggaggacgtggccacccgtcgagacgccctcctatctcgaagaaacgcactccacgaacgcgcaatgcggaggagggctcagctcgctgactcattccacttgcagcagtttttccgggatagcgacgagttgaagtcttgggtcaacgagaagatgaaaacggctacggacgaagcctataaagaccctagcaaccttcagggcaaggttcagaagcaccaggcctttgaggccgaactgtctgccaatcaaagtagaattgacgcacttgaaaaggccggacaaaagttgattgatgtgaaccactacgcaaaagacgaggtggccgcacgtatgaacgaggtgatttcactttggaagaagctccttgaggcaacggagctgaagggaattaaactgagggaagctaaccagcagcagcagtttaatcgcaatgtggaggatatagaactgtggctctatgaagtggaggggcacctagccagtgacgattatggaaaggacttaacgaacgttcagaatctccagaaaaaacatgccctcctggaggcagatgtggctgcccaccaggacagaattgacgggattactatccaagccagacagttccaagacgccggacactttgacgctgaaaatattaaaaagaagcaggaggctctagtagcgagatacgaagcccttaaggaacctatggtagcgaggaagcagaagctggccgatagtcttcgcctacagcagttatttagagatgtggaagatgaggaaacctggattcgggaaaaagaacccatcgccgcaagcactaacaggggcaaagacctcatcggagttcagaacctgctgaagaagcaccaggccttgcaggccgagatcgcgggacatgagccaagaattaaagccgttacccagaaaggcaatgcgatggtagaagaagggcactttgccgctgaggacgtcaaggcgaagctccatgagctaaaccagaagtgggaggctctgaaagccaaagcaagccagaggaggcaggatttggaagatagcctgcaggcccagcagtattttgcagacgcgaacgaagcagaaagctggatgagagagaaggaaccaatagtgggctcgacggactatggtaaggacgaagactcagccgaagcgctgctgaaaaaacacgaagccctgatgtccgacctgtcagcttacggctccagcatccaggcactgcgggaacaggcgcagagttgtcgccaacaagtggcaccaaccgacgacgaaacgggtaaggagctcgtactcgctttgtacgactaccaagaaaaaagtcccagggaagtgaccatgaaaaaaggggatattctcacccttctgaatagcaccaacaaagattggtggaaggtggaggtcaacgatcgccagggtttcgtaccggctgcctatgtcaaaaaactggatccagcccagagcgcatcccgagaaaacctccttgaggaacagggctctatcgctctgcgccaggagcagattgacaatcagtaccatagtcttttggaactgggggagaagcggaaggggatgctggaaaagtcctgtaagaaattcatgctgtttcgagaggctaatgaactacaacagtggattaatgaaaaagaggcagcactgacgagcgaggaggtgggggcagatctcgagcaggtggaagttcttcaaaagaaattcgacgacttccagaaagacctaaaggcgaacgagagccgcctgaaggacattaacaaggtcgccgaagatctagagtctgaaggcctgatggctgaggaagttcaagccgtgcaacaacaagaggtgtacggaatgatgccacgcgacgagacagatagcaaaactgccagcccttggaagtctgcgaggctcatggtgcatactgtcgccactttcaattctattaaagaactgaatgaaaggtggaggtctcttcagcagctggccgaggagagaagtcagctcttggggtccgcacatgaggtgcagagatttcatcgcgacgccgatgaaaccaaagaatggatcgaagagaagaaccaggccttaaacacagacaattatgggcatgacctggcaagtgtacaggccttgcagcggaagcacgaaggattcgaacgggatctggcagccttaggcgataaggtgaacagcctaggcgagacggccgaacgattaatccagagtcaccccgagtccgctgaagacctccaggaaaaatgcaccgagttaaatcaggcatggtcatccctcggcaaacgcgctgatcagaggaaagctaagttaggcgatagtcacgacctgcagaggttcctctcagattttcgggacctgatgtcttggataaacggtatcagaggtctcgtctcttccgatgagttggctaaggatgtaaccggtgccgaggcactgctcgaaaggcaccaggagcacaggactgagatcgacgctcgagctgggaccttccaggctttcgagcaattcggacagcagctcctcgcgcacggccactacgcgtctcccgagattaagcagaaactggacatcctggaccaggagcgggctgatttggagaaagcctgggttcagagacgaatgatgcttgatcagtgccttgaactgcagctctttcatcgagactgcgagcaggctgaaaactggatggctgcgcgagaggcattcttgaacacagaggataaaggcgattctcttgatagcgtggaggcactcatcaaaaaacacgaggacttcgacaaggcgatcaatgttcaggaggaaaagatcgcagcactgcaggctttcgctgatcagcttatcgccgctggacattacgccaagggcgacatctcctcccgcagaaacgaggtgctggacaggtggagaagactgaaggctcagatgatcgagaaaagaagtaagcttggagagagccagactcttcagcagttcagtcgagatgtagatgagatcgaggcttggatctccgaaaagctccagaccgctagcgatgagagctataaggaccctaccaacatccagtccaaacaccagaagcaccaggcctttgaagctgagctgcacgctaatgctgatcggatccgtggagtaatagacatggggaattcgcttatagaaagaggagcttgtgctggctctgaagatgccgtgaaagctcgtctcgccgcactggcggaccagtggcagtttttggtgcaaaagagcgcagaaaaaagtcaaaagctgaaggaggctaacaagcagcagaacttcaacaccggcatcaaggactttgatttctggttgagcgaagttgaagccctgctggcttctgaggattacggtaaggacctcgcaagtgtgaataatctccttaagaaacaccagcttcttgaagctgatatctccgctcacgaggaccgactcaaagacctgaactcccaagccgactctctgatgacatcatcagccttcgacaccagtcaggtgaaggataagagggataccataaacggaagattccagaagattaagagcatggccgcatctagaagagctaagctcaacgaatcacaccgccttcatcagttttttcgggatatggatgacgaggagagctggattaaagaaaagaagctgctggtcgggtcagaagattatgggcgtgatcttaccggagtgcagaatctcagaaagaagcacaaacgactcgaggctgagcttgctgctcatgagcctgccattcaaggcgtgctggacacgggtaagaagttaagcgacgataacacaatcggaaaagaagaaatacagcagcgcctggcgcagtttgtggagcattggaaagagctgaaacagctcgctgccgcacgcggacagaggctggaggaaagccttgaataccagcagttcgtggccaacgttgaagaagaagaggcctggataaacgagaaaatgacactggttgcaagcgaagattatggcgatacgctggccgcaatccaaggcctcttaaagaagcatgaggccttcgaaaccgatttcacggtccacaaagatagagtcaatgatgtttgtaccaatggtcaagacctcattaaaaaaaacaaccaccacgaagaaaatatttcttctaagatgaagggcctaaatggtaaagttagtgatctcgaaaaggcagcagctcaacgcaaagcaaagctggacgagaatagcgcctttctgcagtttaactggaaagctgatgtcgtcgaaagctggatcggggagaaggagaatagtcttaaaaccgatgattatgggagggatctgagctctgtccaaaccctgctaacaaagcaagagacattcgacgcgggactgcaggccttccaacaggaaggcattgcaaatataacagccctgaaagaccagttactggcagccaaacacgtacagagcaaggcgatcgaagctcggcacgctagcctgatgaagcgctggagtcaactgctggccaactctgcggctcgcaagaagaaattattggaggcccagtctcactttaggaaagtggaagatttattcctcacctttgcaaaaaaggctagcgcattcaatagctggttcgaaaacgctgaggaggacctaaccgatccggtgagatgcaacagccttgaggagatcaaagctctcagggaagcccacgacgcattccgcagctctctgagtagtgcacaggcagatttcaatcagttagccgagctggacagacaaatcaagagttttagagttgcatctaacccctatacttggtttactatggaagctctagaggagacatggcgcaatcttcagaagattattaaagaaagagagctcgagctgcagaaggaacagcgaaggcaggaggaaaatgacaaactccgtcaggagttcgcccaacacgctaatgcatttcatcagtggattcaggaaacccgatgccaacccgcaggcgcatcttgcatggtggaagagtcaggaaccctagagtctcagcttgaggccactaagcgaaaacaccaagaaatccgagcaatgcggagtcagttaaagaaaattgaggaccttggggcagccatggaggaagccctgattttggataacaaatacaccgaacactctacagtcgggctcgctcaacagtgggatcagttggaccagctaggaatgcgtatgcagcataatctcgaacagcagattcaggctcggaataccactggcgtgaccgaggaagctttgaaggagttcagcatgatgtttaaacattttgacaaagacaagagcggtagactgaatcatcaggagtttaaaagttgtctacgctctttggggtacgaccttcccatggtggaggaaggcgaacccgacccagagttcgaggctatcctcgatacggtcgatcctaacagagacggccacgtgtccttacaggaatacatggcctttatgatttccagagagactgaaaatgtcaagtcatctgaggagatcgagagtgcttttagggcactctccagcgaaggtaagccatatgtcacgaaggaggagctgtatcagaatttaactagggaacaagcagattattgtgtgtcccatatgaagccatacgtggatggtaaaggtcgtgagctgcccaccgcatttgattacgtggaattcacccggagcttgtttgtgaatta

SEQ ID NO: 242087 - DNA, 1485 bp, synthetic construct
  misc_feature 1..1485: note = Description of Artificial Sequence: Synthetic coding sequence
  source 1..1485: mol_type = other DNA
atggccgcaagcaggcgagccaagctgaatgaatctcataggctgcaccaattctttcgcgatatggacgatgaagaatcttggattaaagaaaagaagctgctggttgggtctgaggattacggcagagacctcactggcgtgcagaacctgaggaaaaagcacaagagactggaggccgagctggccgctcacgagcctgctattcaaggggtcctcgatacgggaaagaagctctcagatgacaacaccatagggaaagaggaaattcaacagcggctggcacaattcgtggaacactggaaggaactgaagcagcttgccgctgctcggggtcagagactagaggaaagcctagagtaccagcagtttgttgcaaatgtggaagaagaagaggcgtggatcaatgagaagatgaccttggtggcctccgaggattatggagacacactagcagccattcagggacttctgaaaaagcacgaagccttcgaaacagactttaccgtgcataaagatagggtgaatgacgtatgtacaaacgggcaggatttgatcaagaagaataatcaccatgaagagaatatctcaagcaagatgaagggcctgaacgggaaggtctccgacctggaaaaagcagcggcacagcgcaaggccaagctggacgaaaatagcgccttcctgcaatttaattggaaggctgatgtggtggagtcatggattggtgagaaggaaaatagtctgaaaaccgacgactacggacgcgacctgagctctgtacagactctcttgaccaaacaggaaactttcgatgctgggttgcaagccttccagcaggagggcattgccaacatcactgcactgaaagaccagctgttggccgcaaaacatgtccagagtaaggcaatcgaggctagacatgcttccctgatgaaacgctggtcccagctgttagcaaacagcgcagcaaggaagaagaagctgttggaagcacagtcccattttcgcaaagtagaggatctgtttttaacattcgctaagaaagcctccgccttcaattcctggtttgagaatgcggaagaagatctcaccgacccagtgcgctgcaactccctcgaggagattaaagccttacgagaagcccatgatgcctttcgaagcagcctcagcagtgcccaggctgattttaaccagctggccgagttggatagacagatcaaaagcttcagggtagcatccaacccatatacttggttcaccatggaggcactggaggaaacatggagaaacctgcagaagatcataaaagaaagggagctcgaactccagaaggagcaacgtagacaggaagagaacgacaagcttcgtcaggaattcgcacagcacgctaacgcgtttcaccagtggattcaggaaacccgctgtcagcggaaagatggtcagctgcagggcggaagagttggggacccacgtattccagcctag

SEQ ID NO: 242088 - DNA, 7418 bp, synthetic construct
  misc_feature 1..7418: note = Description of Artificial Sequence: Synthetic coding sequence
  source 1..7418: mol_type = other DNA
atggacccatccggcgtaaaggtgttggagaccgccgaggatatacaggagcgcaggcagcaggtgctggataggtatcataggttcaaggaactatctaccctgaggcgtcagaaactggaggactcctatcgatttcagttcttccagagggatgccgaagagcttgaaaagtggattcaggagaagttgcagatcgcctccgatgaaaactacaaggaccccaccaatctgcagggaaagctgcaaaaacaccaagctttcgaggcagaagtccaggctaactccggagctatcgtgaaactggacgagaccggcaatttaatgattagtgagggccactttgctagcgaaactatccgcacgaggctcatggagctccatagacagtgggagctgcttctggagaaaatgcgagagaaggggataaagttgctgcaagctcagaagcttgtccaatacctgagggaatgtgaagacgtcatggattggattaacgataaggaagccatagtaaccagcgaggaactaggtcaggatctggagcacgtggaggtcctgcaaaagaagtttgaggagtttcagaccgacatggctgcccacgaagagcgcgtgaatgaagttaatcaattcgccgcaaagctgatccaggagcagcacccagaggaggagctcataaagacaaaacaggacgaggtcaacgcggcatggcagcggctgaaaggcctggccctccagcggcaggggaagctgtttggagcggcagaagtgcaacgtttcaatcgggatgtggatgaaacgatttcttggatcaaggagaaggagcaactcatggctagcgatgatttcggtcgcgatctggcctccgtccaggctctattaaggaaacacgagggtctggaaagagacctggccgctttggaggataaagtgaaagcactctgcgccgaggcagatagactgcagcagtcacatcccctgtctgccacccagattcaggttaaaagggaggaactgattactaattgggagcagatcaggacactggctgcagaaagacacgcaagattgaatgattcataccgcctgcagcgcttcctggctgatttccgcgatctgaccagttgggtgaccgaaatgaaagcgctgatcaatgccgacgagctcgcttccgacgtagccggagcggaggcccttctggataggcaccaggagcacaaaggagaaatcgacgctcacgaggattctttcaagagcgccgacgaaagtgggcaggctcttctcgccgctggacattacgcaagcgatgaggtgagagagaaactgaccgtgcttagcgaagagagggctgcgctcctggagttgtgggagttgaggcgacagcagtacgagcagtgcatggacctccagcttttctaccgggataccgagcaggtagacaactggatgagcaaacaggaggcctttttgctcaatgaagacctcggagatagccttgacagcgtcgaggctttgttgaagaaacacgaggacttcgagaagagcctgagcgctcaggaagaaaaaataactgccctagacgagtttgcaaccaaattgatacagaataaccactatgctatggaagacgttgccaccagacgggatgctctgctcagccggagaaacgctttgcacgagcgggctatgcggagacgcgcacaactcgctgatagcttccacctgcagcaattcttcagagacagtgatgagctgaaaagctgggtcaatgagaagatgaagactgctacagacgaagcctacaaggaccctagtaaccttcaggggaaagtccagaagcaccaggctttcgaagcagagttaagcgctaaccaatcgaggatagatgcacttgagaaggcaggacaaaagctgatcgacgttaaccactacgccaaggacgaggtcgcagccagaatgaatgaggtgatctcactctggaagaaactcctcgaggctaccgaattgaaaggtatcaaactgcgagaagctaaccagcaacagcagttcaataggaatgtcgaggatatcgaactctggctgtacgaagtggaagggcatttggcctctgacgactacggaaaagacttaaccaatgtgcaaaacctgcaaaagaagcatgccctcctggaagctgatgttgcggctcaccaggacagaatcgacggaataacaattcaagccagacaattccaggacgccggacactttgacgccgagaatataaagaagaaacaggaggccctggtggccaggtacgaagcactgaaagagccaatggttgccaggaagcagaagctagcagacagcttgcgattacagcagctgttccgcgacgtcgaggatgaggagacttggataagagagaaggaacctattgctgcaagcacaaacagggggaaggacctgattggagtccagaatctgctcaagaaacatcaagccctgcaagctgagatcgcgggtcacgagccccgaatcaaggccgtgactcagaaggggaatgctatggttgaggaaggccactttgctgcagaggatgtgaaagccaagttgcatgagcttaatcaaaagtgggaagcactcaaggccaaagccagccagcgcaggcaagacctggaggacagcttgcaggcacaacagtactttgccgacgccaacgaagctgaaagctggatgagagagaaggaacctattgtaggttcgactgattatggaaaagacgaggattccgcagaggccctgctaaagaaacacgaagcgctgatgagtgacctgagcgcctacgggagctcgatccaggctctccgagagcaggcccagtcttgtcgtcagcaggtggccccaaccgatgacgagaccggcaaagagctggtgttagccctttacgactaccaagaaaagagtccccgtgaagtgactatgaaaaaaggagacattctgaccctcttgaacagcacaaacaaagactggtggaaggtggaagtgaatgataggcaagggtttgtgcctgctgcatatgtgaagaagctcgaccccgctcaatccgcatctcgggaaaacctgttagaggagcagggttcgatcgcgctccggcaggagcagatcgacaaccagacccggattaccaaggaagccggttcagtaagtctgagaatgaaacaggtcgaagagctttaccatagcttgctcgaactcggcgaaaagagaaaaggcatgcttgagaagagctgtaagaaattcatgctcttccgagaggccaatgaattacaacagtggatcaacgagaaagaagccgctctgacatccgaggaggtgggggctgacttggaacaagtggaggtgcttcagaagaaatttgacgacttccagaaggatctcaaagctaacgagtctcggctgaaggacataaataaggtcgccgaagatcttgagtcggaggggttaatggccgaggaagtgcaagcagtgcagcagcaggaggtgtatggaatgatgcccagggatgaaactgatagtaaaacggctagtccatggaagtctgccaggttgatggtgcatactgtggccacatttaactccatcaaggagctgaacgagcggtggagaagcttgcaacagctcgccgaggagaggagtcagctgctgggcagtgcccacgaggtccaacgcttccaccgcgacgccgatgagaccaaggagtggatagaggaaaagaatcaagcgcttaacaccgataactacgggcacgacctggcgtcagttcaggccctgcaacgaaagcacgagggatttgaacgggaccttgctgccctgggcgacaaggtgaactccctgggagagactgctgagaggctgatccagtcccatccagaaagtgcagaggatctgcaggagaaatgcaccgagctgaaccaggcatggtcatctctagggaaacgggctgatcagaggaaggcaaaactgggagattcgcacgatctgcagagatttctttccgatttcagagacttgatgagttggataaacggaatacgtggactggtgtcatccgacgaactggctaaagatgtaaccggcgcagaggccctgttggaaaggcaccaggagcatcggaccgagattgatgcacgggcagggacttttcaggcgtttgaacagttcggacagcagctgctcgcacacggacattacgcaagtccagagatcaaacagaagctcgacatcctggatcaggagcgggctgacctggagaaagcctgggtgcagcggcgtatgatgctggaccaatgcttggaactgcagcttttccaccgagattgtgaacaggccgaaaattggatggccgcacgtgaagcctttctcaacacagaggacaagggagattctctcgatagcgttgaagccctaatcaagaagcacgaggatttcgataaggctattaatgtacaggaagaaaagatcgccgcacttcaggccttcgcggaccagctgatcgcggctgggcactacgccaagggcgacattagctcccgaagaaacgaggtgttggatcgttggaggcggctaaaggcccaaatgatagagaagaggtccaagctgggagagagccagacattgcaacagttttcccgcgacgtggacgagattgaggcgtggatctccgagaaactgcagacggcctccgatgagagttacaaggatcccaccaatattcaaagcaagcaccagaaacatcaggcatttgaagccgaactccacgccaacgcagaccggatccgcggagttatcgatatgggtaactccctgatcgagcgcggtgcatgcgccggtagcgaggacgccgtaaaggccagacttgccgctctagccgaccagtggcaattcctggtccagaaaagtgcggagaagagccagaaactgaaggaggccaacaaacagcagaattttaataccggcattaaagacttcgacttctggctgtccgaagtggaggcgcttctggccagcgaagactatgggaaagacctagcttcagttaataatttgctgaaaaagcaccaactgcttgaggctgacatttcagcacatgaggaccgtcttaaagaccttaactcccaagccgacagccttatgacatctagtgccttcgacacttctcaagtgaaagacaaaagggacaccattaatggtcgcttccagaagattaagtctatggcagcaagccgccgagccaagctgaatgaatctcaccgcctccatcagttctttcgggacatggacgatgaagagtcatggatcaaggagaaaaagctcctagttggaagtgaggactacggaagggacctgacaggggtgcagaatctcaggaaaaaacataagaggctcgaagcagaactcgccgcacacgaacctgcgattcagggtgtgctcgacactggcaagaagttgagcgacgataacacaatcgggaaagaagaaatccaacagagactagcacagtttgtcgagcactggaaagaactgaagcagctcgccgcagcccgaggccagaggctcgaggaatcactagaataccaacaattcgtggccaatgtcgaggaggaggaagcatggattaacgaaaaaatgacgttggtggcatccgaggactatggtgataccctggccgctatacagggcttgcttaagaagcatgaggccttcgagaccgacttcactgtccataaagacagggttaatgacgtgtgtaccaacgggcaggaccttatcaaaaaaaacaatcaccatgaggaaaatatcagcagcaagatgaaaggtctcaatggcaaagtgagtgacttagagaaagccgctgcgcagcggaaggccaaattggatgaaaacagcgcatttcttcagtttaattggaaagccgatgtggtggaatcctggatcggcgagaaggaaaatagccttaaaacggatgattatggtcgggatttgtcctcagtccagacactccttaccaaacaagagacatttgatgcgggtcttcaggctttccagcaggaaggcattgctaatattacggccctgaaagatcaattactggctgcgaagcacgtgcagtcaaaggctatcgaggcacgccacgctagcctcatgaaacgctggtcacagttactcgcgaactcagctgcacgaaagaaaaaattacttgaagcgcagtcccattttcgcaaggtggaagaccttttcctgacatttgcgaaaaaggccagcgcttttaattcctggtttgagaacgcggaggaagatctgaccgatcccgttcggtgcaacagcctggaagagattaaggctctcagagaggcccacgacgcctttagatccagcctgagtagcgcacaagccgactttaaccagctggccgaacttgatagacaaattaagagcttcagagtagcttctaacccatacacttggttcaccatggaagccctggaggagacgtggcggaacctgcagaaaatcatcaaagagcgggaacttgaactgcagaaggaacagcgcagacaggaagagaatgataagttaaggcaggagtttgcgcagcatgcaaatgcattccaccagtggatacaggaaacgagaacctaccttcttgacggatcctgtatggtggaagaaagtggaaccctggaatcccaacttgaggcaacgaaaagaaagcaccaggaaattcgggctatgagatcacagctgaaaaagatcgaagatcttggcgctgccatggaggaggccctcatcttggacaataagtacacagagcactccacagtcggacttgcgcagcaatgggaccagctggatcagctggggatgaggatgcagcacaacctggagcagcagatccaggcccgaaatactacaggagtgacagaggaagctctcaaagaattctcaatgatgttcaaacactttgacaaggataagagcggaagactgaatcaccaggaattcaaatcatgcctgcggtccctgggctacgatctcccgatggtggaggaaggtgaaccagatcctgagttcgaagctatcctggatactgttgatcccaacagggatgggcatgtctcactgcaggagtacatggcatttatgatatcccgggagaccgaaaacgtaaagagtagcgaggagattgagtcggcgtttagagccctgtcttcggagggtaaaccctacgtgacaaaggaggaattgtaccaaaacctcacccgggagcaagcagactattgtgtgtcacacatgaaaccgtacgttgacggcaaaggacgtgaacttccaacagctttcgactatgtcgagtttacccgctcactgttcgtgaacta

SEQ ID NO: 242089 - DNA, 7433 bp, synthetic construct
  misc_feature 1..7433: note = Description of Artificial Sequence: Synthetic coding sequence
  source 1..7433: mol_type = other DNA
atggatccctccggcgtgaaagtcttggagaccgcagaggacatccaggaaagaagacagcaagtacttgaccgctatcataggttcaaggagctcagtactcttaggcgccagaagctggaagacagttatcggtttcagttctttcagagggacgctgaagagctcgagaaatggatccaggaaaagctgcagatcgcttctgatgaaaactataaggatcccacaaatctccaaggaaagttgcagaagcaccaggcctttgaagctgaagtgcaggctaattcaggcgctattgtcaagctggacgaaaccgggaacttgatgatctccgaaggacatttcgcatctgagactatacgaacgagactgatggagttgcacaggcaatgggagctgctgctcgagaagatgcgagagaaaggtattaaattgcttcaggctcaaaagctggtccagtatctgagggaatgcgaagacgtgatggattggattaatgacaaagaagcgatagtgacctcagaagagctgggccaggacttggagcacgtagaggtactccaaaaaaaattcgaagaattccagacagatatggctgcccacgaagagagagtgaatgaagtgaatcaatttgccgcaaagcttatccaggagcagcaccccgaagaggagctgattaaaaccaagcaagacgaagtgaatgctgcctggcaaagactgaagggcctcgcccttcagcggcagggcaagctgttcggggctgccgaagtgcagcgctttaaccgggatgtggacgaaactatcagttggataaaagagaaggaacagctcatggctagcgatgattttggcagggatctggcctctgtgcaggctttgctgcgaaaacatgaaggattagaacgcgatctggctgcactcgaggataaggtaaaggcattgtgtgctgaagctgaccggcttcaacaatcacacccgcttagtgcgacacagatccaggtcaaaagagaggagctgattacaaattgggaacagatccgcacactagcggcagaacgccatgcacggctcaatgactcttaccgcctgcaacgcttcctggccgatttccgggacctgacctcatgggtcaccgagatgaaggcccttattaacgccgatgaactggcatccgacgtggcaggtgccgaagcattgctggatcgacatcaggaacacaagggggagatcgacgcacatgaggacagtttcaagagcgccgacgagagtgggcaggcgcttctcgccgcaggacactacgccagtgacgaggtccgagagaaactgaccgtcctctccgaagagcgggctgctctattggagttgtgggagctgcgacgccagcaatacgagcaatgcatggatctgcagcttttctaccgggatacagagcaggttgacaactggatgtccaagcaggaggccttccttctcaatgaggatctgggcgattctcttgattccgtggaagcactgctcaaaaaacacgaggattttgaaaaatcactgtcagctcaggaggagaagataaccgcgctggatgaattcgctaccaaattaatacagaacaatcattacgcaatggaggatgtagccacacgcagagacgcgctgttaagccggagaaatgctctccacgaacgcgcaatgcggaggcgagctcagctggctgactcttttcatctgcagcagttttttcgcgacagtgacgagctcaagagttgggtcaacgaaaagatgaaaaccgcaacagacgaagcgtacaaagaccctagcaacttacagggcaaggtgcagaaacaccaggccttcgaagctgagctgagtgctaaccagtcccgcatagacgcactggaaaaggccggacagaaactgattgacgtaaatcactacgctaaggatgaagtagccgctcgcatgaatgaagtaatctctctctggaagaagctgctggaggccaccgagctgaaaggcatcaagttgagggaagctaaccaacaacagcagtttaatcgtaatgtggaagatatcgagctgtggttgtacgaggtggaagggcaccttgcatctgatgactacggcaaggatctgactaatgtccagaacctgcagaagaagcacgccctgctggaagccgacgtcgccgctcaccaggatcgcattgacggcatcactattcaagccaggcagtttcaagatgccggtcacttcgatgccgagaatattaagaagaagcaggaggctctggtggccagatacgaggctctgaaggaaccaatggttgccagaaaacaaaagctggccgactctctccgcctacagcagcttttccgagatgtggaggacgaagagacatggattcgggagaaagagcctatcgcagcctccactaatagagggaaggaccttataggtgtgcagaacttgctgaaaaaacaccaggctctccaggctgaaatcgcaggtcatgaaccaaggataaaagcagtgacccagaagggcaacgccatggtggaggagggacactttgccgctgaagatgtgaaagcaaaactccacgagctcaatcagaaatgggaagctttgaaggccaaggcatcccagcgaaggcaggatttagaggactctctccaagcccagcagtatttcgctgacgcaaatgaggccgaaagttggatgagggagaaagaaccaatcgtagggtctaccgactatggcaaagacgaggatagtgccgaagctctactgaagaaacacgaagctctgatgtcagacttgtcagcctacggttccagcatccaggcgctgcgtgagcaggcccagtcgtgccgccagcaggtcgctcccacagatgatgagacaggaaaagaactggtccttgctttgtacgattaccaggaaaagagcccgcgtgaggtgacaatgaaaaagggtgatattctgacactgctgaactccactaataaagattggtggaaagtcgaagttaacgacaggcaaggcttcgtgcccgctgcctacgttaagaagctagatcctgcacaaagcgcctctcgagagaatctacttgaggagcagggtagtattgccctgcggcaggagcagatagacaatcagacaaggatcacaaaggaagccggttccgtgagtttacggatgaagcaggttgaggagctttaccactccctcctcgagttgggcgagaaaagaaagggaatgctcgagaagagttgtaagaaatttatgctatttcgtgaagcgaatgaactccaacagtggataaatgagaaggaagcggctctcacttctgaggaggtgggggctgacttggaacaggtggaggtgctgcagaagaagttcgatgatttccaaaaggacctgaaagccaatgagtcaagactcaaggacataaataaggtagccgaagacctggagagtgaagggctgatggctgaggaggtgcaagccgtgcagcagcaggaggtgtatggaatgatgcctcgagacgaaacagacagtaaaaccgctagcccctggaaaagtgccaggctcatggtccatacggttgccacgttcaactcaattaaggagcttaacgaacggtggaggtcattacagcagttggcggaggagcggtctcagctcctggggagtgcccacgaggtacagcgattccatcgggatgccgatgaaacgaaggagtggattgaggaaaaaaaccaggctctaaataccgacaattatggtcatgaccttgccagcgtccaggctttgcaaaggaaacacgaggggtttgagagagatctggcggcactgggcgacaaggtgaatagcctcggtgagacagcagagcgtttgattcagagccatccagagtccgcggaggatttgcaggagaaatgtaccgagctgaatcaggcctggtcttcactgggcaagcgcgctgatcaacgtaaggccaagttaggggacagtcacgatctgcaaaggtttctatccgacttcagggacctgatgtcctggatcaacggaataagagggctggtctcttccgatgagctggccaaagacgtcactggcgctgaagctctgctcgagcgccatcaagagcacaggactgagatcgacgcacgggcaggcactttccaggccttcgaacagttcggccaacagcttttggcccacgggcactacgccagtcccgagatcaagcagaaactcgacatactggaccaagaaagggctgatcttgagaaggcctgggtgcagcgcagaatgatgctggatcagtgtctggaacttcagctcttccaccgtgattgcgagcaggctgaaaactggatggctgcccgagaagccttcctgaacacggaagataagggagacagcctggacagcgttgaagcactgattaagaaacacgaagactttgataaggccatcaatgtacaggaggagaagattgctgctttacaggccttcgccgaccagttgatagctgccggacattacgccaagggcgacatctcaagtcggcgaaacgaagtcttggatcgatggcgcagacttaaggctcagatgattgagaagcgctcaaagctgggcgaaagtcagacactgcagcagttttccagagacgttgatgagatcgaggcctggatctccgaaaaactgcaaaccgctagcgatgagtcctataaggacccgactaatattcagctctctaagcttttaagtaaacatcagaagcaccaggcctttgaggccgaactgcacgctaacgccgatcggatccgtggcgttattgatatgggaaatagcctgatcgagaggggggcttgcgcgggatcagaggatgctgtgaaagcccgtctcgcggctctagctgaccaatggcagtttctggtccagaagtctgccgagaaatcacagaagctcaaagaggctaacaagcagcagaactttaacacgggtataaaagatttcgatttctggctgtccgaagtcgaggcattacttgcctctgaagattatgggaaagatctcgcctcagtcaacaaccttcttaagaagcaccaactcttggaggccgatatctctgcacacgaagatcgccttaaagacctaaattcacaagccgattccctgatgacctcctccgcctttgataccagccaagtgaaagataaacgggatacaataaatgggagatttcagaagatcaaatctatggcagcgagtaggcgcgctaaactgaatgaatctcaccggctgcaccaattcttccgcgacatggacgacgaagagtcctggatcaaagaaaagaaactccttgtggggtctgaggattacggcagagatctgacaggggttcaaaaccttaggaagaaacacaagcggctcgaagccgagctggccgcacacgaaccagctatacaaggtgtgctggacaccggcaagaagctgtctgatgataacacaataggaaaggaagaaattcagcaaaggttggctcagttcgttgaacattggaaggagctcaagcagctcgccgcagctagggggcagcggctggaggaaagtctggaatatcagcagtttgttgcaaacgtagaagaggaggaggcatggatcaacgaaaagatgacactggtggcctccgaggactatggggacacactggccgcaattcagggcctactgaaaaagcatgaggcctttgaaacagattttaccgttcacaaagaccgcgtgaatgatgtgtgtacaaacggccaagaccttattaagaaaaacaaccatcacgaggagaatatctcctctaaaatgaagggactcaacggaaaggtgtctgatctcgaaaaagccgcagcccaaaggaaggcaaagttagatgaaaactccgcatttctccagttcaactggaaggccgacgtggtggagtcatggatcggggaaaaggagaatagcctcaagaccgacgattatggcagggacttaagttccgtgcaaacactcctgactaagcaagagactttcgatgccggactgcaggcgttccagcaggaaggaatcgctaacattaccgctcttaaggaccagctgctcgcggctaaacatgtgcagagcaaggccatcgaagcacgacacgctagcttgatgaaacgatggagtcagctgctcgcaaacagtgccgcacgtaaaaagaaacttctcgaagcccagtcacatttccggaaggtggaagacctgttcctcacatttgccaaaaaagcctcggcatttaactcatggttcgagaacgcagaagaggacctaactgatccagtgcgatgtaatagcctggaggagatcaaggccctgcgcgaagcgcatgatgcctttcgctccagtctgtcgtccgcccaggccgatttcaatcagttagctgaactcgatcgacaaataaagagtttcagggtggcttcaaatccttacacatggttcactatggaagcacttgaggagacgtggaggaacctccagaaaattatcaaagagagggaattggagctacagaaggagcagagaagacaggaagaaaacgacaagctccggcaggagttcgcccaacacgccaacgccttccaccagtggatccaggaaaccaggacctacttactggatggcagttgcatggtagaggaaagcgggacactggaaagtcagttggaggcaaccaaaagaaagcatcaagaaatccgtgcaatgagatcacagttgaaaaagatcgaggatctgggagccgcaatggaggaagcgctcatccttgataacaaatatactgagcacagtacagttggccttgctcaacagtgggatcagctggaccagcttggcatgcgtatgcagcataatctggagcaacaaattcaagctcgcaatactactggagttaccgaggaggctttaaaagagttcagcatgatgttcaaacactttgataaggataagtcaggacgcctcaaccatcaagaattcaagtcctgccttcggagtctgggctacgatctacctatggttgaagaaggggagccggaccccgaatttgaggccatcttagatacagtcgacccaaatcgcgacgggcacgtgtctctccaggagtatatggcgtttatgatctcccgtgaaaccgagaacgtaaaatcatcagaggaaattgagagcgcatttcgcgctctgtcatccgagggaaaaccttacgtaacaaaggaggagctataccagaatctgacccgggagcaggccgactactgcgtgtcccatatgaagccatacgtggacggtaaggggagagaattaccaacagctttcgactatgtcgagtttacaaggtctctctttgtcaatta

SEQ ID NO: 242090 - DNA, 3444 bp, synthetic construct
  misc_feature 1..3444: note = Description of Artificial Sequence: Synthetic coding sequence
  source 1..3444: mol_type = other DNA
atggagaacaaccgcgataaagtcctctcccctgtggactctggaaacaaactcgtggccgaggggaatctgtactctgataaaataaaggaaaaggttcagttgatcgaggaccggcatcgaaaaaataatgagaaagcgcaggaagcatctgtcctgctgcgagataacctcgaactgcaaaactttctccagaattgtcaagaactcaccttatggatcaatgacaaactgctcacttctcaggatgttagctacgacgaggccaggaatctccataacaagtggctgaagcaccaagctttcgtggctgagctcgcgtctcacgagggttggcttgagaacatcgacgctgaaggcaagcagctcatggacgaaaaaccacagtttaccgcactcgtgtctcagaagctcgaagcactgcaccggctgtgggatgaacttcaggcgaccaccaaagaaaaaactcagcatctgtcagctgctagatcatctgatctccgactccagacccatgccgatttaaataaatggattagtgcgatggaagaccaactgcgctccgatgatcccggaaaagacctaacctctgtcaatcggatgctcgccaaactgaaacgagtcgaggatcaggtgaacgtgcggaaagaggagctgggtgagctctttgctcaagtcccgtctatgggcgaagaggggggagatgccgacctgtccatagagaaacgcttcctggacctgctggagccgctgggtagaagaaagaaacagctcgagtcctccagggcgaagttgcaaatcagcagagacctggaggacgagaccctctgggttgaagaaaggctgcccctggcccagagcgccgattacggcacaaacctgcagaccgtgcagctctttatgaagaagaaccaaacactccagaatgagattctgggccacacccctcgggtggaggatgtgctccagcgaggtcagcaactggtggaagccgcagaaatcgattgtcaggacctcgaagaaaggctaggtcatcttcagagctcttgggatcgactgcgagaggctgcggctggtcgattacagcggctgagagacgccaatgaagcacagcagtactatctcgatgctgatgaagcagaggcatggatcggcgagcaggagctttacgtgatcagtgacgaaatccctaaggatgaagagggggctattgtaatgctgaagcgacatctccgccagcaacgggctgtcgaagattacggccgaaatataaagcagcttgcatcacgggcacagggactgctgtccgccggacaccctgagggagaacaaattattcgcttgcaaggtcaggtggataagcactatgccggattgaaggacgtggccgaggagcgaaaacgaaaactcgagaacatgtaccatctgtttcagctcaagcgcgaaactgacgacctggagcagtggatttccgaaaaagagttggtggcttcttccccggaaatgggccaggattttgaccatgtaacgttgctccgtgacaagttccgggattttgcacgggaaactggggcaatcggacaggagcgtgttgacaacgttaacgctttcatagagaggctaattgatgcgggacatagcgaggctgccactattgccgagtggaaggacggcctcaatgaaatgtgggcagatctgctcgagctgatagacactaggatgcagcttctggccgcttcgtacgacctacatagatacttctacacaggagcagagattcttgggttaatcgatgagaaacatagagaactaccggaggatgtggggttggacgcctcaacagccgagtccttccaccgcgtgcacactgcatttgagcgcgaactgcacttattgggagttcaggtccaacagtttcaggacgtggccacccggctccagaccgcctatgctggtgaaaaggcggaagccattcagaacaaagaacaggaggtgtccgctgcctggcaagctcttctcgacgcctgcgccggaagacggacacagctcgtggataccgctgataagttccgctttttctctatggctcgtgaccttctcagctggatggaaagcattatcaggcagattgagacccaggagcggccaagagacgtgtcatccgtggaactccttatgaaataccatcagggtatcaacgccgagatcgaaacccggagcaagaatttttcagcttgcttagaactgggggagtcactcctgcagcgccagcaccaggcatcagaggagataagggaaaagctgcagcaggtcatgagccgcagaaaggaaatgaatgaaaagtgggaagctcgatgggaacgcctgaggatgttgctggaggtgtgccagttctcaagagatgcatctgtggccgaggcctggcttatcgctcaggaaccctacttagctagtggggactttggacacacggtggactctgtcgaaaagctgatcaaacgccacgaggctttcgaaaaatccacagcctcctgggcggaaagatttgccgctctggagaaaccaactacattggaactgaaggaaaggcagatagccgagcggccagctgaagaaacaggaccccaggaagaagagggcgagacggcgggtgaagctcctgtatcccatcacgccgcaacggaacgtacaagcccgggtgaagaagaagggacatggccacagaatttgcagcagcctccaccccctggtcaacataaggacggtcagaagtcgaccggggacgaaagacctaccaccgaaccgctctttaaggtgcttgatacccccctgtctgaaggagatgaacctgctacgctgccggctcctcgcgatcacggtcagtctgttcaaatggaaggatacttaggcagaaagcacgatcttgaagggccaaataaaaaggccagcaattccaagggagaagaaggagaggagagaagagagaccgaagaggaggatgaggaagaagaggaaactgagagcgtggcggtagaaatgcagcagcacgcaagccatgtgtcatggaacaatttgtactgcgttcttaggaatagcgaactcacgttctataaagacgccaaaaacttagccttaggaatgccttatcatggtgaagagcccctggcattgcggcacgcaatatgcgagattgcggcaaattacaagaagaagaaacacgtttttaaacttaggctgagtaatggaagcgagtggctcttccacgggaaagatgaagaggagatgttatcttggttgcaaggggtgtccactgcaattaatgagagtcagtctattcgcgttaaagcgcagtctttaccactgccatcattatctggacccgacgcctccttagggaaaaaggacaaagagaaacgctttagtttctttccaaaaaagaaatag

SEQ ID NO: 242091 - DNA, 6320 bp, synthetic construct
  misc_feature 1..6320: note = Description of Artificial Sequence: Synthetic coding sequence
  source 1..6320: mol_type = other DNA
atgacatcagccactgagtttgagaacgtcggaaaccagcctccatatagtcggatcaacgctagatgggatgcacccgacgatgaattagataatgacaattctagtgccagactctttgaaaggtctaggatcaaagccctcgcagacgaacgtgaggttgtgcaaaagaaaacatttaccaaatgggtgaactcgcatctggcacgtgtgagctgccgcattacagatctgtacaaggatctgcgcgacgggcgtatgctgataaagctgctggaggtattaagtggagagatgctccctaagcctactaagggaaagatgcggattcactgtctggagaatgtggataaggcattgcagttcttgaaagaacagcgagtgcatctggagaatatgggctctcacgacattgtggatggcaaccacagactggtccttggtctgatctggacaatcattcttcggttccaaattcaggatatcgtggtacaaactcaggaaggtagggaaacaaggtcagccaaggacgccctcctgctgtggtgtcaaatgaagacggcaggttatccccacgtaaatgtcaccaattttacaagctcttggaaggacggcctcgcatttaacgctctgatacacaaacatcgccctgaccttatcgatttcgataaactgaaagacagcaatgcgcgacacaacttagagcacgcctttaacgtcgccgaacgccagttaggcattattccgctgttggaccctgaggatgtctttactgaaaatccagatgagaaatcaattatcacatacgttgtggccttctaccactacttctcaaagatgaaggtcctcgcggtggaaggcaaacgtgtaggaaaggtgattgaccacgctatcgaaaccgaaaaaatgatcgaaaaatatagcgggctggcctctgaccttttgacgtggattgagcagaccatcaccgtgctgaattcgcggaagtttgccaatagcctgacgggcgttcaacaacagttgcaggcatttagcacttaccgtacagtcgagaaacccccaaagttccaggagaagggcaatctcgaagtcttgctgtttacaatccagtctaggatgcgcgcaaataatcaaaaggtttatacgccacatgatgggaagctcgtctcggacataaaccgggcttgggagagtctggaggaggccgaatacaggcgggagttggccttaagaaatgagcttatccggcaggaaaagctcgagcaacttgctaggcgcttcgataggaaagcagccatgagagaaacgtggttaagtgaaaaccagagactggtagcacaggataactttggctacgatcttgccgcagtcgaagcggctaagaagaaacatgaagccatagaaactgacaccgctgcttatgaagagcgcgtgcgcgcactggaggacctagcccaagagcttgaaaaagagaactatcacgaccaaaagagaataacagccaggaaggacaacattctccgcctgtggtcttacttgcaggagctgcttcaaagccgcagacagcgtttggaaaccacactggccctccaaaagctcttccaggacatgcttcattctatcgactggatggatgagattaaagcccacttactgtctgccgagtttggaaaacacttgctggaagtggaggacttgctgcagaagcacaagcttatggaagcagatatcgcaatccagggggacaaggtcaaggcgatcaccgcagccacgctgaagttcactgagggaaaggggtatcagccctgcgatccccaggttatccaggaccgcattagccaccttgaacagtgttttgaggaactttcaaacatggcagcaggtcgcaaggctcagctggagcaatcaaaacgactttggaagtttttttgggaaatggacgaggccgagtcgtggattaaggaaaaggagcaaatctattcaagcctggactacggaaaggacttgaccagtgttctcatcctgcagcggaaacataaggcttttgaggacgagctgcgaggcctggacgcccacctggagcagatttttcaagaagcgcacggtatggtagccagaaaacaattcggacacccccagatcgaggctaggatcaaggaggtgagtgctcagtgggaccagttgaaggacttggccgcattttgtaaaaagaacctgcaggacgcagagaattttttccagttccaaggggatgcagacgacttgaaggcctggttgcaagatgctcatcgacttctatccggagaagacgtgggccaggatgagggggcaacaagagcattgggaaaaaaacacaaggactttctggaggaactggaggagagccgtggcgtgatggagcatctggagcagcaggcccagggctttcctgaagagtttcgcgatagtcccgatgtcacgcaccggctccaggccttaagggagctgtatcaacaggtcgtcgcccaggcagatctccggcagcagcgtctgcaagaagcactcgacctgtacacagtatttggggagacagatgcatgcgagttgtggatgggggaaaaggagaaatggttagcggagatggaaatgcctgataccctggaagatctggaggttgttcaacacagatttgatattctcgatcaggagatgaaaacactgatgactcaaatagatggagtcaacctggccgcaaatagcctcgtcgaatcaggccaccccaggtcacgagaagttaagcaataccaagaccacttgaacacacggtggcaggccttccagaccctggtgtctgagagaagggaggctgtggactccgctctccgcgtgcacaattattgcgtcgattgcgaagagacatcaaagtggattacagacaaaacaaaagtggtggaatctacgaaagatctgggcagggacctggccggtattatcgccatccagaggaaactcagtggtctcgaacgcgatgtggctgccattcaggcgagagtcgacgcgcttgaaagagagtcccagcaattgatggattctcacccggagcaaaaggaagacatcgggcaacgccagaagcatctggaagagctctggcaaggcttgcagcaatctttgcaggggcaggaagatttactgggggaagtgtcacaattgcaggcctttctgcaggatctcgacgatttccaggcctggctcagcattacccaaaaagcagttgcatcagaggatatgcccgaatccttgccagaagctgagcagcttctgcagcagcatgccggtattaaagatgaaatcgacggacaccaggattcctatcagcgggtgaaggagagtggcgagaaggtgattcaggggcaaacggatccggaatacctgctgctggggcagcgcctggaaggcctggatacaggatggaatgctctcggcagaatgtgggaaagtagaagccacactctggcacaatgcctgggattccaggagttccaaaaagacgcaaagcaggcggaggctatcttgtcaaaccaggagtacaccctggcccacctagaacctccagacagcctggaggctgcagaggctggaatacggaaattcgaggattttttaggcagtatggaaaacaaccgggataaggtgttatcgccggtggattctggcaataagctggttgctgaaggcaacctgtatagcgataaaatcaaagagaaggttcagctgatcgaagaccgccataggaaaaacaatgagaaagcacaggaagccagcgtgctgctcagagataatctggaactgcagaatttcttacagaattgccaagagcttactctttggatcaacgataagctgctcacatcccaggacgtttcctacgacgaagcgcgaaacctccataacaaatggctgaaacaccaggcatttgttgccgaactcgcttcacacgaaggatggctcgaaaacatcgatgctgagggtaaacagctgatggatgaaaagccccagtttacggccttagtgtcccagaaactcgaggcactgcaccggctttgggacgaacttcaggccaccaccaaagaaaaaacgcagcacttatcagccgcaaggtcgtcagatctcaggctccagacccatgcggaccttaacaagtggatctctgcaatggaggatcagctgcgatctgatgacccgggaaaggatcttacatccgtaaatcggatgctggcaaaactgaagcgagtcgaagatcaggtcaacgtgcgtaaggaggagctgggagagctttttgctcaggtgccttcaatgggggaggaaggcggagatgcagatctctccatcgaaaaaagattcctcgacctgctggaaccgctaggaaggaggaagaaacagttggagagtagtagggcaaaattacagatcagcagggacctggaggatgaaacgctgtgggtcgaagaacggttgcccctcgcccagagcgccgattacgggactaacctgcagaccgtgcagctctttatgaaaaagaatcagactctgcagaacgagattttgggccacactccgcgagtcgaggacgtgctgcaacggggacagcaattagttgaagcagccgagatagactgtcaggacctggaagagcgcttgggccatcttcagtcttcatgggatcgccttcgggaagcggcagctggcaggttacagcgccttagagatgctaatgaggctcaacagtactatttggatgccgacgaggccgaagcgtggataggggaacaagagttgtatgtcatcagcgacgaaattcctaaagacgaagaaggggcaatcgttatgctgaagcgacacttgcgccagcaaagagcggtcgaagactatggccgaaatatcaagcaattagccagtcgtgctcaaggcctcctatccgcagggcaccccgagggggaacagatcattagactccagggacaggtggacaagcactacgcgggactgaaggacgtggccgaggaacggaaacggaagctagaaaacatgtaccatctattccagctgaaacgggaaacggatgatctggagcagtggattagtgagaaagagcttgtggcgtcctcccctgaaatgggtcaagactttgaccacgtgaccctcctccgtgataaatttagggactttgcaagggagacaggcgctatcggccaggaacgggtagacaatgttaatgctttcatagagagattgatcgacgccggtcatagcgaagccgctacaatcgccgagtggaaagacgggctgaacgagatgtgggccgaccttctcgaactgattgacaccaggatgcaactcctggcagcttcttatgatctacatcggtatttctataccggcgcagaaattttgggattgatcgacgaaaagcaccgagagctgcctgaagacgtggggttagatgcttccaccgctgagtcatttcatcgggtgcatactgctttcgagcgggagcttcacttactgggagtacaagtgcagcagtttcaggatgttgccacgaggttgcagactgcttacgctggtgaaaaagcggaagcaatccaaaacaaggaacaggaggtaagcgcagcttggcaagcactgctcgacgcctgcgctggacgacgaacccagctggtagacacagccgacaagtttagattctttagcatggccagagacttgttatcctggatggagagcattattcgacagatcgagacacaggaacgacctagagacgtatctagcgtcgagctgctgatgaaataccaccaaggcatcaacgcggagatcgaaactaggtcaaaaaatttctcagcctgtctggagcttggtgaatcattgcttcagcgccagcaccaagcttccgaagagatccgggagaaattgcagcaggtcatgtccaggcgaaaggagatgaatgaaaagtgggaagctagatgggaaagactgcggatgctgttggaagtgtgtcaattctcccgtgatgcctcggttgctgaggcctggctaatcgcccaggaaccatatctggcctcaggtgacttcgggcacacggtcgatagtgttgaaaagctgattaagagacatgaagctttcgagaaaagtactgcctcatgggcggagaggtttgcagcacttgaaaaaccgacaactgccagtcggggaggaagacgcgacagtagaggcggttcgtcctttccaccctgtggccaccgtgaaaatgtaccaggccagtctttggtctcttttgttta

SEQ ID NO: 242092 - DNA, 6413 bp, synthetic construct
  misc_feature 1..6413: note = Description of Artificial Sequence: Synthetic coding sequence
  source 1..6413: mol_type = other DNA
atgaccagcgcaacggaattcgaaaacgttgggaaccagcctccctatagtagaatcaatgcgcgatgggacgcccctgacgatgaattagacaatgataactcctcagccaggctctttgagcggagcaggattaaagccctggccgacgaacgcgaagtagtgcagaagaaaacctttactaagtgggtcaattctcatctggcacgcgtcagctgtagaattactgatttatacaaggacctcagagatgggcgaatgcttatcaaactgttagaggtgttaagcggtgagatgctccctaaacctacaaaaggtaaaatgaggatccactgcttagagaacgtggataaagccttgcagttcttgaaagaacagcgagtccacctggaaaatatgggaagccatgacatcgtcgacgggaaccatagactcgttctgggcctgatttggacaataattctgaggtttcagatccaggacatcgtagtacagacccaagagggacgggagacgaggtccgcgaaagatgccctgttgctgtggtgtcagatgaaaacagccggatacccacatgtgaacgtgactaactttacctccagttggaaggatgggctggctttcaacgctttaatccataagcacagacctgatttgatcgattttgacaagctgaaggattcaaacgcccgtcacaaccttgaacatgctttcaatgtggcggagagacagcttgggatcatacccctgcttgaccctgaagacgtgttcactgaaaatcccgacgagaagtccatcattacgtacgttgtagctttttaccactacttctcaaagatgaaagtgctggctgtggaaggtaagagggtggggaaggtcatcgaccacgcgattgaaaccgagaaaatgatcgagaagtactctggcctcgcctccgatctccttacttggattgagcagaccattacagtcctgaactctagaaagttcgcaaattccctcactggagtccagcagcagttacaagctttcagcacatatcggaccgtggaaaagcctccgaaatttcaggagaaaggcaacctggaggttctattatttaccattcagtctaggatgagagcgaacaaccagaaggtgtacactccgcacgacgggaagcttgtgtccgacattaacagggcatgggagagcctcgaagaagcagagtacagaagagaactcgccctccgcaacgaactgataagacaagaaaaactggaacagctcgctcgacgctttgataggaaggcagcgatgcgggagacttggctcagcgagaaccagcgcctcgttgcccaggataatttcggttacgatctggcagctgtcgaggctgctaagaagaaacatgaggccatcgagactgacactgctgcctatgaggaacgcgtgcgtgcactcgaggacctggcccaagaattagagaaagaaaattatcatgatcagaaacgtattaccgcccgaaaagacaacattcttcgcctctggtcttatctccaggagcttctgcagagtagacgccagcggctcgaaacaactctggccctccagaagctcttccaagatatgttacacagtatcgactggatggacgaaattaaggcccacctgctgtcggcagaatttggcaagcacctactggaggtcgaagacttgctgcagaaacacaaacttatggaggcggatatagccattcagggtgataaagtgaaggccattacagctgcaacattgaagttcaccgaaggcaagggctatcagccttgtgatcctcaagtcatccaggatcgcattagtcacctggaacagtgcttcgaggagctatctaatatggcggcaggtaggaaggctcagctggagcagtctaaacgactttggaaatttttctgggaaatggatgaggctgaatcctggataaaggaaaaggaacagatttactcatcccttgattacggcaaagatctgacttcggtactgatactgcagcgcaagcacaaagcatttgaggacgaattgaggggcctcgacgcgcacttagaacaaatctttcaggaggcccatggaatggtcgccagaaaacaattcggccatccacagatagaagcacggatcaaggaggtatccgctcagtgggaccaacttaaagatctggcagctttttgtaagaagaatctccaggacgccgagaatttctttcaattccagggagatgccgacgatttgaaggcttggcttcaggacgcccataggctgctgagcggcgaagacgtaggacaagatgagggggcaacccgggctcttgggaagaagcataaggactttctcgaagaactggaagagtctagaggtgttatggagcacttagagcagcaagcccaagggttccccgaggagttcagagactctccggatgttacacataggctgcaggcactgcgcgaattgtatcagcaggtggtggcccaagccgacctccggcagcagagactccaggaggcccttgacctatataccgtgttcggcgagacagatgcctgtgaactgtggatgggagagaaagaaaaatggttagcagagatggagatgccagacaccctcgaagacctcgaggtcgtgcagcacaggttcgacatccttgaccaggaaatgaagactcttatgactcaaatcgatggggtaaacctagcagcgaatagcctcgtggagagcggccacccacgaagtagagaagtcaaacagtatcaggaccacttgaatactcgttggcaggccttccagacactcgtctcagagagacgcgaagccgtggactctgctctccgggtgcataactactgtgtggattgcgaagagacatcaaagtggatcacagacaaaaccaaggtggtggaatctaccaaggacctgggacgcgatcttgccggaataattgcaatccagagaaaattgagcgggcttgaaagagatgttgccgcaatacaggccagggttgacgcactggagcgggagtctcagcagctgatggactcccacccagaacagaaagaggacatcggacagcgccagaaacatctagaggaactgtggcaaggcttgcagcagtcactgcagggccaggaagacctgcttggcgaagtgagtcaattgcaggcattccttcaagatctagacgactttcaggcttggctgtcaattacgcagaaagcagtggcatcagaggatatgccggaatctttgcctgaagcagaacaattgctgcagcagcacgccggaatcaaggacgagattgacggtcaccaggatagctatcagcgggttaaagagagcggagagaaggttattcagggacagacagaccccgagtatctgctgcttgggcaaaggctggaggggctcgatacaggctggaacgcactaggtaggatgtgggagagcaggtcccatacactcgcccagtgcctggggttccaggagtttcaaaaggatgctaaacaggcggaagcaatcctgagtaaccaggaatacacactagcccaccttgagcctccggatagcctggaggccgcagaagctggcataaggaaatttgaggattttctcggcagcatggagaataacagagacaaggtcctgtctccagtggattccggcaacaagctggttgccgagggtaatctgtactctgacaagattaaggagaaagtccaattgattgaggatagacacaggaaaaacaatgagaaggcccaggaggcgtctgtgctccttagggacaacttggagctgcagaatttcctgcagaattgtcaggaacttactctgtggatcaatgataaactcttaacaagtcaagatgtgtcttatgatgaggcgcgaaacctgcacaacaagtggctgaaacaccaggccttcgttgccgaattggccagccacgagggctggttggaaaacatagacgctgagggtaagcagctgatggacgagaagccacaattcactgccctggtaagccagaagttggaggctttgcatagattatgggacgaactccaagctacaacaaaggagaagacacagcacctgtctgccgcacgatcatcagacctgagattgcagacccacgccgacttgaacaagtggatctccgcaatggaggaccagctccgctctgatgacccgggtaaggacttgacctccgttaaccgtatgctcgccaagctcaagcgggtcgaggatcaggtgaacgtcaggaaggaggagctgggtgaactcttcgcccaggtacccagcatgggagaggaaggcggtgacgctgacctgtcaattgaaaaaaggttcctcgatctcctggaaccactgggcagaaggaaaaaacagctcgagtcttcacgggcaaagttacaaatttctagggatctggaggatgagaccctgtgggtcgaggagagactgcccttagcccagtccgccgattatgggaccaacctgcagaccgtccagctgtttatgaagaaaaaccaaaccctccagaacgagatcctgggccacacaccacgggttgaagacgttctccaacggggacagcagctcgtcgaagcagccgaaatagattgtcaggatcttgaagaaaggctgggacaccttcagtcctcttgggaccgactccgggaggcggctgccggaaggctgcagagactaagagatgccaacgaggcccagcagtactatttggatgctgatgaggcagaagcatggattggcgagcaggagttgtatgtgattagcgacgagatccccaaggatgaggagggcgcaatcgtgatgctgaaacgccacctgaggcaacagcgcgctgtggaagactatgggagaaatatcaagcagcttgcgtctagggcccaggggctgctctccgccggtcaccccgaaggcgagcagatcatccgcctgcaaggacaggtggataagcactatgccggactgaaagacgtggctgaggaaagaaaaaggaaactggaaaatatgtatcatctgtttcagctgaagcgtgagaccgatgatttggagcagtggattagtgagaaggaactggtagcttcttcacctgaaatgggtcaggacttcgaccatgtgacattgcttagagacaaattccgagacttcgcacgggagacaggcgctatcggacaggaaagggtggataatgtgaatgcgttcattgaaagactcatcgatgcaggccacagcgaggccgcaaccatcgcagaatggaaagacggactcaacgaaatgtgggccgacctcctggaactgattgatacaaggatgcaactcctcgccgcatcctacgacttgcatcgctacttttatacaggtgccgagattctgggactgattgatgagaagcacagagaactgcccgaagacgtggggttagacgcatccacagctgagtccttccatcgcgtgcacaccgctttcgaacgggaactccatcttctgggggtgcaagtgcagcagtttcaagacgtggccacaagactccagaccgcctatgctggagaaaaggcagaggccattcaaaataaggagcaggaggtcagcgcggcatggcaggctctactcgacgcttgtgctgggaggcggactcagctggtcgatactgctgacaaatttcgatttttttccatggcgagagatctcctttcctggatggaatcgatcattagacagatagagacacaggaacgtccgagggatgtttcgagcgtcgaactgctcatgaaatatcaccagggcatcaatgcagagattgagaccagatccaaaaatttctccgcttgcctcgagctcggggagtcgctcctgcaaagacagcatcaggcctcagaagaaatcagggaaaaattgcaacaggtgatgagtcgcaggaaggagatgaacgagaagtgggaagcccgttgggagagactgagaatgttgttggaagtttgccagttttcccgagatgctagtgtggctgaagcttggctgatcgcccaggaaccctacttggcttctggagactttggccatacggtagatagcgtggagaaactgatcaaaagacacgaagcatttgagaagtcaactgcttcgtgggcagagcggttcgccgctctggagaagcctactactctcgagcttaaagagcgccaaatcgccgagcgccctgctgaggagacagggcctcaggaggaggaaggcgaaactgctggcgaggcaccagtgagtcaccacgccgcaacagagaggacaagtccagtgtccctgtggtctcgtctctcaagctcatgggaaagcctccaacctgagccctcccacccgtacta

SEQ ID NO: 242093 - DNA, 6986 bp, synthetic construct
  misc_feature 1..6986: note = Description of Artificial Sequence: Synthetic coding sequence
  source 1..6986: mol_type = other DNA
atgacctctgccaccgaattcgaaaacgtgggcaatcaaccaccatatagccgcatcaatgcacgttgggacgcacccgatgacgagttggataacgacaatagctcagctaggctgttcgagcgaagcagaatcaaggcactagcagatgaacgcgaggtcgtgcagaaaaaaacttttactaaatgggttaatagtcatctcgcaagggtttcatgcagaattaccgatctgtacaaagaccttagagacggcaggatgctgattaagctcctagaggtactgtccggcgaaatgctgcctaaacctacgaagggcaaaatgaggattcactgcctggagaacgttgacaaggcactccagtttcttaaagagcagagagtccatctcgaaaacatgggcagtcatgacattgtagatggcaaccacaggttagtgctgggccttatctggacaatcatcttgcgatttcagatccaggatatagttgtgcaaacgcaagagggacgggaaacgaggagtgctaaggacgccctgctattgtggtgccagatgaaaactgccggttatcctcatgtgaacgtgactaacttcacgagctcatggaaggacgggttagcctttaatgcccttattcataagcaccgccctgatttgatcgactttgacaaactgaaagatagcaacgcgagacataacttagaacacgctttcaatgtggctgagaggcagctgggtattatacctctgctcgatcctgaggatgtctttaccgagaaccccgatgagaagtccattataacatacgtcgtagctttttaccactacttctctaaaatgaaggtcttggcagtggagggcaagagagtgggcaaagtgattgatcacgccatagaaaccgaaaaaatgatcgagaaatactcggggctggctagcgatctgctgacttggattgaacagacaatcaccgttctgaacagccgtaaattcgctaattcactgaccggcgtgcagcagcagctgcaggcgttctcaacttaccgaacagtggagaagcctcctaagttccaggagaagggaaatctggaagtgttgctgttcaccatccagagccgtatgagggctaataaccagaaggtctatactcctcacgacgggaaactagtgtctgatatcaaccgggcatgggaaagcctggaagaagcggagtatagaagagaactcgccttgcggaacgagttgattcggcaggagaagcttgaacagctcgcccgtcggtttgatcgcaaggcagctatgagagagacttggctgtccgagaatcagagactagttgcacaagataactttggttacgacctcgcagccgttgaggccgcaaaaaagaagcacgaagctattgaaacagacacagcagcgtacgaggagcgagtcagagctctagaggacttagcccaggaactggagaaggagaattatcacgaccagaagaggatcacagcacgtaaggataatatcttacggctgtggtcatatctccaagagcttctgcagtcccggagacaacgcctggaaacaacactagctctgcagaagttgttccaggatatgctccatagtatcgactggatggatgaaatcaaagcccacttactttccgctgagttcggtaaacacctgctcgaggtggaggatttgctgcagaagcacaaactgatggaggcggatattgctatacagggagacaaggttaaggctattacagcagccaccctgaagtttacggagggaaaggggtaccagccctgtgatccccaggtgattcaggatcggattagccatctggagcagtgtttcgaggaactctctaatatggcagcagggaggaaggctcagctggaacagagtaagagactttggaagtttttttgggaaatggatgaagctgagagttggataaaagaaaaagagcaaatctacagcagcctcgattacggaaaagacctgacttctgttttgatcctccagagaaaacacaaagcttttgaagatgagttacgtggcctcgatgctcatttggagcagattttccaggaggcacatggcatggtggctcgtaaacaattcgggcatccccaaatcgaggccaggattaaggaagtgagcgcgcagtgggatcaactgaaagacctagccgctttctgtaaaaaaaacttacaggacgcggaaaacttttttcaattccagggggacgccgacgatctgaaagcttggttacaggacgcacatcggctgctctccggcgaggatgtgggccaggacgagggagcgacccgcgcactgggcaagaaacataaggatttcttggaggaactggaggagtcccgtggagtgatggagcatctggaacagcaggcccagggctttccagaagaattccgggattctcctgacgtcactcaccgtctccaggcgctccgtgagctttatcagcaggtagtagcgcaggccgatttgagacagcagcgtctgcaggaggcgctggatctttacacagtgtttggggagaccgatgcctgcgagctatggatgggcgagaaagagaaatggctggccgagatggaaatgccagacaccctggaggacttagaggtcgtccagcatagatttgatattttagatcaggagatgaagaccctgatgacccagatagacggagtgaatctggcagcgaattctttagttgaaagcggccaccctagatcacgggaggtgaagcagtatcaggaccacctaaatacccgatggcaggcatttcagaccttagtaagcgagcggcgagaggccgttgattctgctctgcgcgtgcacaattattgtgtcgactgcgaggaaacctctaagtggataactgataaaaccaaagtagttgaatcaacgaaagacctgggacgcgaccttgccggtataattgccatacagaggaaactctccgggctggaacgggacgtggcagcaatccaggccagggtggatgctctcgagcgggaatctcagcagttaatggacagtcaccccgagcagaaagaagatatcggccagcggcagaagcacctcgaggagctgtggcaaggactccaacaatcattacaggggcaggaggacctgctaggagaagtgagccagctccaggcattcctgcaggatctggacgacttccaggcatggctgtcaatcacacagaaggcagtcgcctcagaggatatgcccgaaagcctgccagaggcggaacagctacttcagcagcacgcaggcatcaaagatgaaatcgacgggcatcaagatagctatcagagagttaaggagtccggcgaaaaggtcattcagggccagaccgatcctgaatatctgctcttgggtcaacgcctcgaagggctcgacacaggctggaatgctcttggccgtatgtgggagtcgcgtagccatacattggcacaatgtctcggatttcaggaattccagaaagacgctaagcaggcagaggctatcctgtccaaccaggaatacacactcgcgcacctcgaaccaccagatagcctggaagccgcagaggcaggtatccgtaagttcgaggatttcttaggttccatggagaacaaccgggataaagtgctctctcccgtcgattcagggaataagctggtggccgagggaaacctgtatagcgacaagatcaaggagaaggtccagctcatagaggaccggcatagaaagaacaacgagaaggcccaggaggcttcagtgctgctgagggacaatctagaactgcagaattttctccagaactgtcaagaactgactttgtggatcaacgataagctcctcacaagtcaggacgtatcctatgatgaggccagaaatctgcacaacaagtggttgaagcatcaggcattcgtcgccgaactcgcttcacacgaggggtggctggagaatatcgatgccgagggcaaacagctcatggacgagaaaccccagttcacagcgctggtgtctcagaaactggaagctctgcacaggctttgggatgagctgcaagcgactactaaagagaagacacaacatttgagcgccgcacgctcctcggacctgaggctgcagacccacgcagacctcaacaaatggattagtgcaatggaggatcagctccgtagtgatgatccagggaaggacctgaccagcgtgaatagaatgctggcaaagctgaaaagagtcgaggatcaggtcaacgtgcgaaaagaagagttgggcgagctgttcgcacaggtgcccagcatgggcgaggaggggggagacgccgacctttctatcgaaaaacgatttctggacttgctcgagcccctgggcagacgcaaaaaacagctagagtctagccgcgctaagctgcagatcagtagagacctcgaggatgaaacattatgggttgaggagcgccttcccttagcccagtccgcagactacggaacaaacttacagacagtgcagctctttatgaagaaaaatcagaccttacagaatgaaatactaggccatactccgcgagttgaggacgttctccaaagaggacagcaactagttgaggcagcagagatcgattgtcaagatttggaagaacgcctggggcatctccaaagcagttgggataggctccgcgaagcagcggcagggcgacttcaacggctgcgcgatgccaacgaggctcagcagtactatctggacgctgacgaggctgaggcttggattggggaacaggagctgtatgtcatcagtgatgagatccccaaagatgaggagggagccatagtcatgctgaagcggcaccttagacaacagagagcggtggaggattatgggagaaacatcaagcagctggcttcaagggcccaggggcttttgtctgccggacaccctgaaggggagcaaattatcagactgcaaggacaggtggataagcactatgccggtctgaaggacgtggccgaggagagaaagcgcaagctggaaaacatgtaccatctgttccagcttaagcgcgaaactgacgacctggaacagtggatctctgagaaggagcttgtggcttcatctccagaaatgggacaggatttcgaccatgtgacactgttgcgcgacaagtttagggatttcgccagggaaaccggggctatcggccaggaaagagtggataatgtcaatgccttcatcgaacggcttatcgatgccggacatagtgaggctgcaactattgctgagtggaaggatgggctgaacgagatgtgggcagatctgctggaattaatcgacacacgcatgcaactattggccgctagctatgacctgcatcggtacttctacaccggcgctgagatcctgggtctgattgacgagaagcatcgcgaactgccagaggatgtaggtctggacgccagtaccgcagagtcctttcacagagtgcacactgctttcgagagggagctccatctgctgggagtacaggtccagcaattccaggatgtcgccactcgcctgcagacagcatacgctggcgagaaagctgaagcgatccagaataaagaacaggaggtctcggccgcatggcaggcacttcttgacgcctgcgcaggccgaaggacacagctggtggatacagctgataaattccgtttcttctccatggctagagacctgctcagctggatggagtccattataagacagatcgagacccaggagaggccacgggacgtgtcctccgtggagctgctgatgaagtatcaccagggcataaacgccgagatcgaaacacggagcaaaaatttttccgcatgcttggagctcggtgaaagtctcctgcagaggcagcaccaggcttccgaggagattcgggaaaagctccagcaggtgatgtctaggcgaaaggagatgaacgagaaatgggaagccagatgggagcggctgagaatgctgctggaagtatgtcaattcagtcgcgacgcctccgtggcagaggcatggctgatcgcacaggagccatatctggctagcggggactttggacacaccgtggattctgtggagaaactgattaaacggcacgaggcgttcgagaagtccaccgcttcttgggccgagagatttgcggcactggaaaaaccaaccacactggagctgaaggagaggcagattgccgaaagaccagccgaggagactggcccacaggaagaggaaggcgagaccgctggtgaagctcctgtgagtcatcacgccgcaaccgagaggacttccccaggagaagaggagggaacctggccacagaacctccaacagcccccaccccctggacagcataaagatggccagaagagcacgggagatgagcggccaacaactgaaccactgtttaaagtactggacacaccattatccgaaggcgacgagcctgccaccctgcctgctcctagagaccacgggcagagcgtgcagatggagggctatctgggcagaaagcatgatttagaaggacccaataaaaaagcaagtaaccggtcatggaataacttgtattgtgtattgaggaattccgaactgacattctacaaggacgctaagaacctagccctcgggatgccgtaccatggcgaagaacccctcgccttaagacacgctatatgtgaaattgccgctaactacaagaaaaaaaaacacgtctttaagcttaggctgtccaacggcagcgagtggctatttcacggtaaagacgaagaagaaatgctgtcctggcttcagggcgtgagtaccgccatcaatgagtcgcaaagcataagagttaaggcgcagagtttaccactaccatccctcagtggcccagacgcctctcttggcaaaaaagataaggaaaaaaggttctcttttttccccaaaaaaaaata

SEQ ID NO: 242094 - DNA, 6998 bp, synthetic construct
  misc_feature 1..6998: note = Description of Artificial Sequence: Synthetic coding sequence
  source 1..6998: mol_type = other DNA
gaaccagccgacatgaccagcgcaaccgaatttgagaacgttgggaatcagcctccgtactcaagaattaatgctagatgggatgctcctgatgacgaactggacaatgacaactcatccgcacgcttgttcgagcgctcaagaatcaaagctctggcggatgaaagggaagtagttcagaaaaagacctttaccaagtgggtgaattcccacctggcacgagtgtcttgtagaataactgatctgtataaagacctgagagatggtagaatgctgatcaaactgctggaggtactgagtggggaaatgcttcccaaaccaacaaagggaaaaatgcggatacactgcctcgagaatgtggacaaggcgttacaattcctaaaggagcaacgcgtgcacttggagaatatgggttcacacgatatagtggatggaaatcatcgactggtcttgggtttgatctggactattattctgagattccagatccaggatatcgttgtgcagacccaggagggacgcgagactaggtccgcaaaggatgccttgctcctgtggtgtcagatgaagaccgcgggatatcctcacgtgaatgtgacaaatttcacaagctcatggaaagatggactggcctttaacgccttgattcacaagcatcgaccggaccttatagatttcgacaaactcaaagattctaacgctagacacaacctggagcacgctttcaatgtggccgagaggcagctggggattatccctctactggatccagaggacgtgtttaccgagaaccctgacgagaagagtattatcacttacgtcgttgctttctatcattacttttcaaaaatgaaggttctggccgtggaagggaagcgggttggaaaagtgatcgatcacgccattgaaaccgagaagatgatcgagaagtactctggcctggccagcgacctgctgacctggattgagcagactatcactgtcctcaacagtaggaaatttgctaattcactgaccggcgttcagcagcagcttcaggccttttcaacatataggacagtcgagaagccacccaaattccaggagaaaggaaatctggaagtcctcctgttcaccattcagagtcgcatgcgggctaataaccaaaaggtgtatacgcctcacgacggcaagcttgtctctgacattaaccgggcatgggaaagcctggaagaggcagagtaccgtcgcgagttagcgcttaggaatgagctcatcagacaagaaaagctggagcaattggccaggaggttcgatagaaaggccgcaatgagggagacgtggttatctgagaatcagcggttagtggcccaggataatttcggatacgacctagccgctgtcgaggctgcaaaaaaaaagcatgaggcaatcgagactgatacagccgcttatgaagaacgtgtcagagccctggaggatttggctcaggagctggagaaggaaaattaccacgatcaaaagagaattactgcgagaaaggacaatattcttcggttatggagctatctgcaggagctcctgcaatcaagacggcagcgcctcgaaactaccctcgctttgcagaagctgtttcaggacatgctgcacagcatcgattggatggatgagattaaggctcaccttctgtctgctgaattcggcaaacatctgctggaagttgaagatctgcttcaaaaacataagcttatggaggcagacattgcgatccagggggataaagtgaaggcgattactgcggctactctcaaattcaccgaaggtaaaggttaccagccctgtgatccccaggtcattcaggaccgcatttcccatctggagcagtgcttcgaggagctgtcaaacatggccgctggcagaaaggcacaactggagcagagtaagagactgtggaaattcttttgggaaatggacgaggcagaaagttggataaaagaaaaagagcagatttattctagcttggactacgggaaggatctgactagtgttctgatcctccagcgaaagcataaggcgttcgaggacgagttacggggactagacgcccacctggagcagattttccaggaggcccatggaatggtagccaggaaacagttcgggcatccccaaatagaggcgcgaataaaggaagtgtccgctcagtgggaccagctgaaggacctggctgctttctgtaagaagaacctgcaggacgccgaaaacttctttcagtttcagggcgatgccgacgaccttaaggcttggttgcaggacgcacatcgcttactgagcggagaggatgtgggacaggatgaaggggctacacgcgcactcggcaaaaaacataaggatttcctggaggaattggaagaaagtcgaggggttatggaacacctcgagcagcaggcacaaggattccccgaggagtttcgggactcgcctgatgtgacccatcggctccaggcccttcgcgagctgtatcagcaggtggtagcacaggccgacctgcggcagcagagacttcaggaggcgttggacctttataccgtgtttggcgagaccgacgcatgcgagctatggatgggcgaaaaagagaagtggctggcggagatggagatgcccgacacactggaagatctcgaagtggtccagcaccgctttgatatcctggatcaggaaatgaagactcttatgactcagatagacggcgttaaccttgcagcaaactctctcgtagagagcggacatcccaggtccagggaggtgaaacagtaccaggaccatttaaacacacgctggcaagcattccaaactttagtcagcgaaagaagggaggccgtggactctgccctgagagtgcacaattactgcgtagattgtgaggagacttcaaagtggattactgacaagactaaagtagtggaaagtaccaaagatctggggagggacctggccggaataattgcaatccagcggaagctgagcgggctggagcgagacgtggcagcgatccaggcccgtgtggacgcgctggagcgtgagtcgcagcagctcatggactctcatcccgagcagaaggaggatatcggtcagcgacaaaagcacctagaagaactgtggcaggggctacagcaatccctgcagggccaggaggacctgctgggtgaggtctcgcagttgcaagcatttctgcaggacctggacgatttccaagcttggctcagcatcacacaaaaggctgttgcatcagaggacatgcccgaatctttaccggaggcggagcagttgctccagcagcacgccggaatcaaagatgagatagatggccatcaggattcctaccaacgtgtgaaagagtcaggtgagaaagtcattcaggggcagacagatcccgagtatctgttactgggccagagactggaaggactggatacaggctggaacgctcttggcagaatgtgggaaagcagatctcacacgttggctcagtgcctgggattccaagagtttcagaaggatgccaaacaagccgaagcaattttaagtaatcaggagtatacactcgcacatctggagcccccagatagcctggaggctgccgaggccggtattcggaagttcgaagacttcctcgggtctatggagaacaatagggacaaggtgctctctccagtggatagcggcaataagctggtggctgaagggaacctctacagtgataagataaaggagaaagttcagctgatcgaagatcgtcaccgcaaaaacaacgagaaagcccaggaggccagtgtactcctgcgtgataatctggagttacaaaattttttgcagaattgccaggaactgacattgtggatcaacgacaaactgctgaccagccaggacgtctcctacgatgaggcacgaaatctccacaacaaatggctgaaacatcaggctttcgtggcggaattagcttcccacgagggctggctcgaaaacatcgacgctgaagggaaacagctgatggacgagaaaccccagtttacggcacttgtgtcccagaagctcgaggcgctgcaccgactgtgggacgagctgcaggccaccactaaggagaaaacccagcatctgagcgcggctagatcatctgaccttaggttgcagactcatgctgatctgaataagtggatcagcgccatggaggaccagctgcgttctgacgacccaggcaaggacctgacctcagtgaatagaatgcttgccaaactgaagcgggtcgaagaccaggtaaatgttcggaaagaggagctgggggaacttttcgcgcaggtcccatcaatgggcgaggaagggggagatgctgatctatccattgagaagcgatttttggacctccttgagcccttgggtaggcgcaaaaagcaactggagagttctcgcgctaagctgcagatcagcagagatctggaggacgagacactttgggtagaggaacgcctgccactcgctcagagcgccgattatggaactaacttgcagacagtgcagttgtttatgaaaaagaaccaaactctgcagaatgaaattcttggacacacaccacgcgtggaggatgttcttcagcgaggacagcaactggttgaagccgcagaaattgactgtcaggatcttgaggagagactaggccacctgcagagctcttgggaccgtcttcgggaggcagcagcgggacggctgcaaagattgcgagatgcaaacgaggctcagcaatactatctcgacgccgatgaggctgaggcctggatcggagaacaggagctgtacgttatttccgacgagattccgaaggacgaggaaggcgcaattgtaatgttaaagaggcatctacggcagcagcgtgccgtcgaagactatggcagaaacatcaagcagttagctagccgggctcaggggcttctttccgctggccatcctgaaggggagcaaattataagactccagggccaagtcgacaagcactacgctgggctcaaggacgtggcagaggaaagaaaacggaagctggagaacatgtatcacttattccagctgaagagggaaaccgatgacctagagcagtggattagcgagaaagaactggtggcgtcttccccggagatgggccaggactttgatcacgttacgctgctgagagacaagttcagagatttcgctcgggagaccggtgcgattggacaggagagggtggataatgtcaatgcattcatcgagcggctgatcgatgccggtcactctgaagcagcaaccatcgccgaatggaaagacgggttaaacgaaatgtgggcagatctgctggagctaatagacacaagaatgcagctgttagctgccagttacgatttgcaccgctatttctataccggtgccgagattctcggcctgatcgatgaaaagcaccgtgagcttcccgaagatgtggggctggacgccagcactgccgaatccttccacagagtccatacagcgtttgaacgggaactgcacctgttaggtgtgcaggttcagcaattccaggacgtggcgacccgcctgcagaccgcatacgccggagaaaaggccgaagctattcagaataaggaacaggaagtttcagctgcatggcaggcactcctagacgcttgcgcgggacgtaggacccaactcgtcgataccgccgacaagttccggttcttctcgatggcgagagatctgttgtcttggatggaatctatcatacggcaaattgagactcaagaaagacccagggatgtgtccagcgtggaactgctcatgaagtaccaccaggggattaatgccgaaatcgaaacaagaagcaaaaacttctctgcctgcctagagctgggcgagtcactccttcagcgtcaacaccaggcaagcgaagagattagagaaaagctccagcaagtaatgtccaggcgcaaggagatgaacgagaagtgggaagctcgctgggagagattaaggatgctcctcgaggtgtgccagttttccagagacgcatctgtggccgaggcctggcttattgcccaggagccgtacctcgcctctggcgacttcggacatacagtggattctgttgagaagctgatcaagaggcatgaggccttcgaaaagtccacggcttcttgggccgagcgattcgccgctcttgagaagcctactaccctggagttgaaagagagacagatcgcagaacgcccagccgaggaaactggaccacaggaagaggaaggagagaccgctggggaagccccagtttctcaccacgccgcaaccgaaaggaccagtcctggagaggaagaaggcacctggccacaaaacctccaacagccgccacctcctggccagcacaaggatggccaaaagtcaactggcgacgagcgacctactaccgagcctttattcaaggttctggacacacctctgtcggaaggtgatgagcctgccacgctcccagctccccgagatcatggacagtcggtccagatggagggttacttaggccgtaaacatgacctcgaagggcctaacaagaaggcctcaaaccggagttggaataacttgtactgtgtgctccggaacagcgaactgactttctacaaggacgctaagaatctggccctcggcatgccttatcatggcgaagaacccctcgctctcagacacgcgatctgcgaaatagcagccaattacaaaaagaaaaagcacgttttcaaactgaggctcagcaatggctcagagtggctgttccatgggaaagatgaggaggaaatgcttagctggctgcagggtgttagtaccgctattaatgaaagtcagtcaatcagggtgaaggcccagagcctccccttaccgtctctgtccggccctgatgccagcctgggaaagaaagataaggagaagcgcttttcgtttttccccaagaagaagta

SEQ ID NO: 242095 - DNA, 6413 bp, synthetic construct
  misc_feature 1..6413: note = Description of Artificial Sequence: Synthetic coding sequence
  source 1..6413: mol_type = other DNA
atgacatctgcgacggagttcgaaaatgtaggaaaccagccaccatactccaggatcaatgccagatgggacgcccctgacgatgagctggataacgacaatagctccgccagattatttgagcgaagtagaattaaagcacttgcagacgaacgagaggtcgtgcaaaagaaaaccttcacaaagtgggtgaactcacacctcgcaagggtgagctgtcgtataactgacttgtataaggatctgagggatggtaggatgctgatcaagttgctcgaggttctgagcggcgaaatgctccctaagcctacaaaaggcaaaatgcgtatccattgtctggagaacgtggacaaggctctgcagtttttgaaagagcagagagtacaccttgaaaacatgggctcgcatgacattgttgatgggaatcacagactcgtcctggggctaatttggacaatcatactgaggtttcaaatccaggatattgtggtgcaaacacaggaggggagggaaacacggtctgcaaaagacgccctgctgctgtggtgccagatgaaaactgctggctaccctcacgtcaatgtcactaacttcacttcatcctggaaggatggactcgcattcaatgccctgatccacaaacataggcccgacctgattgattttgacaaactgaaagacagcaatgctagacacaatctggaacacgcctttaatgtggccgagcgtcagctggggatcatcccgctgctggaccccgaggatgttttcactgagaatcccgatgagaagagtattataacgtacgttgtcgcattctaccactacttttctaagatgaaagttctcgcagtggaaggaaaaagagtcggtaaggtgatagatcacgcgattgagacagaaaaaatgatcgagaagtacagcggcctagcttccgatcttctgacgtggatcgagcaaactattaccgtcctgaattctaggaagttcgccaacagcctcacaggggtgcaacagcagctccaggctttctccacttaccgcactgtcgaaaagccgcctaagttccaggagaaaggcaacctggaagtccttctgttcacaattcaaagccggatgagagccaataaccaaaaggtttataccccgcacgacggcaaactggtcagcgatattaaccgggcatgggagtcattggaggaggcggaataccgacgcgaactggcactcagaaacgaacttataaggcaggagaagcttgaacagcttgcaagaaggttcgacaggaaggcggctatgcgcgagacttggctgtctgaaaatcagaggctagtggcccaagacaacttcgggtacgaccttgcagcagtagaggcagcaaagaaaaagcatgaggctattgagacggacactgccgcttatgaagagcgcgttagagccctggaagacttggctcaagagttggaaaaggaaaattaccacgaccagaaacgcatcactgcaaggaaggacaacatcctccggctgtggtcatacctgcaggagctgctgcagagccgcaggcaacggctggagactacactggcccttcagaagctattccaagatatgctgcacagtatcgattggatggatgagattaaggctcacctcctgtcggcggagtttggcaagcatctgcttgaggtggaggacttgttacagaagcacaagcttatggaagcggacattgcgattcaaggcgataaagtaaaggcaatcactgctgccacactgaagttcaccgagggcaaagggtaccagccctgtgacccccaggtaatacaagaccgaatttcgcacctggaacaatgcttcgaagagcttagtaacatggcagccggacgaaaagcccagctggaacagtccaagcgcctatggaaatttttctgggaaatggatgaagccgaaagttggatcaaagagaaagagcagatttactcctccctagactatggaaaagacttaacgtcagtgctgattctgcagcgcaagcacaaggcatttgaggatgagctgcgtggactggatgcccatttggagcagattttccaggaagctcacggtatggtggcaagaaaacagttcgggcaccctcagatcgaggccaggatcaaagaggtttcagcccagtgggatcagttgaaggatttggcagcattctgtaagaagaacttgcaggatgccgagaacttctttcagttccagggggatgccgacgatctgaaggcatggttgcaggacgctcacaggcttctcagtggagaagatgtgggccaggacgaaggggcaacacgcgcactggggaagaagcacaaggactttctggaagagttagaggagtccagaggagtcatggagcacctggagcagcaagcccagggattcccggaagaatttcgcgacagtcccgacgtcactcaccgtctgcaggcactgagggagctctaccaacaggtcgtggctcaggccgacctgcgacagcagcggcttcaggaggcacttgatctgtataccgtattcggagagacagatgcttgcgaactatggatgggcgaaaaggaaaagtggctggcggaaatggagatgcctgacaccctggaggacctggaggtcgttcagcaccggtttgacatattggaccaggagatgaagactcttatgactcagatcgatggggtgaatctagccgctaactcccttgtggagtcgggacaccctaggtccagggaagtcaaacaataccaagatcacctgaacactcgctggcaggccttccagaccctcgtgagtgagcgcagggaagccgtcgattcagccttgcgcgtccataattactgcgtggactgtgaggagactagcaagtggattaccgacaagacaaaagtggtggagagcacaaaagatctcgggagggatctggcaggaataatcgccatccagcgcaaactctcaggactggaacgtgacgtagctgctatccaggcccgagtcgacgcgctggagagggaatctcagcaactgatggatagccatcccgagcaaaaggaggacattgggcagagacaaaagcatcttgaggaattatggcagggcctgcagcagtctctgcaaggccaggaagatctactgggggaggtgtcccagctccaggctttcctccaagatcttgacgattttcaggcttggctcagcataacacagaaggcggtcgcttcagaggacatgcctgaatccctgcccgaggcagaacagctgctgcagcagcatgcgggaataaaagatgaaattgatggtcatcaggactcataccagagagtgaaggagtccggagagaaagttatacaggggcagacggatccagagtatctactcctgggtcagagactggaaggtctagacactggttggaacgctttaggtcgcatgtgggaatcaagatcacatacactggcacaatgcctcggattccaagagtttcaaaaggacgccaagcaagccgaggccattctctccaatcaagaatatacactggctcatttggaacctccagatagcctggaggctgccgaagctggtatacgcaaatttgaggactttctaggtagtatggaaaataatcgggacaaagtgctgagtccagtggactctggcaataagctggttgccgaagggaatctctatagcgacaaaataaaagagaaggtgcagttgatcgaggatcgtcacaggaaaaataacgagaaggctcaggaggcctctgtactcctacgagacaacctggagctccagaatttcctgcagaattgccaggagctcaccctgtggattaatgacaagttgttgacctcccaagatgtgtcttacgacgaggccagaaacctgcataataaatggcttaagcaccaggcgtttgtggcggagctggcatctcacgaaggatggctggagaacatagacgctgagggaaagcagctgatggacgagaaaccacaatttacagccctcgtctcacaaaaactggaggccttgcaccgtctgtgggacgagctgcaagccactacaaaagagaaaactcagcatcttagcgctgcaaggtcttctgatctccgcctacaaacacatgccgatcttaataaatggatatcagccatggaggaccagttgcgatctgatgacccagggaaggatctgacttcagtgaataggatgttagccaaactcaagcgggtcgaggaccaggtgaacgtgcggaaggaagaacttggagaactgttcgcgcaggtgccatcaatgggcgaagaaggcggtgatgcggatctgtctattgagaagaggttcctggacttgcttgagcctctgggccgacgaaaaaagcagcttgaaagctcacgggctaaactgcagattagcagagatctcgaagatgaaactctgtgggtggaggagaggctgcctcttgctcagtccgccgactatgggacgaatctgcaaacagtacagctgttcatgaagaagaatcagaccctccaaaacgagattttagggcatacaccgagggtagaagacgtccttcagcggggtcagcagctggtggaggcggcagaaatcgactgccaggatctcgaggaaaggctggggcatctgcagtcttcgtgggacaggctccgcgaagccgcagctggcagattacagcggctccgcgacgcaaatgaggcccagcagtactatctggacgcagatgaggccgaagcatggatcggagagcaggagttgtatgtgatctcagacgagattcccaaggatgaggaaggcgctatcgtgatgcttaaacgacatctaagacagcagcgcgcagtggaggactatggcagaaatattaagcaactggcttctcgggctcagggactactaagcgctggccatccggaaggcgaacagatcattaggctacagggccaagttgacaaacactatgccggattgaaagatgtcgccgaggagagaaagcggaagctagagaacatgtatcacctgtttcaattgaagcgagagacagacgaccttgagcagtggataagcgagaaggaactcgttgcaagctccccagagatgggacaggactttgatcatgtgactttattgagggataagttccgagacttcgcacgagagactggcgcaatcggtcaagagagggtcgataacgtaaatgcttttattgaaagacttatagatgccggacattccgaggctgccaccatcgctgagtggaaagacggcctaaacgaaatgtgggctgatctactcgaactgattgacacgcggatgcagctcctggctgccagctacgacctccaccgatacttctacaccggagcggagattttgggcctgattgacgaaaaacatcgcgaactccccgaggatgtcgggctcgatgcatcaacagctgaaagctttcatagagtgcataccgctttcgagagagagttacatttgctgggggtgcaagtgcagcagttccaggacgtcgccactcggttgcagaccgcttacgctggggaaaaagccgaagccatccaaaataaggagcaagaggtttcggctgcctggcaggcgttacttgatgcctgtgcaggaagacgaacacagttggtcgatactgcagacaagttccggttcttcagcatggctagagatttactcagctggatggaatcaataattaggcagattgagactcaggaacggcctcgggacgtgagcagtgtcgaactgctgatgaagtatcaccagggcatcaacgccgagatagagactagatccaagaattttagtgcctgtttggagctaggagaatccctgctgcagcgtcagcatcaggccagcgaagaaattcgcgaaaaattgcagcaagtcatgtcccgcaggaaagagatgaatgagaagtgggaagcaaggtgggagaggctgaggatgctgctcgaggtgtgtcagtttagtagggacgcctcggtcgcagaggcatggctgatcgcccaggaaccatatctggcatctggcgactttgggcacacggtggactccgtcgaaaaactcattaagagacacgaggccttcgaaaagagcacagcctcgtgggcagagcgattcgcagctctggagaagcctactacgttagaactaaaggaacggcagatcgccgagaggccagcggaagagacaggcccacaagaagaagagggcgagacggcaggagaagcacctgtttcccatcatgccgctacggagcgcactagcccggtgagcctgtggtcccgtctgtcttcctcttgggagtccttgcagcccgagccctcccacccctacta

SEQ ID NO: 242096 - DNA, 6986 bp, synthetic construct
  misc_feature 1..6986: note = Description of Artificial Sequence: Synthetic coding sequence
  source 1..6986: mol_type = other DNA
atgacatccgccaccgaattcgagaatgtgggcaaccagcccccttactcaagaatcaacgcacgctgggatgctcccgatgacgaactcgataacgataattccagcgctcggcttttcgagcggagtcgtatcaaggctttagcagatgaacgtgaggtggtccagaagaaaacctttactaaatgggtgaattctcacctggcaagggtgtcctgtaggatcacagacttgtataaggacctgagagatggacggatgctcattaagctgctggaagtgctgtccggcgaaatgcttccaaagccgactaagggaaagatgcgcatccattgcttagagaacgttgataaggcactgcagtttcttaaagagcaacgggtgcatttagaaaatatgggcagccatgacattgtggatggcaaccatcgcctggtgttaggactgatttggactatcattcttcgatttcaaattcaggatatcgttgtgcagacacaggagggcagagagactcgaagcgccaaagacgccctgcttctctggtgccagatgaagacagccggatacccccacgtcaacgttaccaacttcacatctagctggaaagatgggctggcattcaacgccttgatacacaagcaccgtccagacctgattgatttcgacaaactgaaggacagcaacgctcgccacaacctggaacatgcattcaatgttgctgagaggcagctggggatcatacccttgcttgatccggaagacgtgttcacagaaaacccagacgagaaatccattatcacgtatgttgtcgcattctatcattatttctccaaaatgaaggtgctggccgtcgaaggaaagcgggttgggaaggttattgatcacgccattgagaccgagaagatgattgaaaaatatagcggactcgcatccgacctattaacatggattgaacaaacaattacggtgttaaattctcgcaaattcgctaactcattgacaggcgtgcagcagcagttgcaggccttttcaacataccgcacagtcgaaaaaccccctaagtttcaggagaaggggaatctggaagtgttgctctttacaatccagtccaggatgagagcaaacaatcagaaggtatatacccctcacgacggtaaacttgtaagtgatatcaaccgggcatgggaatctctggaagaggccgaatatagaagagagctagctttgaggaatgaactgattcggcaagaaaaactggagcagctcgccagaagattcgatcgcaaagctgccatgcgggagacctggctttccgaaaaccagcgtctagtggcgcaagacaattttggctacgatctcgctgccgttgaggctgcaaaaaaaaaacatgaggcgattgagaccgacacggctgcttatgaggagcgtgtgcgtgcactggaagatttggcccaagaactcgaaaaagaaaactatcacgaccagaagagaattaccgctagaaaagataacatcctgcggctttggagctacctgcaggagctgctccagtcgaggcgccagaggttggagacaacgctagctctgcagaaactgtttcaggatatgctgcatagcatcgattggatggatgagatcaaggcgcacctgctttcggcagaattcggaaagcatctgctggaggtagaagaccttctccaaaagcataagttgatggaagctgacatcgccatccagggcgacaaagtcaaagcgattactgccgcaactctgaagtttaccgaggggaagggatatcagccttgtgaccctcaggtcattcaagacaggatctcacacctcgagcaatgctttgaagaactttctaatatggcagccggaaggaaggcacagctggagcaatcgaaacggctctggaagttcttctgggagatggacgaggccgagtcctggattaaggaaaaagagcagatttattcctccttggattatggtaaagatcttacctctgttctcatcctgcagaggaaacataaggcgtttgaggacgagctgcgaggcttggatgctcatcttgagcagattttccaagaagctcatggaatggtagccaggaaacagttcggccacccccaaatcgaagcaagaatcaaggaggtgtccgcccagtgggatcaattaaaggatctggctgctttctgtaaaaaaaacctgcaggacgctgagaacttcttccaatttcagggagacgccgatgatttgaaagcatggctgcaggacgcccaccggttgctttctggggaggatgtcgggcaggatgagggggcaactcgtgctctgggcaagaaacataaagactttttagaagaactcgaagagagtaggggcgtgatggaacatcttgagcagcaggcccagggcttcccggaggaatttagagattcaccagacgtcacccatcggttacaggctctcagagagctttaccaacaagtggtggctcaggcggatctgcggcagcagcgcttgcaggaagctttagatttatacaccgtatttggcgagacagacgcttgcgagctttggatgggcgagaaggaaaagtggctggctgaaatggaaatgcccgataccttggaggatctcgaggtcgtccaacatagattcgatatcctggaccaagagatgaagacattgatgacgcaaattgacggcgttaatctggcagcgaatagtttagtcgagagcggacatccccgatcacgggaagtgaagcaataccaggatcatctaaatactcgttggcaggctttccaaacacttgtgtctgaacgtcgcgaagctgtcgactccgctttgagagtccacaactattgcgtcgactgtgaagagacaagcaaatggatcactgataagacaaaggtggtggagtctacgaaagacttggggagagatctggccggaatcattgctatccagaggaaactgagcggattagaacgggatgtggctgccatccaagcgagggttgatgccctcgagcgggagtctcagcaactgatggacagtcatcccgaacagaaagaggatattggccagcgtcagaaacacctcgaagagttgtggcaaggactgcagcagtctctgcagggtcaggaagaccttctgggagaagtgtcacagctgcaggctttcctccaggacctggacgactttcaagcatggctttctattacacagaaggcagtcgctagcgaagatatgccagaatctctcccagaagcggaacagctcctgcagcagcacgcaggaattaaggacgaaatcgacggccaccaagacagttaccagagagttaaagagagtggggagaaggtcatccagggacagaccgacccggaatacctgcttcttgggcagagactggaaggcctagacacgggctggaacgcgctggggaggatgtgggaaagcagatctcatactttggcccagtgtctaggatttcaggagttccaaaaagatgcgaaacaggcggaggccatcctgtccaaccaggaatacaccctggcccaccttgaaccgcctgactcccttgaagccgcagaggcaggtattcgaaaatttgaagactttctgggttcaatggagaataatcgggataaggttctgtccccagtagattccgggaataaactcgtggccgaaggcaacttgtactccgataagattaaggagaaggtacaattgattgaagaccggcatcggaagaacaatgaaaaggcccaggaagcaagcgtccttcttagagataatctcgaactgcagaacttcctgcaaaactgccaagaactcactttatggatcaatgataaactcctgactagccaggacgtcagctatgacgaagctaggaatcttcacaataaatggctgaaacatcaggcgtttgtggcagagctcgcatcgcacgagggatggcttgaaaacatcgacgccgaagggaagcagctgatggacgaaaaaccacagttcaccgcactggtttctcagaagcttgaagcactgcaccgtctttgggatgaattacaggctacaacaaaagagaagactcagcatctctctgctgcgagatctagcgatctccgcttacagacgcacgccgaccttaacaagtggatctccgcaatggaggaccagctgaggtccgacgatcccggaaaggatctgacatctgtgaaccgcatgttagccaaactcaaacgcgtggaggatcaagtgaatgtccgtaaggaggaattgggtgagctgttcgctcaggtaccttctatgggggaggaggggggtgacgccgatttgtctatagagaagcgttttctggatttgctcgaacccctcggtcgtaggaagaaacaactcgagagtagtcgtgctaagttgcagatcagtcgcgatctggaggatgagaccctgtgggtcgaagaacgcctgcctctcgcccagagcgctgactacggtaccaacctccagactgttcaactgtttatgaagaagaaccaaaccctacaaaacgagatcctggggcacactcctcgggtcgaagacgttctgcagagaggccagcagctcgtcgaggccgcagagattgactgccaggacctagaggaacgattagggcacctccagtccagttgggatagactgagagaggcagccgcaggacgactccagagattgcgagacgcgaacgaagcccaacagtactacctcgacgcagacgaagccgaggcctggatcggtgaacaggagttgtatgtcatcagcgacgagattccaaaggatgaagagggcgctatcgttatgctgaaaagacatctgaggcagcagagggctgtggaagattacgggagaaacattaagcagctagcaagtcgcgcacagggactactgtccgccggacatcctgagggggagcagattatccgccttcaaggacaggtagataaacactacgctggattgaaagatgttgccgaagaacgaaagaggaaactggagaatatgtaccacctgttccaactcaaaagggagacagacgacctggaacagtggatttcggaaaaggagctcgtagcatcctccccggagatgggacaagattttgaccacgtcaccctcctccgtgataaatttcgcgatttcgcacgggaaaccggtgccatcggtcaggagagggtagacaacgtaaatgccttcattgaacggctgatcgacgcaggtcattccgaggctgcgactatcgctgaatggaaagatggcctaaacgagatgtgggccgatctgcttgaattgatcgacaccaggatgcagctgctggcagcctcctacgaccttcacaggtacttttatacgggagctgaaatccttggcctgatagatgaaaagcacagggagctccccgaggacgtggggctcgacgcttcaacagccgagtcattccatagagttcacactgcgtttgagcgggagcttcacctgctgggggtgcaagtgcaacagtttcaggatgtggccacaagattacagaccgcttatgcgggagagaaagcagaggctatccagaataaggagcaggaggtgtccgccgcatggcaggccctgctggatgcttgcgccggaagaaggacccagctggtcgataccgccgacaaattcagattctttagcatggcacgggatttgctatcttggatggaaagtatcatccgccagatcgagacacaggagcgcccaagggatgtctcaagtgtggagctgctgatgaaataccatcagggaatcaacgccgaaatcgaaaccaggtcgaaaaactttagtgcgtgcttggagctaggcgaatcactgctgcagcggcagcaccaggcatctgaggaaattcgagagaaacttcaacaagtgatgtcaaggagaaaagagatgaacgagaaatgggaagcaaggtgggagcgccttcggatgctgcttgaggtctgccaattctcgagggacgcctccgtggcggaagcctggcttatcgcccaggaaccttatctggcaagcggggactttggccacacagtcgacagcgtggagaaacttatcaagagacatgaagcttttgagaagagtacggccagctgggccgagcggttcgccgctctggagaaaccgacaacactcgaactaaaggaaagacagattgccgaaagacccgcagaagagacagggcctcaggaggaggagggggaaacagcaggcgaggcccctgtgtcacaccacgcggctactgaacggaccagccccggagaggaagagggcacctggccccagaatctgcagcagccccctcccccaggccagcacaaagatgggcagaaatcaacgggcgacgagagacccaccaccgaaccactcttcaaggtactggatacaccactgagtgaaggcgacgaaccggctacattacccgctcctagagaccatggccaatcagttcagatggaaggttacttgggacggaaacacgatcttgagggtcccaacaagaaggcttctaatcggtcctggaacaatttatactgcgtgctgagaaattccgagctaacattttataaggatgctaagaacctggcactgggcatgccgtatcacggcgaggaaccactagcgctgaggcacgcaatttgtgagatcgctgccaactataagaagaagaaacatgtgtttaagctacggttgtccaatgggtcggagtggctattccacgggaaggatgaagaggagatgttatcgtggttgcagggggtgtctactgccatcaacgagtcacagtcaatccgcgtcaaggcacagtccctgccgctccctagcctctctggccctgacgcatctctgggaaagaaggataaggagaagagatttagcttctttccaaagaagaagta

SEQ ID NO: 242097 - DNA, 6467 bp, synthetic construct
  misc_feature 1..6467: note = Description of Artificial Sequence: Synthetic coding sequence
  source 1..6467: mol_type = other DNA
atggaactgcagcggactagctcaatctccggtcccctttctccagcctacacagggcaagtcccttataattacaatcagcttgaaggacgctttaaacaactccaggacgagagggaggccgtgcagaagaaaacttttaccaaatgggtgaacagccacctcgctcgggtttcctgccggattacagacctttacacggatctgcgagacggtaggatgctcataaaactgcttgaggtcctgtccggggaacggctgcccaagcctaccaagggccgtatgagaatccactgcttagaaaacgtggataaggcattgcagtttctgaaagagcaacgggtgcacttggagaatatgggatcacacgacattgtcgatggtaaccaccggcttaccctcggcctcatctggactatcatcctgaggtttcagatccaggatatcagtgtcgagacagaggataacaaggagaaaaagtcggccaaagatgccttgctcctgtggtgtcagatgaagacagctggctacccaaacgtgaacattcacaatttcactacaagctggcgtgacggcatggcattcaacgctctgattcacaagcatcgacctgacctgatagattttgataagctaaagaagtcaaatgcccattacaacctgcagaatgcatttaaccttgcagagcagcacctgggattgacaaagcttctggaccccgaggatattagtgtggaccaccccgacgagaagtctatcatcacttacgtggttacctattaccattattttagtaagatgaaagccctggctgtggaaggcaaacggattgggaaagtgctggacaacgctatcgaaacggaaaagatgatcgaaaagtatgaaagtctggcatccgatttactcgagtggattgagcagaccatcattatcctgaacaacaggaagtttgccaacagcttggtgggagtgcaacagcagctgcaggccttcaacacctaccggactgtcgaaaagcctcctaaattcactgagaaaggcaacctggaggtgctgctgttcacaatacaaagtaaaatgagggccaacaaccaaaaggtctatatgccaagggaggggaagcttatcagtgatatcaataaagcctgggagcggctggagaaagctgaacatgaacgcgaactcgcactgaggaacgagctgatccgacaggagaagttggaacaacttgcacggaggttcgaccgcaaggccgctatgagagaaacctggttatccgagaaccagcggctggttagccaggacaactttggtttcgatctgccagcggtggaagcagcaacgaagaagcatgaggcgatcgaaaccgatattgccgcttacgaggaacgtgtccaggccgtagtagcagtcgccagggaactggaagccgagaattatcatgacatcaagcgcattaccgccagaaaagacaacgtaatccgtctctgggagtacctgcttgaactgctcagagccaggaggcaaaggctggagatgaatttgggcttgcagaagatatttcaggagatgctgtacatcatggactggatggacgagatgaaagtgctagtgctgtctcaagactacggaaagcacctgctgggtgtggaagatctattgcagaaacacaccctcgtcgaagccgacatcggcattcaggccgagcgggtgcggggagtaaacgcatcagcacagaaatttgccaccgacggggagggctataagccatgcgatccgcaggtgatcagggacagggtggctcacatggagttttgctaccaggagctgtgccagctcgcggcagaacgacgagcccgtctcgaagagagcagacggctctggaaattcttctgggaaatggcggaagaagaaggatggattcgggagaaagaaaagatactgtcatccgatgattacgggaaagatttgacctctgtgatgcgccttttgagcaaacacagggctttcgaagatgagatgagcggaagatcggggcactttgagcaggccatcaaagagggcgaagacatgatcgcagaggaacacttcgggtcagagaagataagagagcgcattatctacatacgggagcagtgggccaacctggaacagttgtccgcaattcgaaagaaacgattagaggaggctagcctgctgcaccagttccaggcggatgctgatgatatcgatgcatggatgctggatattctcaagattgtctccagcagtgacgtgggccacgatgagtattccacacagtccctggtgaagaagcacaaggacgttgcagaagagatagctaattaccgtcctaccctggatacactgcatgagcaagcctccgccttgccccaggagcacgccgagagccctgatgtgcgcggaagactcagcgggattgaggagcggtacaaagaggtggcggagctcaccaggctgagaaaacaggcgcttcaggatacacttgccctctataagatgttttcggaggccgacgcctgcgagctttggatcgatgaaaaggagcagtggctaaataacatgcaaatcccggaaaaactagaggacctcgaagtgatccagcatagatttgagagtctggaacctgaaatgaacaaccaggcaagtcgtgtggctgttgtgaaccagatcgcaaggcaattgatgcacagtggacaccctagcgaaaaggaaatcaaggcacagcaagacaagctgaatacccgctggagtcagtttagagagctggtagaccgcaagaaagatgctttgctgtctgctctgtccattcaaaattatcacctggaatgtaatgaaacgaagtcttggatcagagagaagaccaaagtcattgagtctacccaggatctcggaaatgatcttgccggagtcatggccttgcagcggaagctcactggcatggagcgggatctggtggccatcgaagccaagttgagcgacctccagaaagaagctgaaaaacttgagagtgagcatcctgaccaggctcaggccatcttatctaggctggccgaaatctctgatgtttgggaagagatgaaaactactctgaagaatcgagaggcctccttaggcgaagcctccaagctgcaacagtttctgcgggacctagatgacttccaaagttggctgagtcgaacacagactgcgatagcatccgaagatatgcccaacacacttactgaggctgaaaagttgctaactcagcatgaaaacattaagaacgagatagacaactacgaagaagactatcagaaaatgcgggatatgggagagatggtcacccaggggcagacagatgcccaatatatgtttctgcgtcaaagactgcaggcattagacaccggttggaacgagctgcataaaatgtgggagaatcggcagaacttactgtcccagtcccatgcgtaccagcagttcctccgggacactaaacaggcagaggcttttttgaataaccaggaatacgtcttggctcataccgagatgccgacaacactggaaggagctgaggctgcgatcaagaagcaggaggactttatgacaacaatggacgctaacgaagagaaaattaacgccgtggtggaaacgggaagaaggctggtctcagatgggaacattaattctgatagaattcaagaaaaggtggactccattgatgaccgtcaccgcaaaaacagagagacagccagcgagctgctcatgcgcctcaaggataacagagacctgcagaaattccttcaggattgccaggaactctcgttatggattaacgaaaaaatgctcacagcacaggatatgagctatgacgaggccagaaatctgcattcaaaatggctcaaacatcaggcttttatggcagagctggcatcaaataaagaatggttagacaaaattgaaaaggagggaatgcagctgatctccgaaaagccagagactgaagctgtcgtgaaggagaagttgacaggactccacaagatgtgggaggtgttggagagcactacccagactaaggctcagagacttttcgacgcaaacaaagcagaactgtttacgcagagctgcgctgatcttgacaaatggttgcacggattggaatcccagatacagtcggatgactatggtaaggatctaacatcagttaacatccttctgaaaaaacagcagatgctggagaaccaaatggaagtcaggaagaaggagattgaggaacttcagtcacaggcgcaagcgctgtcccaggaaggaaagtccacagacgaagtggactctaaaaggctgaccgtacagactaaattcatggagctgctggaacctttgaacgagcggaagcacaacctcctcgcaagcaaagaaatccaccagttcaaccgggatgtagaagacgagatcttgtgggttggggagagaatgcccctggctaccagtacagaccacggccataacttgcaaaccgtgcaactgttgatcaaaaaaaatcagacccttcagaaagagatccagggccaccagccaagaatcgacgacatctttgaaaggtcacagaacattgttactgactctagttcgctgtctgcagaagctatccggcagagactggcagatctgaagcagctctggggactgttgatcgaagaaacggagaagcggcacaggcggctagaggaggcccaccgcgcacagcagtattacttcgacgctgcagaggccgaggcctggatgagcgagcaagaactgtatatgatgtcagaggaaaaggccaaagacgagcagtcggccgtgtctatgctaaagaagcaccagatactggagcaggccgtggaggactatgctgagaccgtgcaccagttgtccaagacctcacgagccctggtggctgactcccatccagagtctgagcgtatctcaatgaggcagtctaaagtcgacaagctctacgcgggtctgaaggatctggctgaggagcgccgtgggaaactcgatgagcggcataggttattccagctgaatcgggaagtggacgatctcgaacaatggatcgcggaaagggaggtagtggctggctctcacgagctcggacaggactatgagcatgtgacaatgctccaagagcgttttcgggaattcgcccgagacactggaaatataggtcaagaacgagttgacacagtaaaccatctggcagacgagctaattaactctggtcatagtgacgccgctacaatcgcagagtggaaagacggccttaacgaggcatgggctgatttactcgagctaattgatacacgcacgcagattctggcggcatcatacgagttgcacaagttctaccacgacgcaaaggagatcttcggccgaatacaagacaagcataaaaagctgcccgaagagttgggacgcgaccaaaataccgtcgagactctgcagagaatgcatacaaccttcgaacacgatatccaggccctgggaacacaggtccgtcagctgcaggaggatgccgctcgcctgcaagcggcttacgctggagacaaggccgacgacatccagaagagagagaatgaggttctggaggcatggaaatcccttctggatgcttgcgagtccagacgtgtaagactcgttgacaccggagacaaattccgttttttttccatggttcgcgatctgatgttgtggatggaggacgtgattcggcaaatagaggcccaggaaaaaccccgtgatgtcagcagcgttgagttgctgatgaacaaccaccagggcatcaaggccgagatcgatgcacgaaacgatagctttactacctgtatcgaacttggcaagtcgcttttagcccgaaagcactacgcctcagaggaaattaaggaaaaactgctccagcttaccgagaaaaggaaggagatgatagataagtgggaagacaggtgggagtggctgagactgatcctcgaggtccaccagtttagtcgcgacgcttctgttgctgaggcttggcttctagggcaggagccttatctctcttcgagggagatcggccaatctgtcgacgaggtggagaaacttatcaagcggcatgaggccttcgaaaaaagcgccgctacttgggacgagagattttctgctctggagagattaacaacactcgaattactagaagttaggcgccagcaagaggaagaagagcgaaaaagaaggccgccatctcccgaaccgtccactaaagtctctgaagaggcggagtctcagcaacagtgggacacttccaaaggggaacaggtgagtcaaaacggactgccagccgaacaggggagtcctcgcgtgtcctaccgcagtcagacataccaaaactacaagaactttaattcccggagaacagcttccgatcagccgtggagtgggcttta

SEQ ID NO: 242098 - DNA, 7094 bp, synthetic construct
  misc_feature 1..7094: note = Description of Artificial Sequence: Synthetic coding sequence
  source 1..7094: mol_type = other DNA
atgaccacgactgtggcgaccgactacgacaatatagagattcagcagcagtattccgacgtgaacaaccgatgggacgtggatgattgggacaacgagaactcttctgcacgactgttcgagcgttctcgcattaaggcgcttgctgacgagcgggaggctgtgcagaaaaaaacctttaccaagtgggtcaactcccaccttgctagagtttcttgccgcatcactgatctatacaccgatttgagagatggacggatgcttattaagctgttagaggtactttccggggagcggctgccaaaacctaccaagggcagaatgcgtattcactgcctggagaatgtggacaaggcgctacagtttcttaaagagcaacgagtccaccttgagaatatgggctctcacgatatcgtcgatggcaatcacagactgacattgggcctgatttggactatcatacttcggtttcaaattcaagacatcagtgtcgaaaccgaagacaataaggaaaaaaaaagcgctaaagacgcattattactatggtgccaaatgaaaacagcgggttaccccaatgtgaatatccataactttaccacatcgtggagggacggcatggccttcaacgccctcatccacaagcacaggccagatctcatcgacttcgacaaattgaagaagagtaatgctcactataatctgcagaacgccttcaatttggccgagcagcacctgggcctcacaaagcttctcgatccggaggatattagtgtcgatcatcccgacgagaaaagtatcataacctatgttgtcacctattaccactacttctctaagatgaaggccctggcagttgagggaaagagaatcggaaaggttctggacaatgccattgaaactgaaaaaatgatcgaaaagtatgaaagtctggcaagcgacctcctggaatggatagagcagactattatcatcctcaataaccggaaattcgccaatagcctggtcggcgtccagcaacagcttcaagcctttaatacatacagaacagtcgagaagccacctaaattcaccgagaagggcaacctggaagtgctgctctttaccatccagtcaaaaatgcgggcaaacaatcagaaggtatatatgcctagggaaggcaagctgatctcagatataaataaagcttgggaacgactggagaaagctgaacacgagagagaactggcccttagaaatgaactgattcgccaggagaagcttgagcaactggcgaggcgcttcgaccggaaggccgcaatgcgggagacctggctgagcgagaaccaacggctggtgtcgcaagataactttgggtttgatctgccggcagtggaagcagccaccaagaagcacgaagctattgagaccgacatcgccgcttacgaggagagagtgcaggcagttgtggcagtagcaagggagctggaggccgaaaattaccatgacattaagcggattaccgctcgtaaagataacgtgattcgcctgtgggagtacctactggaacttctccgggctcgccgtcaacggctggagatgaacctgggcctgcaaaaaatttttcaggaaatgctgtacatcatggactggatggacgaaatgaaggtgctcgttctctcgcaggactatggcaagcatctgttgggtgtggaggatctattacagaaacacaccctcgtcgaggccgatataggtatacaggctgagcgcgtaaggggcgtgaatgcgtccgcccaaaagtttgccaccgatggcgagggttacaaaccgtgtgaccctcaagttattcgagaccgagtggcacatatggaattctgttatcaggagttgtgccaactagcggctgaaagacgggctcgcttagaagaatctcgaagactgtggaagtttttctgggaaatggccgaggaggaagggtggatacgagagaaggaaaaaatccttagctctgacgactacggaaaagatttgacttcagtgatgaggctactcagcaagcacagggcattcgaggacgaaatgtccgggaggagcggacattttgaacaggccataaaagaaggtgaggacatgattgccgaagagcattttgggagcgaaaagatcagagaacgtatcatttacataagggagcagtgggcaaacctggaacaattgagcgccattagaaagaaaaggctggaggaagcatcactgttgcatcagttccaggcagatgctgacgatatcgacgcctggatgctggatattttaaaaattgtgtctagctctgatgtcgggcatgatgagtacagtacccaaagcttagtgaagaagcacaaagatgtcgcagaagagatagccaactatagacccactttagacactctgcacgagcaggccagtgccctaccgcaggagcacgccgaatctcctgacgtcagagggcgattgtctggcatcgaggaaagatacaaggaagtcgcagaactgaccaggctccggaagcaggccctccaggacacgctggctctttacaaaatgttcagcgaagctgatgcatgcgagttgtggattgacgaaaaggaacagtggttaaacaacatgcagataccagagaagcttgaagatctggaggttattcagcaccgtttcgagtccctcgaaccggagatgaataaccaggcttcccgtgtggctgtggtcaaccagattgcacggcagctgatgcacagcggccatccgagtgagaaggagataaaggcccagcaagacaagcttaacacccggtggtcccagttccgagagcttgtagatagaaaaaaagatgcactgcttagcgcactgagtatccagaactaccatcttgaatgtaatgaaacaaagtcttggataagggagaaaaccaaggtcatcgagagtacccaggacttaggcaatgatctcgcaggggtcatggccctgcagcgcaaactgactggcatggaacgggacctggtagcaattgaagccaaattaagtgatctacagaaggaagccgaaaaacttgaaagtgagcacccagaccaggcacaggcaattctgagccgactggctgagataagtgatgtctgggaagagatgaaaaccacattaaagaacagagaagccagcttgggagaggcaagcaaacttcagcaattccttcgtgatctagatgatttccagagttggctctcaaggacgcaaactgcaatagcttcggaggatatgccgaacaccttgacagaagccgaaaaattactgactcaacatgagaatataaagaacgagattgataactacgaagaggattaccagaaaatgcgggatatgggtgagatggtgacccagggccaaactgacgcacagtatatgttcctcaggcagagactacaggcacttgacacaggatggaatgagctgcataagatgtgggagaacaggcagaatctcttatctcagtcccacgcgtatcaacagtttctcagagatacaaaacaggcagaagctttcctgaacaaccaagagtacgtcctggcccacaccgaaatgcctaccactctcgagggcgctgaggccgctatcaagaagcaggaggatttcatgacaacaatggatgccaacgaagaaaaaattaacgcagtggtggaaacaggacgccgattggtgtccgatgggaacatcaactcggaccggattcaagagaaagtcgacagtatcgacgaccggcacagaaagaacagagagactgcttccgagctgctaatgaggctgaaagacaacagggatctccagaaatttttgcaggactgtcaggaattgtctctctggatcaatgagaagatgctcaccgctcaggatatgtcgtatgacgaggcaaggaatctccacagcaaatggctgaaacatcaggcatttatggctgagttggctagtaacaaggaatggctcgataaaatagagaaggagggcatgcagctgatttcagaaaaaccagagactgaggccgtggttaaggagaagcttacaggcttgcacaaaatgtgggaggtgttggaatcaactacccagaccaaggcccagcgcctcttcgatgccaacaaggccgaactgtttacgcagtcctgcgccgacctcgataaatggttgcacggtctggagtcccagatccagtccgatgactacggtaaggacctgaccagcgtcaatatcctgctcaagaagcagcagatgttggagaatcagatggaagtaagaaagaaggagatagaggagctgcagtcacaggcccaagccctttcacaggaggggaagtcaaccgatgaagttgatagtaagcgccttacggtgcagactaaattcatggagctccttgagccgttgaatgagaggaagcataacctgctggcatcgaaagagattcatcaattcaatcgtgacgttgaagacgaaattctctgggtgggagaacgcatgcccttggcaaccagtacggatcacggccacaacctccagactgtgcagcttctgattaagaaaaaccagaccctgcagaaagaaattcagggacaccagcctcgtattgacgacattttcgagcgaagccaaaatatcgttaccgattcctctagtttatcagcagaggctattagacaaaggctagccgatctgaagcagctgtggggccttttaatcgaagagactgaaaagcggcataggcgcctggaagaggcccaccgagctcaacagtactacttcgatgccgcagaggccgaagcctggatgtcggaacaggagctctatatgatgtccgaagagaaggctaaggatgagcaatccgctgtgtccatgctgaaaaagcaccaaatcctcgagcaggcagtggaggactacgccgaaacagtccaccagctgtctaagactagcagggcactggtcgcagactctcaccccgagtctgagcgcattagtatgcggcagtctaaagtcgacaaactttacgccggactgaaggaccttgccgaggagcgcaggggaaagttggacgagagacacaggctctttcaattaaaccgagaggtggacgacttggagcaatggatcgccgagcgggaagttgttgcgggttctcacgagctgggtcaggattacgaacatgtgacaatgttgcaggaacgctttagggaattcgccagagacacagggaacattggccaggagagagttgacacagtgaaccacttagcagacgagctgatcaactccggccacagtgatgctgctacaattgctgaatggaaggatgggctgaatgaggcgtgggctgacctcttagaacttatcgacacacgaacgcagatactggcagcctcctacgagcttcacaaattttatcatgatgctaaggaaatctttggaagaattcaggataaacacaaaaaattgcctgaagagttaggcagagatcagaatacagtagaaactttgcagcggatgcacaccaccttcgagcacgatatccaagcactcgggacacaggtgcgccaactgcaggaggacgctgccagactgcaagccgcttacgcgggtgataaggctgacgacattcagaaacgggagaatgaggtcctggaggcctggaaatctctcctggacgcttgcgaatctcggcgagtgagattggttgacactggggacaagtttaggttcttttcgatggtgcgtgacttgatgctctggatggaagacgtgattagacagattgaagctcaggaaaagcccagagatgtgagcagtgtggagcttctgatgaataatcaccagggtataaaagctgaaatagatgcccgtaatgattccttcactacctgcatcgagctcgggaagtctcttctcgctcggaaacactatgcgagtgaagagatcaaggagaaactactccagctcaccgaaaaacgcaaggagatgatagataaatgggaggatagatgggaatggctgcgcttgatcctggaggtccatcagttcagcagggacgccagtgtcgcagaagcctggctgctggggcaggagccttatctctcctcaagggaaataggccagtccgtagatgaggtggaaaaattgatcaaacggcacgaagctttcgaaaagtcagcagcaacttgggacgagagatttagtgccctcgagcgactgaccactctcgaactactagaggttagacggcagcaggaggaagaggaacgaaaacggaggcccccttctccggagcccagcaccaaggtcagtgaggaggcggagtcccagcagcaatgggacacctccaaaggtgagcaggtctcccagaacggtctccctgcagagcaggggtccccaaggatggctgaaactgtggacaccagcgaaatggtgaatggcgctacggagcagcgtactagtagcaaggagagctccccaattccttcacccacctcagatcgtaaggccaaaactgctctccctgcacaaagtgccgctaccctgccagcaagaacacaggagacccctagtgctcagatggaagggttcctgaacaggaagcacgagtgggaagcacacaacaagaaggcctcatctagaagttggcacaatgtgtattgcgtgatcaacaaccaagagatgggtttttataaagacgcgaaaacggcggcttccgggatcccctaccatagcgaggtcccagtgtccttaaaggaggctgtatgtgaggttgccctggactacaaaaaaaagaagcatgtgttcaaactcaggcttaatgacgggaatgagtatctgtttcaggccaaagatgacgaagagatgaacacgtggatacaggccataagttcagccatcagcagcgataaacacgaagtgtctgcatccactcagagcactccagcgagctcccgggctcagacactgcctacaagcgtggttactattacctctgagtcttctccgggtaaaagggagaaggataaagagaaggacaaagagaagcgcttttcactcttcggaaagaagaaata

SEQ ID NO: 242099 - DNA, 2073 bp, synthetic construct
  misc_feature 1..2073: note = Description of Artificial Sequence: Synthetic coding sequence
  source 1..2073: mol_type = other DNA
atgaccactaccgtggccaccgattacgataatattgagattcaacaacagtactcagatgttaataatcggtgggatgtggacgactgggataacgagaacagctctgccagactattcgaacggtctagaataaaggccctggccgacgagcgtgaagccgtgcaaaagaaaaccttcactaagtgggtcaatagtcatctcgctcgagtttcctgcaggatcactgacttgtacacggatctccgagatggtcggatgctcattaagttgctagaagtgctgagcggcgagaggctacctaagcccacaaagggcagaatgcgcatccattgtctggagaatgtagataaggcactgcagttcctgaaggagcaaagagtgcatttggagaacatgggttcccacgatatcgttgatggcaatcatcggctgacgctgggactaatctggacaatcattctccggtttcagatccaggacatctccgtagaaactgaggataacaaagagaagaaatccgcgaaagatgccctgctactgtggtgccagatgaagaccgccggataccccaacgtgaatatacacaacttcaccacgtcctggcgagatggtatggccttcaatgcactgatccataagcacagacccgatctgattgactttgataaactgaaaaaaagtaatgctcattataacctgcagaatgctttcaatttagctgaacaacatctcggcctcacaaaactattggaccccgaggatatttctgttgaccatccagacgaaaaaagtatcatcacctacgtggtaacctactaccactatttctctaagatgaaggcattagccgtggagggtaaacgcatcgggaaagtgctagataacgcaattgagaccgagaagatgattgaaaagtacgaatccctggcttccgatcttttagagtggatagagcagaccatcattatcttaaataaccggaagttcgcgaactccttagttggagttcagcaacagctgcaggccttcaacacttaccggactgtggagaagccaccaaagtttaccgaaaagggcaacctcgaggtcctcttattcacaatccaaagcaagatgagggctaataaccaaaaggtttacatgcctcgcgagggcaagcttatatctgacatcaataaagcttgggaaaggctcgaaaaagcggagcacgagcgtgaactcgctctgaggaatgaattaatacggcaggaaaaacttgagcagctcgcacgtagattcgaccgcaaagctgcaatgagggaaacatggctgagtgaaaatcagcgtctcgtatcacaggacaatttcggttttgacctgccagcagtggaggccgcaaccaaaaaacacgaggccatcgaaactgatatagccgcatacgaggaacgcgttcaagccgtggtagccgttgcaagggaattggaagccgagaattaccacgacatcaagaggattactgctagaaaggacaacgttatccgactgtgggaatacttgcttgagttgctcagggcaagaagacagcgactcgagatgaacctgggcctgcagaagattttccaggagatgctttatatcatggactggatggacgagatgaaggtacttgtgttgtcgcaggactacgggaagcacttgctgggggtcgaggatctgctgcagaaacacacactggtggaagctgacatcgggattcaagccgagagagtccgcggtgtgaacgcatccgcgcagaaattcgctacggatggagaaggctataagccttgtgatccccaagtcatccgggaccgggtggctcatatggagttctgctaccaagagctttgccaactcgcggctgaacggagagcccgtcttgaagagtcaagaagactgtggaagttcttctgggagatggccgaggaagaagggtggattcgggaaaaggaaaagattctttcttccgatgattacggtaaggacctgacttctgtgatgaggctgttgtcaaaacacagagcatttgaagatgagatgagcggtcgctag

SEQ ID NO: 242100 - DNA, 7172 bp, synthetic construct
  misc_feature 1..7172: note = Description of Artificial Sequence: Synthetic coding sequence
  source 1..7172: mol_type = other DNA
atgtcttccacactgagcccgaccgatttcgactctctggagatccaagggcagtattcagacatcaataataggtgggatttgcctgacagcgattgggacaacgactcttcaagcgccagactttttgagcgcagccgcattaaagcccttgccgatgagagagaagccgttcagaagaaaactttcactaagtgggttaattctcatttggcccgtgttacatgtagagtcggcgatctttattccgacctgcgtgacggtcgaaaccttctcaggcttctggaagttctcagcggcgagatcctgcctaagcctactaaaggcagaatgaggatccattgtctcgagaatgtggataaggctctgcaatttctcaaagaacagaaggtgcatttagaaaatatgggatctcacgatatcgttgacggaaatcaccggctgaccctggggctagtctggaccattatactcagattccagattcaggatatttctgtggaaacggaggacaacaaggaaaaaaaatccgcaaaggacgccttactgctatggtgtcagatgaagactgctggatatcctaacgtgaacgtacacaacttcacaacttcatggcgagacggtctggcgtttaatgccatagtacacaaacaccgcccagatctgctggactttgagtctctcaaaaagtgtaatgcccattataacttacaaaacgcctttaatcttgcagaaaaggagctgggcctaactaagctgttggaccccgaagacgttaacgtcgaccaacccgatgagaagagcataatcacctatgtggctacttattaccactacttcagtaaaatgaaggctcttgctgtcgaagggaaaagaattggaaaagtgctggatcacgccatggaagctgaacgcctggtagagaagtacgagagcctggctagcgaacttttgcaatggattgaacagacgatcgtgactttgaatgaccggcagttggctaacagcctttctggcgtacaaaatcagctccagtctttcaatagctaccgcacagtggagaagcccccaaagttcactgaaaagggaaaccttgaagtgcttctcttcacaatccagagcaaattacgggcaaacaaccaaaaagtgtatactccacgcgaagggagattgatctctgacattaacaaagcttgggagaggttagagaaggctgagcatgaaagagaactggccttgcggacggaactcattaggcaggagaaactggaacagttggcggctagatttgaccgaaaagcagcaatgcgcgagacctggctgtcagagaatcagaggctggtcagccaagacaacttcggtttggagttggcagccgttgaagccgctgtccggaaacacgaggccattgagaccgacatcgtggcttactctggacgggttcaggcagttgatgctgtggcagccgagcttgccgctgaacgataccatgacattaagcgaatcgctgcccgtcagcacaatgtagctagattgtgggattttctgcgccagatggtggcggcacggcgagagcgactgctgttaaatctcgaactccagaaggtgttccaggatttgctgtacctcatggactggatggaggaaatgaagggtcgcctgcagtcacaggatctgggccgacatttggctggcgtagaggacctcctgcagttgcacgagttggtcgaggctgatatagcagtccaagccgagagggtgagggccgtgtccgcctctgctctccgcttctgcaaccccggaaaggagtacagaccctgcgacccccaattggtgtcggaacgggtggccaagcttgagcagtcctatgaggctctgtgcgagctggcggctgcccgaagagcgagactggaggagagtagacgactgtggcgctttctgtgggaagtcggggaagccgaggcatgggttcgcgagcagcagcacttgctggctagtgccgacactgggagagacctcacaggagcactgcgcctgttgaacaagcacaccgcactgcgtggcgaaatgagcgggcgactgggcccactgaagctcaccttggagcaaggacagcagctcgtggcagaggggcatcctggggcatcacaagcctctgctagggctgccgaactgcaggcccaatgggaaaggcttgaagccttagccgaagagcgcgctcagcgccttgcacaagccgcttcactgtaccagttccaggctgacgccaacgacatggaggcctggctggtagatgctttgcggctggtttcctcaccagagctgggacacgatgagttctcgacacaagctcttgccagacaacatagggctcttgaagaagagattcgatctcaccggccaacactggacgccctgagagaacaggcagcagctctgccgcctaccttgtcgcggacaccagaggtgcagagcagagttcctactctagagcgccactacgaggaactgcaggccagagccggtgaacgcgcacgtgccttggaagcagcactggcattatacacgatgcttagcgaagccggtgcatgtggactgtgggtggaagagaaagagcagtggctaaacggcttggctcttcctgagaggctggaagatttggaggtggtgcagcagagattcgagacccttgaacctgaaatgaatactttagcagcccagataacagcagttaacgacatcgcggaacagctcctgaaggccaacccaccaggcaaggataggatcgtaaacacccaggagcaactgaaccataggtggcagcagttcagaagactcgcagacggaaagaaggccgcactgacaagcgcccttagcatccagaactatcacctggagtgcacagagactcaggcttggatgagagagaagacaaaagttatagagtcaacacagggcctcggcaatgacttggccggagtgctggctctccagaggaaactggcgggtactgagcgcgacctcgaggcgatagcagccagagtgggcgagttgacccgagaagctaacgcattagccgcagggcatccagcacaggctgttgccattaatgcacgacttcgggaggttcagaccgggtgggaagatctcagagcaacaatgaggcgcagagaggagtccctgggagaggctaggcggcttcaggactttctgcggagccttgatgactttcaggcatggctggggaggacccagactgccgtggctagcgaggagggccctgcgacactgcccgaggctgaagcgttacttgcccaacacgcggcactgcgtggcgaggtcgaacgagcccagtccgagtacagccgactgcgggctctcggagaggaggttaccagggaccaagctgacccccagtgcctgttcctgcggcagcgtcttgaggccttagggactggctgggaagaattagggcgaatgtgggagtccaggcagggacgccttgcccaagctcacggattccagggattccttcgagatgctcgccaggcggaaggagtgttgtcatcacaggagtacgtgctatctcacaccgaaatgccgggaactttacaagccgctgatgcagccatcaagaagctggaagacttcatgtccacaatggacgcaaacggggaacgaatccatggcctgctggaagccggacgtcaactggtgagcgaaggcaatatacacgctgacaaaatccgcgagaaagcagactcaatcgagcgtcgccataaaaagaaccaggatgccgcacagcagttcctgggacgcttaagggacaatcgtgagcagcaacacttcctgcaggattgtcacgagctgaagctctggattgacgagaaaatgctgacggcccaagatgtttcatacgatgaagcccgaaatttgcacactaagtggcagaagcaccaggctttcatggcagaacttgctgctaacaaagactggcttgataaggtggataaagaagggagagagttaacgctggagaaacccgagctaaaggctttggtgtccgagaagttgagagatctccatcgacggtgggacgagctggagaccactactcaggctaaagcccgttcgttgtttgacgcaaaccgtgccgagctcttcgcccagagttgctgtgctctcgaatcctggttagagtcattgcaggcgcagctgcattctgacgactacggcaaggacctaacctccgttaatattctgctgaagaagcagcaaatgctcgaatgggaaatggcggtcagggaaaaggaggtggaggctattcaagcccaggcgaaggctctcgctcaggaagaccagggggctggcgaagtcgaaagaacttcgcgcgctgtagaggagaagtttagagctctctgtcagcctatgcgagagcgctgccggaggttacaagcgtctagggagcagcatcaatttcaccgagacgtagaggacgagattctttgggtgacagaacggctcccaatggcctcatccatggagcatggcaaagatctcccaagcgtgcaactgttaatgaagaagaatcagacactgcagaaggagatacagggtcatgaacctcgcatcgcggacttaagagagcgtcagagagctctgggagccgctgcagccggtcctgagctagccgagctgcaagagatgtggaaacgactggggcacgagctagaactgcgaggcaagcgtttggaggatgctttgcgggctcagcagttttatcgtgatgctgctgaagccgaagcttggatgggagagcaggagctccacatgatgggtcaggagaaagctaaagacgagctctcggcacaggccgaagtgaaaaagcatcaggtcctggagcaggctctggctgattatgcacagactattcaccaactggcagctagcagccaagacatgattgatcacgagcaccctgaaagcacccgcatcagtattaggcaggcccaggttgacaagctgtatgctgggctgaaggaactcgcaggcgaaagaagagagcgtctgcaagaacaccttcgtctgtgtcaattgagaagagaactcgatgatttggaacagtggatccaggaacgcgaagtggtcgccgcatcccacgagctcggacaggactacgagcacgttacgatgctaagagataaatttagagagttcagtcgcgacacgagcacaataggacaggagagggtggactcagccaatgcactggcaaacggtcttattgcaggcggacacgcagccagagccacagtggccgagtggaaggacagcctcaacgaagcctgggccgaccttctggaacttcttgacactcgcggtcaggtcctcgcagctgcctatgaactgcagcgcttccttcacggcgcacgccaggctctcgccagggttcaacacaaacagcaacagcttcccgatgggacaggacgggatctcaacgccgctgaggccctacaaaggcgacattgcgcctatgagcacgacattcaggcactgagcccacaagttcagcaggtccaagacgacggccaccgtctgcagaaagcctatgccggagacaaagctgaggagattggacggcatatgcaggctgtagcggaggcctgggcccagctgcagggcagctctgcggcaaggcggcagttactgctggataccacagataagtttcgtttcttcaaagctgtcagagagctgatgctgtggatggatgaagtcaatctccaaatggacgctcaggaaagacctcgcgatgtgagctctgccgatttagtcatcaaaaatcagcagggcatcaaggcagagatcgaggccagggccgacagattttcatcttgtattgatatggggaaagagcttctcgccaggtcccattacgccgcagaggagatctctgaaaaactgtcacaattgcaggccaggcgccaggagaccgccgagaaatggcaagaaaagatggattggctgcagttggtgctggaggtcctggtgttcggaagggatgctggaatggctgaggcctggctgtgttcacaagaacctctggtgcggagcgcagagctggggtgcacagtagacgaagtggaatctctgattaagcggcatgaggcctttcaaaaatccgccgtggcctgggaggagcgattctgtgctctcgaaaaactcacggctctggaggaaagagagaaggaaaggaagcgcaaacgcgaggaagaagagcgccgaaaacagccaccagcacctgaaccgaccgccagtgtccccccaggggacttagtcggcggtcagacagctagtgatactacctgggacggtacccagcccaggccacccccaagcacccaagcgcctagcgtgaatggggtctgtacagacggggagcctagccaacctctcttgggccaacaacgcctggaacatagcagcttcccagaaggcccaggacccggaagtggtgacgaggccaatggtcccagaggggaacggcagaccagaacccggggaccagcaccatccgctatgccacagagccggtcaaccgaatctgcacacgctgcaacgctgcctcctcggggtccagagccaagcgctcaagagcagatggaggggatgctgtgccggaaacaggaaatggaggccttcgggaagaaagccgctaacagaagttggcagaacgtctattgcgtactgagacgcggtagtctggggttctataaagacgctaaggccgcatccgccggagtgccctatcatggggaggtgcctgtgagtttagcccgagcccagggcagcgtagcattcgactataggaaacgcaaacatgtgttcaaattgggccttcaagacggcaaggagtacctgttccaagcaaaggacgaggccgaaatgtccagttggctaagggtggtcaatgccgctatcgcaacagctagttcagcttcaggtgaacctgaagaacccgtcgtgcccagcaccaccaggggaatgactcgggctatgacgatgcccccagtgtcccccgtgggagcggaaggccctgtggtcctgcggagcaaggacgggcgagagcgcgagagggaaaaaagattcagctttttcaagaagaacaaata

SEQ ID NO: 242101 - DNA, 2805 bp, synthetic construct
  misc_feature 1..2805: note = Description of Artificial Sequence: Synthetic coding sequence
  source 1..2805: mol_type = other DNA
atgtcctctactctcagccccacagattttgactccctagaaattcagggccaatactctgacatcaataaccggtgggatctccccgactccgactgggataatgactcatcttctgccagactgttcgaaagatctaggattaaggcactggctgatgaacgggaggccgtccaaaagaagacatttacaaagtgggttaactcacacctcgcacgcgttacctgccgggtgggcgatctatatagtgaccttagagacggacgtaatctactcaggcttctggaggtgttgagtggagaaatcctgcctaagccaaccaaaggccgtatgcgcatccattgtctggaaaatgtcgataaggctctgcagttcctgaaggagcagaaggtgcacctggaaaacatgggctctcacgacatcgtcgacgggaatcatcggttaactctgggcctggtgtggacaatcattctccgattccaaatacaagacatatcagtagagacggaggataacaaagaaaaaaaatctgctaaggacgcgttactgctctggtgtcagatgaaaactgcaggctatcccaatgttaacgtgcacaacttcactacctcctggcgggatgggctcgccttcaacgcaatcgtgcacaagcatcgtcctgatctcttggactttgagagtctgaagaagtgcaatgcacactataatctgcaaaacgccttcaatttggccgagaaggagctcggcctgaccaaactgctggaccctgaggatgtcaacgttgatcagccggacgagaaatccatcatcacatacgttgcgacatactaccactatttttcaaaaatgaaagccctcgccgtggagggaaagaggattgggaaagtgttagaccacgcaatggaagctgagcgcctggtagaaaagtatgagtccctcgcatccgaactgctgcagtggatcgagcagaccattgtaaccctgaacgatcgccagttggctaactccctttccggcgtgcagaatcaactgcaatcctttaattcttataggacagtggaaaaaccccctaaatttacggagaagggtaatctggaggtgctcctgttcacaatacaatccaagctgagggcaaataatcaaaaggtgtatacgccccgtgagggcagactgatctccgacatcaacaaggcatgggagcggctggaaaaggctgagcacgaacgcgagttggccttacgcaccgagcttatccgccaggagaaactggagcagctcgccgcacgctttgatagaaaggctgcgatgcgcgaaacctggctgagcgaaaaccaaagactggtgtctcaagataattttggactggagcttgccgcagtggaagcagctgtaaggaagcatgaagctatcgagacggacattgtggcttactcagggcgagtgcaagcggttgatgcagtggccgcagagctggcagcagaacgttaccatgacatcaagcgaatcgctgcccgacaacataacgtggctcgcctgtgggacttcctcagacagatggttgccgctagacgggagaggcttctattaaatctcgagctgcagaaagtcttccaagatctgctttatctaatggattggatggaagagatgaagggacgccttcagtcacaggatctcggccgtcatttagccggagtagaagacctactccaactgcacgagctggtggaggcagacatcgccgtgcaggcagaaagagtgagagcagtcagtgcctctgcactccgcttctgtaaccccggtaaggagtacagaccatgcgatccccagctggtttctgagcgcgttgctaaactgaccgcactcgaggagcgagagaaggaacgcaaacgcaagagggaagaggaggaacgtcgtaagcagccccctgctccagagcctaccgctagtgtgcctccaggggatctggtgggagggcagacagccagtgacactacgtgggacggcacccagccgagaccgcctccgagcacgcaggcaccctcagttaatggagtgtgtaccgatggtgaaccctcacagccactgctaggtcagcagagactagaacactcttccttccctgagggaccaggccctggatctggtgatgaagccaatgggcctcggggagagcgccagacaaggacccggggacccgctccaagtgccatgccgcagtcaagaagcaccgaatcagctcacgctgctaccttaccacccaggggcccagaaccttccgcacaggagcagatggaaggaatgctctgccgcaagcaggagatggaagccttcgggaagaaggccgctaacaggtcgtggcagaacgtctactgcgtgctgaggcgcggaagcctcggattctacaaagatgccaaagcagccagtgcgggagtgccttatcacggtgaggtccctgtgtcgctcgcgagggcacagggctccgtggcctttgattacaggaaaagaaagcacgtctttaaactgggcctgcaggatggaaaagagtacctatttcaggcaaaggatgaagccgagatgagttcttggctgcgtgtggtcaacgcggctattgccaccgcttctagcgcgtctggagagcccgaggaaccggtcgtgccctcgacaacccgcggaatgacccgggcaatgacaatgccaccagtgtcacctgtgggcgcagagggtccagtggtcttacggtcaaaagacggcagagaacgcgaacgagaaaaacgattctcattctttaaaaagaataagtag

SEQ ID NO: 242102 - DNA, 354 bp, synthetic construct
  misc_feature 1..354: note = Description of Artificial Sequence: Synthetic coding sequence
  source 1..354: mol_type = other DNA
atgagctctactctcagccctacagattttgattctctggaaatccaggggcagtacagtgacatcaacaataggtgggatcttccagatagcgattgggataacgacagctcatctgctcgactttttgagcgttcccgcatcaaagcgctggccgatgaaagagaagcagttcagaaaaagacattcacaaaatgggtgaactcccaccttgctcgtgtgacgtgtagggtcggcgacctttacagcgatctccgggacggacgcaatctgctaagattactcgaagtgctcagcggggagatactgccaaagcccaccaagggaaggatgcgtatacattgtctggagtag

SEQ ID NO: 242103 - DNA, 7097 bp, synthetic construct
  misc_feature 1..7097: note = Description of Artificial Sequence: Synthetic coding sequence
  source 1..7097: mol_type = other DNA
atgtcttcaaccctgtcacccacagactttgacagtctcgagatacagggtcagtattctgacatcaataatcgttgggacttgcccgactcagattgggacaacgacagcagctccgctaggctgtttgagcgctctaggataaaagcactcgccgacgaacgagaagctgtccagaagaaaacatttaccaaatgggtgaactcccatctggccagggtgacatgccgggtgggagatttgtatagcgaccttcgagatggtagaaacctgctgcggttactcgaagtgctctccggagagattcttccgaagcctacaaaggggagaatgcgaatacattgtctggaaaacgttgataaggctctgcaattcctcaaagagcagaaagtccacttggaaaatatgggcagccatgatatcgtcgatggtaaccatcggttaaccctcggactggtgtggactatcatcctaaggtttcagatccaagatatcagtgtcgaaaccgaagacaataaggagaagaagtccgctaaagatgcactgttgctgtggtgccaaatgaagactgcgggataccctaatgtcaacgtccacaactttaccacaagttggagggacggattggcttttaacgccatcgtgcataagcaccgaccagacctgcttgatttcgagtctttgaaaaaatgcaacgctcattataacctccagaatgctttcaatctggcggaaaaggagctgggcctgacaaagctcctggacccggaagatgtaaatgttgatcagccagacgaaaagtccatcataacctacgtcgctacttattatcattatttttccaaaatgaaggctctcgctgtcgagggcaagcggattggtaaggttctggaccacgccatggaggctgaacgcctcgtggagaaatacgagagcctggcttccgagttgctacagtggattgagcagacaatagttacgctaaacgaccgccagctggccaatagtctgagcggagtacagaaccagttacagagcttcaattcttaccgcaccgtcgaaaagccccctaaatttacggagaagggcaatttagaggtgctgctcttcacaatccagtcgaagctgcgggcaaataatcagaaagtttatactccgagagagggcagattgatcagcgatataaacaaggcctgggagcgccttgagaaagcggagcacgaaagagagctggctctgcggacagaattaatacgacaggagaaacttgaacaacttgccgctcggtttgaccgaaaggccgctatgcgcgaaacctggctgtcagagaaccagaggttggtctctcaggataacttcgggctcgaactcgcagccgtggaagccgcagtgcgaaagcatgaagcaattgagaccgacatagtggcatactctggtcgcgtgcaggcagtggacgccgttgccgctgaacttgctgctgagaggtatcacgatataaagcggattgcagcacgccaacacaatgtggctagactgtgggactttttaaggcaaatggtcgctgccaggcgagaacgactactgctgaacctggagctgcagaaagtctttcaggatctgctgtacctcatggattggatggaagaaatgaagggtagacttcaaagtcaggatctggggagacacctggccggagttgaggacttgttacagctgcacgagctggtggaggcagacatcgccgttcaagctgagcgcgtgcgtgccgtgtccgcctcagctctgcgtttttgcaaccccggaaaggaatacagaccttgcgaccctcagcttgtatcagagcgagtggctaagctggagcagtcatacgaagccttgtgcgagctcgccgcagcacgcagagccagattggaggagagccggaggctgtggaggttcctgtgggaagtgggtgaggcagaagcctgggtccgtgagcaacagcacttgcttgcctctgccgacaccggccgtgatctcacaggggcattacgcctactgaataagcacacagctttaaggggtgaaatgtccgggcgtctgggaccactgaagctgactctggagcagggccagcagctagttgcggaaggacacccgggagcctcccaggctagcgcgagagccgctgaactgcaggctcagtgggaacgcttggaagctttggcggaggagagagctcagcgcttggcccaggccgcttctttgtaccagtttcaggcagatgcaaacgacatggaggcctggcttgtggacgcactacgcctagtttcgagtcctgagttgggccacgacgaattctctacccaagctttagctaggcagcacagggccctggaggaggaaatccgttcacacagacccacgttggacgccctgagggaacaggcagctgctttgcctcctacactcagtcgaactcccgaggtacagtcacgggtcccgacactggaacgccattacgaggaacttcaagcacgagcgggagaacgagcaagagccctggaggccgcactggccctgtacacaatgctgtccgaggcaggcgcatgcggcctctgggtcgaggaaaaggagcagtggctgaacggactggccctacccgaacggctagaagatcttgaggttgtccagcaaagattcgagactctagagcctgaaatgaataccctcgccgctcagatcacggcagtgaacgatatcgccgagcaactgctcaaggccaatcccccagggaaggatagaattgtgaacacacaagagcagttaaaccataggtggcagcaattccggaggctagcggatgggaagaaggccgctttgacatctgctctctccattcagaattatcaccttgaatgcacggagacccaggcttggatgcgggaaaagaccaaagtgatagagtccactcagggtctgggcaacgacttagcaggagtattagccctacagcgtaaactcgccggaaccgagagggaccttgaagctattgccgcaagggtgggagaactcaccagggaagcgaacgctctcgcagccggtcaccctgcgcaggccgtggccataaacgcacgactgcgggaagtacaaacaggatgggaagacctgcgagccacgatgcggcgtcgcgaggagagcctgggagaggctaggcgcctccaagacttcttgagatcccttgacgattttcaggcgtggctgggaagaactcagacggcagttgcgtcggaggaaggcccagccactctccccgaagctgaggccttattggcccaacacgctgctctaagaggggaggtcgagcgggctcagtctgaatattctagacttagggccctgggtgaggaagttacacgcgaccaagcggacccccagtgcttgttcctgaggcagcgattagaggccctgggcaccgggtgggaggagcttggaagaatgtgggagagcagacaaggcagattggcacaggcccacgggtttcagggattcctcagagatgcccgtcaggctgaaggcgttctgtcctcacaggagtacgtgctctctcatacagaaatgccgggaacgctacaggccgcagacgcagccattaaaaagctggaggactttatgagtaccatggatgccaacggcgagaggatccacggccttctagaggctgggaggcagctagtgtctgaaggaaacatccacgctgataaaatccgggaaaaagctgactccatagagcggaggcacaaaaaaaatcaggacgccgctcaacagtttctgggaaggctgcgcgacaatcgcgagcagcagcatttcttacaggactgccatgagctcaaactgtggatcgacgagaaaatgctgacagcacaagatgtctcctacgacgaggcacgcaatctgcacactaagtggcagaaacatcaagccttcatggctgagttagctgcaaacaaggactggctagataaggtagataaggaaggccgagagttaaccctcgagaaaccagagttgaaagcccttgtctcagagaagctgcgagacctccataggagatgggacgagctggaaaccaccacccaggctaaggcacgctctctatttgatgccaacagagccgagttgttcgcgcaatcttgttgcgcactggagtcttggttagagagcttacaggcgcagctccactcagacgactacggtaaagacctgacctccgttaacatcctcttgaagaagcagcagatgctcgagtgggaaatggccgtgcgggagaaagaggtggaggccattcaggcgcaagcaaaggcgctggctcaggaagatcagggagccggtgaagtagagcgaacatcacgagctgtggaggagaaatttcgggctctgtgtcagccaatgcgcgaaaggtgccgcaggctgcaagcttcccgtgagcagcatcagtttcaccgggacgtggaagatgagatactgtgggtgacagagcggttaccgatggcgtcatcaatggagcatggaaaagatttgcccagcgtgcagctgttgatgaaaaagaaccagactctgcaaaaagaaatccaaggccacgaaccacgcatcgccgaccttagggaaaggcagcgagcactcggagccgctgcggcaggcccagagttggctgagctgcaggagatgtggaagcgtctgggccacgagttagaactcagagggaaaaggctcgaggatgcccttcgggcacagcaattttatcgggacgcagcggaggccgaagcatggatgggggagcaggaactgcatatgatgggccaagagaaggcaaaagacgagttgtctgcccaggcagaagtgaagaagcatcaggtgttagagcaagccctggctgattacgcccagacaattcatcagctggcggctagtagccaggatatgatcgatcacgagcatcctgaatctacccgcattagcattcggcaggcgcaggtcgataaactgtatgcaggtttgaaagaactggcaggcgagcgtagggaacggctgcaagagcatctgagattatgccagttgcggagagagttagatgacctcgaacagtggatccaggagagggaggtagtcgccgcaagccatgagttggggcaggactacgaacacgttacgatgttgagagataagttcagggaattctcacgggacacctcaactattggacaggagagagtggatagtgcgaacgcccttgcaaatggcttgatagccggtggccacgctgccagagccactgtggctgaatggaaggacagcctcaatgaggcttgggccgacttgttggagctgctcgacactagaggccaagtgcttgccgctgcttatgagctgcaacgcttcctgcatggggctaggcaggcactagccagagtgcaacacaagcagcagcaactgcccgacggtaccgggagggatctaaatgctgcggaggccttgcagcggcgtcactgcgcttatgaacacgatatccaagcactgagtccacaggtgcagcaggtgcaggatgacgggcaccgcctccagaaggcgtacgccggtgataaggcagaggaaatcggtcgtcatatgcaggcggtcgccgaggcttgggcacagctgcagggctcatcagcagccagaaggcagctactgctggacaccactgacaaatttcggttcttcaaagcagtgcgcgaactcatgctgtggatggacgaagttaatctgcagatggatgcgcaggagcgacctagagacgtttcgtcagcagacctggttatcaagaaccagcaggggatcaaagcagagatcgaggccagagcagatcgtttctcctcctgcatcgacatgggtaaagaactgttagcgcgttctcactacgcggctgaagagatctcagaaaagctgtctcagctccaggcaaggcggcaagagacagctgagaagtggcaggaaaaaatggactggcttcagctcgtgctggaagttctagtgtttggcagggacgctggaatggctgaggcttggctctgcagccaagagcccctagttcgctcggcggaactcggatgcaccgtagacgaggtagaaagcctgattaaaaggcatgaggccttccagaaaagtgctgtcgcatgggaggaacggttttgtgccctggagaaactgacagccctagaggagcgcgagaaggagcgcaaacggaagcgtgaggaagaggagagaagaaaacaaccccctgcccctgagccgactgcgagcgtcccaccaggcgacctggtagggggacagacagcctccgacaccacctgggatggtacacagccccgaccccctccatctacccaggctccctccgtaaacggcgtgtgtacagacggggagccgtcccagccattgctggggcagcagcgtttggaacatagctctttcccagagggtcctggccctggctcaggtgacgaggcaaacggcccacgcggagagcgacaaacccggacacggggacctgccccatccgccatgcctcagagtaggagcacagaatccgcccacgctgcaaccctgccaccacgagggccagaaccttcagcccaggaacagatggaggggatgttatgtcggaaacaggaaatggaagcgtttggaaagaaagccgctaaccgttcatggcagaacgtatattgtgtcctgagacgcggttctcttggattttataaggatgccaaggccgcttctgccggagtcccgtaccacggcgaggttccggtgtctctggccagggcccagggatctgttgcctttgactacagaaaaagaaagcatgtttttaagctgggcctgcaggatgggaaagaatacctgtttcaggcgaaagatgaggtctcttgcccttcgtgctcttctctctccgtgcccttccagaaattacccgcagcggacagtcctagctttcccgtgctgcctctattcccgggactcgtcttgtgtggtaaaaccggatgtgttcggaggccacatcaggcagcactgcctgtgta

SEQ ID NO: 242104 - DNA, 7172 bp, synthetic construct
  misc_feature 1..7172: note = Description of Artificial Sequence: Synthetic coding sequence
  source 1..7172: mol_type = other DNA
atgtccagtacactaagccctaccgacttcgatagcctggagatccagggacagtactctgacatcaataatcggtgggatttaccagatagcgactgggataacgattcgtcaagcgctaggctgttcgagagatcccgcatcaaggccttggccgatgaaagggaggcagtgcaaaagaagaccttcaccaaatgggtgaattcgcatctggctcgggtcacttgtcgcgtaggggatctgtattccgacctgcgtgatgggcgaaatctgctgaggctgctggaagtcttatccggggagatcctacctaaacctaccaaggggaggatgcgaattcactgtcttgaaaacgtggacaaggcattgcagttcctcaaggaacaaaaagtgcacctagaaaacatggggtcacatgacattgtggacggcaatcataggctgactctgggccttgtgtggactatcatcctccgcttccagattcaggacatttccgtcgaaactgaggataataaggagaagaagtccgctaaggacgccctactcctatggtgtcagatgaaaaccgctggttacccaaatgtgaatgtgcataacttcaccacgagctggagagacggactcgcgtttaatgccatcgtacacaagcatagacccgacctgctggattttgagtcactgaagaagtgtaacgctcattacaatctgcagaacgccttcaacctggcggaaaaagaactgggcctgacgaagctgctggaccccgaagacgttaacgtcgatcagcccgatgagaagagtattatcacatacgtggccacttactatcactattttagcaagatgaaggcattggctgtggagggtaaacgaatcggaaaagtcctcgaccacgcaatggaggcagaaagactcgtggaaaagtatgagtcactggcctctgaacttcttcaatggatcgaacagacaattgtgactctgaatgatcggcagctcgctaactcactgtcgggcgtgcagaatcaacttcagtccttcaactcatacaggacggtggagaagcccccaaaatttactgaaaaggggaacctggaagtcctgctgttcacaatccagtccaaactgcgggcaaacaaccagaaagtctatactccaagggaaggaagactaatctctgatattaacaaggcctgggagaggctcgagaaggctgagcacgagcgtgagctagctctgagaacggaactgatccgccaggagaaactcgaacagctggctgctcgtttcgaccggaaggcagccatgcgcgagacttggctttctgagaaccagcggttggtatcccaggacaacttcgggcttgaactcgcggctgtggaagcagctgttcgcaaacatgaagccatcgaaacagatatagtcgcgtattcagggagggtgcaagccgtggatgcggttgccgcagaactcgcggctgaaaggtatcacgatattaaacgaattgccgcacggcagcacaacgtggctaggctctgggattttctgcgacaaatggttgctgccaggcgcgagcggctcctgctgaacctcgagctccagaaagtcttccaggacctgctttatttgatggactggatggaggaaatgaagggaagattgcagagccaggacctgggtcgacatctcgctggggttgaggacctgctgcagctgcatgagctggtcgaggctgatatcgccgtgcaggcggagcgcgtgcgggctgtgagcgcctcagccctcagattctgtaaccccggtaaggaatacagaccctgtgacccccagctagtgtccgagagagtcgccaaactcgagcagagctacgaggctctatgcgagcttgctgccgctcgcagggcgagactcgaggagtcgaggcggctttggcgcttcctgtgggaggtcggggaggccgaagcctgggttagagagcagcagcaccttctggcgagcgccgacacaggcagagacctgacaggcgctctacgactgctgaataaacacactgccctgcggggagaaatgagcggccgactggggcctctgaagctgacactcgagcaagggcagcagttggtagcagagggtcatccaggcgctagtcaagcctcagcccgagctgcagaactgcaggcccagtgggagcgtcttgaggctctagccgaggagcgggcacaaagattggctcaggcggcttccctgtatcagttccaggccgatgccaacgatatggaggcttggctggtcgacgcccttcgcctagtctcaagtcccgagcttggtcatgatgaattttcaacgcaggctttagcaagacagcaccgtgcactggaggaggaaatacggagccatagacccacacttgatgccctaagggagcaggccgctgccttacccccaactttatctagaactcctgaagtgcagtccagagttccgacccttgagagacactatgaggagctgcaagcgagagccggagagcgagctagagctctggaagcggcactagccctctatactatgcttagtgaggccggagcatgtggtctctgggtggaggaaaaagagcagtggctcaatggcctggccttgcctgaacgtttagaggacctcgaagtcgtgcagcagcggttcgaaacactggagcctgaaatgaatactctggcagctcagattactgcggtgaatgacatagccgagcagctgctgaaggccaatcctcctggcaaggaccgcattgttaatacccaggaacagctgaaccaccggtggcaacagttccggcgtctcgccgatgggaagaaggctgccctgaccagcgctctcagcattcagaactatcacctagagtgtactgagacacaggcctggatgagagagaaaaccaaggttattgagagcacccagggcctgggcaacgatttagccggagtgctggccttgcaacgtaagctcgcaggtacagagagggatcttgaagcgattgccgctcgcgtaggcgaattgactcgcgaggctaacgccctggcagctgggcacccagcccaggcagttgctatcaatgccagactcagagaagtgcagacggggtgggaagacctcagggccacaatgcgaagacgggaggagagtctcggcgaggctcggagattgcaagactttttacggtcactagacgacttccaggcatggcttggcagaacccagaccgcagtcgcttccgaagaggggcctgccacactccctgaggcggaggctttgctcgcccagcatgcagccctgcgcggtgaggtcgaaagggctcagtcggaatacagccgactcagagcgctaggcgaggaagtgactcgagaccaggccgatccacaatgtctcttcctgcgccagcggctggaggccctcggaacagggtgggaggagttaggcaggatgtgggaatctcgccaggggagacttgcccaggcccatggctttcaaggattcctcagggacgccagacaggcagaaggcgtgctgtcatctcaagagtacgtgctgtcacacaccgagatgccaggcaccctacaagccgctgatgctgctattaaaaagctggaagactttatgagtacaatggacgctaatggcgagcgaatccacggactgctggaagccggaagacaacttgtgtccgagggaaatatccacgctgacaaaattcgggagaaggctgattctatagagcgacgacataagaagaaccaggatgctgctcagcagttcctaggtagactcagggataatagggagcagcagcactttctccaggactgtcacgagttaaagctgtggatagacgagaagatgctgaccgcccaagacgtcagctacgacgaagccagaaatctccatacaaagtggcagaagcatcaagcttttatggccgaactagcagcgaacaaggattggctggacaaggtagataaagaaggtagagaacttacactggaaaagcctgagcttaaggctttggtgtccgagaaactgcgagatctgcacagaagatgggatgaacttgaaaccaccacccaagccaaggcgagatcactcttcgacgctaatagggcagaactgttcgcgcagagttgctgcgccttagagtcttggctcgagtcactacaagcccaactccattcagacgattatggcaaggatctcacatcggtgaatatcctgctcaaaaaacagcagatgctagaatgggagatggccgttcgtgaaaaggaagtagaggcaatccaggcacaggccaaggccctggcccaagaggatcaaggtgcaggggaggtggaacggacttcaagggccgttgaggaaaaattccgtgccctgtgccagcctatgcgcgaacgctgcagacggctgcaggcttcaagagaacagcatcaatttcatagagatgtggaagacgaaattctttgggttacagaacgactgcccatggcatcaagcatggaacatggaaaggatctaccctccgtgcagctcctgatgaagaagaaccaaaccctccagaaagagatccagggccacgagcctaggatcgccgacctccgggagcggcagagggcactgggggcagccgctgcagggccagagctcgctgagcttcaggagatgtggaaacgcctgggtcacgagcttgagctccgtgggaaaagacttgaggacgctctaagggcgcagcagttctaccgggatgcagcagaagcagaagcttggatgggcgagcaagaactgcatatgatgggtcaggagaaggcgaaagacgagttgagtgcccaagccgaagtgaagaaacaccaggtcctcgagcaagccctggcggattacgcccagacaatccatcaactggctgcctcttcgcaggatatgattgatcacgagcatccagagagtactcgcattagtattcgccaggcacaggtcgacaaactgtacgcaggcctcaaggagctggctggagagcgccgagagaggctgcaggaacacctaagactgtgtcaactgagacgcgagctcgacgacctggagcaatggattcaagaacgcgaggtggtcgccgcatcccacgaactgggacaggactatgaacacgtgacaatgctcagagataaattcagagagttttccagggatacttcaaccatcggccaagaaagagtggactctgccaatgctctcgccaatggattgattgccggtggtcatgctgctcgggctactgtggcagagtggaaggatagcttgaatgaggcctgggccgacctgctagaactcctggacacacggggtcaggtgctcgctgcagcctatgaactgcagcgtttcctccacggcgctagacaagcacttgcaagggtccaacacaagcagcagcaactccctgacggtaccggccgtgatttgaatgccgcagaggcgctgcagagaaggcattgcgcatatgagcatgacattcaggccctctctcctcaagtgcagcaagttcaggacgacggtcacagattgcagaaagcttacgcgggagacaaagctgaggagatcggaaggcacatgcaggccgtggcagaggcttgggcacagttacagggatcttctgctgcaagaagacaacttcttctcgataccaccgataagttccgattctttaaggctgttcgtgagctgatgctttggatggacgaggtgaatctgcagatggacgcccaagagaggccgagggatgtgtctagtgccgacctggtgattaagaaccagcagggtataaaagctgagattgaagccagagcagaccgcttttctagctgcattgacatggggaaagaactgctggcccgatcccactacgcagcggaggagatctccgagaagttgtctcaactccaggccaggcggcaggagaccgcagaaaagtggcaagagaaaatggactggctgcagctggtcctggaggttcttgttttcggacgggacgctggcatggcggaggcttggctatgctctcaggaaccattagtgaggtcagccgaactcggttgcaccgtggatgaagtggagagccttataaaacgccatgaagcttttcagaaaagcgcggttgcatgggaggagcgattttgcgccctggagaagctgaccgctctggaagagcgggaaaaggagcgaaagcgcaaaagagaagaagaagaaaggcgcaagcagcccccagcaccggagcctaccgcaagcgtgccgccaggggatcttgttggcggacagacggcgtcggacacaacatgggacggtacccagcccaggccccctccctctacccaggcgccttctgtcaatggggtgtgcaccgacggtgagccttcgcagccactgctggggcaacagcgtctggagcactctagtttccctgagggccctggccctggctctggcgatgaagccaatggtccacggggagaacggcagacgagaactaggggccctgccccttctgccatgccccagagtcggagtacagagagcgcccatgccgcaaccctccctcctagaggaccagagccatccgctcaagagcaaatggagggcatgctatgccggaagcaggagatggaagcttttggcaagaaggctgccaatcggagctggcagaatgtgtactgcgtcctcaggaggggttccctggggttctacaaggacgctaaggcggctagtgccggagtcccatatcatggggaggtgcctgtttctctggcgcgagcccagggcagcgtcgcttttgattatcgtaaaaggaagcatgttttcaaactaggcctccaggatggcaaagagtacctgtttcaagccaaggacgaggccgagatgagttcctggctgcgcgtagtgaatgcagctatcgccactgccagcagcgcgagcggcgagcctgaggagccagtggtgcccagcactactcggggtatgacccgggctatgacaatgcctcccgtctcccccgtgggcgctgagggcccagtggtgctccggtccaaagacgggcgagaacgggagagggagaagagattctcctttttcaagaagaacaagta

SEQ ID NO: 242105 - DNA, 6465 bp, synthetic construct
  misc_feature 1..6465: note = Description of Artificial Sequence: Synthetic coding sequence
  source 1..6465: mol_type = other DNA
atggcgcaagttcccggtgaagtagacaacatggagggcctgccggcacctaataacaatcccgcagcccgatgggaatcacctgaccgcggttgggaacgggaacagcctgccgctagtactgctgccgcatcactgtttgagtgttcccggattaaagcgttagcggacgaacgcgaggcagtgcagaagaagaccttcaccaaatgggtaaactcacacttggcacgggtaggatgtcacatcggcgacctgtatgtggatttgagagacggattcgtgttgacaagacttctggaagttctgagcggggaacagctgccccgacccacacgcggaaggatgagaattcacagcctagagaatgtggacaaagccctccagttcctgaaggagcagcgcgttcacctggaaaatgtggggtctcacgacatcgtggatggtaaccataggctaaccctcgggttggtatggacaattattctccggttccaaatccaggtcatcaagatcgagactgaggataatagggaaaccagatcagctaaagatgctctccttctctggtgtcagatgaagaccgcagggtaccccgaggttaacattcaaaacttcacgacctcgtggcgcgacgggctggcctttaatgccttaatccaccggcacagacctgatcttgtggacttttctaaactaacaaagtctaatgccaattataaccttcaacgcgcttttaggactgccgagcaacacctgggcctggcgcgattacttgacccagaagacgttaatatggaggcacctgacgagaagagtattattacttacgtggtatctttttaccattattttagcaagatgaaagccctcgcggtcgaaggaaaaagaatcggcaaggtgctagaccaggtgctagaggtggggaagatcattgagcgttatgaagagcttgctgccgaactccttgcatggatccaccgcactgtcggactgatctccaatcagaagttcgccaactctctcagcggtgtccaacagcagctgcaggcattcactgcctactgcaccctggagaagccggttaaattccaagaaaaggggaacctggaagtgctcctcttttcaatacagtccaagctacgggcatgcaatagaagacttttcgtgcctagagaagggtgtggaatctgggatatagataaagcctggggagagctggagaaggcagagcatgagagagaggcagccttgagggctgagctcatcagacaagaaaagcttgaattgctagcccagcgctttgatcataaagtggcaatgcgggaatcatggctcaacgagaatcagagactggtgtcccaggacaacttcggttacgaactgcccgctgtggaggccgcaatgaaaaagcacgaggcaattgaagctgacatcgcggcttatgaggaaagagtacagggcgtggccgaactggctcaagcactagcggcagagggatattacgatattcgacgcgtggcagcccagagagactcagtcctaaggcagtgggccctccttacgggcctcgtgggtgcacgaaggactaggctggaacagaatctggccctgcaaaaggtgtttcaagagatggtgtacatggtagactggatggaggagatgcaggcccaactcctctccagagaatgcggccaacacctggttgaggctgatgacctcttgcagaagcacgggctcctggaaggagatatcgcagcccagtcagagcgggtagaggccctgaatgcagcggctcttcgcttcagccagctgcagggctaccagccatgcgatccccaggtcatctgtaaccgggttaaccacgtgcatgggtgcctggctgagctgcaggaacaggcggctaggcgcagggctgaacttgaagcctcccgcagcctgtgggctctcctgcaggaactggaggaagcagagtcgtgggcacgggacaaggaacgcctgttagaggcagctggaggaggcggtgccgctggcgctgccggagccgctgggactgccggtggagcgcatgacttgagttccaccgctagactcctggcccagcacaagatcctgcaaggcgaactgggaggcagacgcgctttgctccagcaggcccttaggtgtggagaggagctggtagccgcaggcggagccgtcgggcctggcgctgacacggtgcatcttgtcggcttagccgagcgggcagcatccgcacgtaggcgttggcaaaggctcgaagaagcagctgcgagaagagaaaggcggctccaggaggcacgagctctacatcagtttggcgcagacttagatgggctgttggattggctacgggacgcataccggctcgctgctgcaggagacttcggtcacgatgaagcttccagccgtcgcctggcacgccaacaccgtgctttgacaggtgaagtggaagctcacagaggtccggttagcggcttacgtcgacagttggccaccctgggtggggcttcaggtgccggtcctctcgtcgtcgcactgcaggtgcgtgtggtcgaagctgagcagcttttcgcagaggtgaccgaggtggcagccctgcgccgacagtggcttcgagatgcactcgcggtatatcgtatgtttggtgaagtgcatgcatgtgaactgtggattggtgaaaaggagcaatggctactgtctatgcgggtgccagacagtctcgacgacgtggaagtcgttcagcaccgctttgaatccttggaccaggagatgaattccctgatgggtcgagtgctagacgttaatcatacagtccaggagcttgttgaggggggacaccctagttctgatgaggtgaggtcttgtcaagatcacctgaactcgaggtggaaccgaattgtcgagctggtggaacagcggaaggaggagatgtcagccgtgctgctcgtggagaaccacgttcttgaagtcgccgaggtgcgggctcaagtgagggagaaaaggcgggctgtcgagtctgcccctagggccggtggtgcgttgcagtggcggttaagtgggctcgaggcggcactccaagcactggaaccgaggcaggccgcacttctggaggaagccgcactgctggccgagaggtttcccgctcaagccgctaggcttcaccagggggcagaggagcttggcgcagagtggggcgctctagcttctgccgcacaagcctgcggcgaagcggtcgccgcagcaggacgcctccagaggtttctgcatgatcttgatgcgtttttggattggctggtacgcgctcaggaggctgcgggtggttccgaagggccacttcctaactcactcgaagaggcagacgctctcctggcacgtcatgcggctcttaaagaggaggttgatcagagggaagaggactatgcgaggattgtggccgcttccgaggccttgcttgccgcagacggcgctgaactaggaccaggcttggcgctggacgaatggctgccacacttagaactgggctggcataaactgctgggcctgtgggaggctcgacgcgaggccctggtgcaggcacacatctaccagctgttcctgagagacctgcgtcaagccttagtagtgctgcgcaatcaagagatggcactctcaggcgcagagctgcccggtacagtggagagtgtggaggaggccctcaagcagcacagggatttccttacaaccatggagctttctcaacagaagatgcaggtcgctgtgcaggcggctgaggggttactgcgacagggtaacatttacggtgagcaagctcaggaggcagtgacaagacttctggaaaaaaatcaggaaaaccagctgcgagcccagcagtggatgcagaagctgcatgatcagctcgagctccagcattttcttagggattgtcatgagctggacggctggatccacgaaaaaatgctgatggccagggatggtacccgggaggacaatcacaagctacacaagcgctggctcaggcatcaggcttttatggccgagctagcacagaataaagaatggctcgaaaagatagaaagggaaggccagcagctgatgcaggagaagcccgagctggcagcttctgtccggaagaaacttggcgagattagacaatgttgggcagagctcgaatctacgacgcaggcaaaagcaaggcagctcttcgaagcttccaaggccgaccaacttgtacagtcctttgccgagctggataaaaagctgctacatatggagagccaactccaagacgtagacccgggaggcgatcttgccacagtcaatagtcaactcaaaaaactgcagtctatggagtcacaagtggaggagtggtatcgtgaggtcggggagttacaggcacagacagccgctttgccgctggagcccgcttccaaggagctagttggagaacgccagaacgccgtaggagaacggttggtccgcctcctcgagcctttacaagaacgcagacgccttctcctcgcttccaaagaactccatcaggtcgcacatgatctcgacgacgagctcgcgtgggtgcaagagaggctgccattagccatgcagaccgaaagagggaacggactccaagcagtccagcagcatatcaaaaaaaaccagggtttaaggagagagatacaagcgcatggtccaagactcgaagaagtactcgagcgagcaggggcactagcatcactgaggtcaccagaggcagaggcagttcgtcgtggcttggagcagctccaaagtgcctgggccggtctccgcgaggccgcagagcggcgtcagcaggtgctcgatgctgccttccaggtagagcagtactattttgacgttgccgaagtggaagcctggctaggagagcaggaactgcttatgatgtcagaggacaaaggaaaggacgaacagagcacccttcagctcctgaaaaaacatttacagctggagcagggggtggagaactacgaggagtccatcgctcaactgtctcggcagtgccgggcactgctggaaatggggcaccccgatagtgagcagatatccaggcgacagtcgcaggtggatagactatacgtggcacttaaagaattaggggaggagcggagggtggcgcttgagcagcagtactggctgtatcagctgtcacggcaggtatccgagttagaacattggattgcagagaaggaggtggtggccggtagtcccgagctgggccaggatttcgagcatgtgagtgtgcttcaggaaaagttttccgagttcgcatccgagacaggcatggccggaagggaaaggctcgctgccgttaatcagatggtggacgagctaattgaatgtggccatacagccgctgcaaccatggctgaatggaaggatgggttgaatgaggcttgggccgagctgttggagttgatgggaacacgggctcaattacttgccgcttccagggagcttcacaagttttttagtgacgctagagaattgcaagggcagatcgaggagaagcggaggagattgccacggttaacaacaccccctgagcctcggcctagcgcgtcatccatgcagcggactctacgggcttttgagcacgacctgcagctgttggtgtcccaagtgcggcagctccaggagggtgcagcccagctgagaaccgtctatgctggggaacatgccgaggctatcgccagtcgagaacaggaagtcctccagggatggaaggagctccttagtgcatgcgaggatgctagattgcatgtgtcttccactgccgacgccctgcgattccattcgcaagtgagggacttgctgtcttggatggacggcattgcgagccaaatcggtgcagctgataagcccagggacgtgtcctcagtggaggtcctgatgaactatcaccaagggttgaaaacagagttggaagcaagagtccccgagctcactacttgccaggagcttgggaggtccctgctgttgaacaagtctgctatggcggacgaaattcaggcccagctggacaagctgggcacccgcaaggaggaggtaagcgaaaaatgggaccggcactgggaatggcttcagcaaatgctggaggtccatcagttcgcgcaggaagccgtcgtggcagacgcttggttaaccgcacaagagcccttgctccagagtcgggaacttggctcatccgtcgatgaagtggagcagctgatcagacgccatgaagcttttcgaaaggctgccgctgcttgggaggaaaggttctcaagcctgagacggctaactacaccgcgtcgggaagaccacctgaacccaggcgtgcaggaccagccctggcagcacactgagaagccttccctgcccaagcccaaggccaacaaagaaaagacggctcgcagggatggaacttgtctgtaa

SEQ ID NO: 242106 - DNA, 3930 bp, synthetic construct
  misc_feature 1..3930: note = Description of Artificial Sequence: Synthetic coding sequence
  source 1..3930: mol_type = other DNA
atggcacaagtcccaggagaggtggacaacatggaaggtctgcccgcaccaaacaataaccctgcagcgcgttgggagtctcccgatcgcggatgggagcgggagcagcctgcggcttccaccgcagccgcatccttgttcgaatgctctcgcattaaggctctggccgacgaaagagaggcagtacagaagaaaacttttactaaatgggtaaatagccacctagcacgggttgggtgccatatcggggacctgtacgttgatctgcgggacggattcgttttaacccggctcttggaggtattgagcggagagcaacttccgaggccaacccgcggtcgtatgcggatacactctctggaaaacgtcgacaaggctcttcagtttctcaaagaacagcgagtgcacctggagaacgtgggctcacatgatatcgttgacggaaaccatcgacttaccctcgggctggtgtggactatcatcctccgcttccagatccaggtaattaagatcgagaccgaggacaacagagaaacacgatcggctaaggatgccctgctactttggtgccaaatgaaaaccgctggctacccagaagttaacatacagaacttcactaccagttggcgggacggcttggcgttcaatgctctcattcatagacacaggcctgatctggtggatttctccaaactaacaaagagtaacgctaactataatcttcagcgggcattcagaactgcggagcaacacttagggctggctcgtttactcgatcccgaagacgtcaacatggaagcacccgacgaaaaatcgatcattacttatgttgttagtttttatcactacttcagtaagatgaaggcattagccgtagagggcaagagaatcggtaaggtacttgaccaggtccttgaggtgggcaagattatcgaaaggtacgaggagttggctgctgagcttctggcctggatccatcggactgtgggacttatctcaaatcagaaattcgccaattcactgtctggcgtccaacagcagctgcaggccttcacagcatattgcacactggagaagccagtgaagtttcaggagaaaggaaacctcgaggtcctcttattcagcatccagagtaaactcagggcttgcaaccgacgtctgttcgtccctcgggagggttgcggcatttgggatatcgacaaggcctggggcgaactggaaaaagcagaacatgagagggaagcagcactccgggcagagctgattaggcaggagaagctcgagttgctggcccaacggttcgaccataaggtggcaatgagggagagctggctgaacgaaaaccagaggcttgtgagccaggacaacttcggctatgagttacccgcagtcgaggccgcaatgaagaaacacgaagcaatcgaggccgacatcgctgcctacgaggagcgggtccaaggagtcgccgaattagcccaagcgctggccgctgagggttattatgacatccggagggtcgccgcacagcgggactctgtgctgaggcagtgggcactgctcacaggactggtgggcgcacggcgaactaggctggagcagaacttggccttacaaaaggtctttcaggagatggtatacatggtagattggatggaggaaatgcaagctcaactgcttagtagggagtgcggtcagcacctcgtcgaggcagatgacctgctgcagaagcacggactgctcgagggcgacatagccgcacagtctgaacgagtggaggccctgaacgctgccgcactccgcttttcccagctgcagggataccagccatgcgatccccaggtgatctgcaaccgcgtgaatcatgtacacgggtgtcttgctgagctgcaagaacaggccgctaggcggcgtgccgaactggaagcctccagatctctttgggctttgctgcaagaactcgaggaggccgagagctgggcacgagataaggagaggctgcttgaggcagctgggggagggggagcagccggagccgcaggcgcagccggtacagctggcggagcacatgatctgtccagtacggccaggctactcgcccagcacaagatactgcagggcgaactgggaggcaggcgggctctgcttcaacaggccctgcggtgcggcgaagagctggtagccgctggcggagcagtgggccctggggcagacaccgtgcatctggtcggcctggctgagcgggctgccagtgcacggaggcgttggcagagactggaggaggcagctgctcggagagagcgacggttacaggaggcccgagctttacatcaattcggcgctgatttggacggcttgttggactggctgcgggacgcctacagactggcagcagcaggagatttcggccatgacgaggcctccagccgacgcctggctcgacaacatagagcgcttacaggtgaggtagaggctcatcgagggcctgtgtccggcttacgcagacagctggccaccctgggcggtgccagcggcgcagggcctcttgtggtggctctccaggtcagagtggtcgaagctgaacagctgttcgccgaggtcaccgaagtggctgctctgcggcgtcagtggctccgcgacgctctggcagtgtataggatgtttggggaggtccatgcttgcgaactctggataggtgagaaagaacagtggctgctgtctatgagagtaccagattctctggatgatgtggaagtcgttcagcaccgctttgagtcccttgaccaagaaatgaattctctgatgggcagagtgttggacgtgaaccatacggtgcaggaactcgtagagggcggacatccctcttccgacgaggtgcggagctgtcaggaccatctgaactctcgttggaacaggatcgttgaactggtcgaacagcgtaaggaggaaatgagcgctgtcctgctggtggaaaaccacgtgctggaagttgccgaggtgagggctcaagtgagggagaagcgcagggccgtggagtcagctcccagagccggtggcgctttgcagtggaggctcagtgggttggaggcggctctccaggctctggagccaaggcaggcggctctcctggaggaagccgcattgctggccgagcgattccccgcacaggccgcacggctgcaccagggggcagaggagctgggagcagagtggggcgcactggcaagcgcagcacaggcctgcggagaagccgtcgcggctgccggacgactccagcgtttccttcacgacctggacgcttttctcgactggctcgtccgcgctcaggaagccgcaggcggatccgagggacctctccccaattcactggaagaggcggacgctctcctggctaggcacgctgcactgaaagaagaggttgatcaacgggaagaggattacgccaggatcgttgccgcttcagaagccctgcttgctgctgacggggctgaacttggacctggcctggcactggacgagtggcttccacaccttgagctggggtggcacaagcttctcggtctctgggaagcacgaagagaagccctggtgcaggcacacatctaccaattgttcctccgggatttgaggcaggccctggtagtgctgagaaaccaggagatggcgttgtccggggctgagcttcccggaacagtggagtcagtcgaggaagctctgaaacaacaccgggactttcttaccacgatggaactcagtcagcagaaaatgcaggtagccgtgcaggccgcagaagggctactgaggcagggcaacatctatggggaacaggcgcaagaagctgtgaccaggcttctggaaaagtgcctcattatacaccctgcgctgctgcatcccccatgggagccacctgatctcccaagatccagttcctag

SEQ ID NO: 242107 - DNA, 7694 bp, synthetic construct
  misc_feature 1..7694: note = Description of Artificial Sequence: Synthetic coding sequence
  source 1..7694: mol_type = other DNA
atggcccaggtccccggtgaagtcgacaacatggagggtctccccgcacctaataataaccctgcagcccgttgggaatctccagataggggctgggagcgcgagcagccggctgcttccactgccgctgcatccctgttcgagtgctcccgcatcaaagctctggccgatgaaagggaggcagtgcagaagaaaacatttaccaagtgggtgaattcacaccttgcaagagtgggttgccacatcggggatttgtatgtcgacctcagggatggctttgtgcttacaaggctgctggaagttctatcaggcgaacaacttcctcggccaacgagaggcaggatgcgcattcatagcctagagaatgtggataaagcacttcagttcctgaaggagcagagagtgcacctggagaatgtaggttctcacgatatcgtcgatggaaatcaccggttgacactcggactggtgtggactatcatactacgctttcaaatacaggtcatcaagatcgagaccgaggataatcgtgagactaggtccgcaaaggatgctctcctgctgtggtgtcagatgaagacagccggttacccagaagtcaatattcagaatttcaccacctcttggcgagatgggcttgcatttaacgccctaatccatcggcatcgacccgatctggtcgacttctccaagctcacaaagtctaatgccaactacaacctgcaacgagcttttcgtaccgccgagcagcacctcggactggcgagattgctggatccagaggatgtcaacatggaggcccctgatgagaaatcaatcataacgtatgtagtgagtttttaccactatttttcaaagatgaaagccttggctgtggaggggaaaaggattggcaaagtgctggatcaagtattggaggtggggaagatcattgagcgctacgaggagttggctgctgagctcctggcctggatccaccgcaccgtcggattgatatctaatcaaaaatttgccaactccctgtcaggggtgcagcaacaactgcaggcctttacagcttactgcacccttgagaaacctgtgaaattccaggagaagggcaatcttgaggtcttactcttctcaatacaatcaaagctgcgggcttgtaaccggagactgtttgttccccgtgagggatgcggcatctgggacattgacaaggcctggggcgagctggaaaaggctgagcacgaaagggaagccgcactacgcgctgagttgatcaggcaggaaaagctggagttgctagctcagcgatttgatcacaaggtcgcgatgcgagaaagctggttgaatgagaaccaacggcttgtgtcacaagacaacttcggatacgaactgcctgcagtggaagcggcaatgaagaagcacgaggctattgaggcagacatcgccgcatatgaagagagggtgcagggggtcgcagagttggcacaggctctggccgcagaaggctactacgatattcgacgcgtggccgcacagagagactcagtcctgcgccagtgggctcttcttactggtctggtcggtgccagacgaacgaggctggagcagaatctggccttgcaaaaagttttccaggagatggtctacatggtggactggatggaggaaatgcaagcccagctgttaagccgggagtgcggacagcatctagtggaagctgacgacctgttgcagaaacacgggctgctggaaggtgacatagctgctcagtctgaacgcgtcgaggccctgaacgcagccgctctgaggttttcgcagttacaggggtatcagccctgtgacccccaggtgatttgcaaccgcgtgaatcacgttcacgggtgcctagcggagctccaggagcaagctgctcggaggagggctgagttagaggccagcaggtcattgtgggcacttctgcaggagctcgaggaagccgaatcgtgggccagagacaaagagcgacttcttgaagcagccggaggcggaggcgcagcaggagccgcaggtgctgccggtaccgcgggtggggctcatgacttatcctctactgccagactgctggcgcagcataagattctacagggagagctcgggggaagaagggccttactccagcaggctttaagatgcggcgaagagcttgtggccgcaggcggagccgtggggcctggggctgatactgtccatttagtgggtttggccgagagagctgcttctgctcgaagaaggtggcagcggctggaagaagccgctgccagacgggagaggcggctgcaggaggctagggccttgcaccaatttggagccgatcttgatggtcttcttgactggctgcgtgatgcataccggttggcggctgcgggtgatttcgggcacgacgaagcctccagtagacgactggctcggcagcacagagccctcactggcgaggtggaagcgcataggggtccggtgtcgggactgagaagacagcttgcaacccttgggggagccagtggagccggacctttagtggtggcgttgcaggttcgcgtcgtggaggccgagcagctctttgcggaagtgaccgaagtggccgcattgaggcgtcagtggttgcgtgacgccctggccgtgtaccgcatgtttggggaggtccacgcatgcgaattgtggatcggcgagaaagaacagtggttgctctcaatgcgagtacccgatagccttgatgatgtcgaggttgtgcagcataggttcgagagcttggatcaggagatgaactccttgatgggaagagtgcttgatgtgaaccataccgtgcaggaactcgtagagggagggcaccctagtagcgacgaagttcggtcatgccaggatcatttaaactcaaggtggaacaggatcgtggagctggtggagcagagaaaagaagagatgtcggccgtccttctcgtagaaaatcatgtgttagaagttgccgaagtgagagcacaggtccgtgagaagcgcagagccgtggagtccgctcctcgcgcaggcggtgctctgcaatggcggctgagcggcctggaagctgcccttcaagccctggaacctagacaggccgcactattagaagaagcggctttgctcgcagaacgcttcccagctcaagccgcacgactgcatcaaggggctgaagagctgggcgctgaatggggggctcttgctagtgcagcccaggcctgtggcgaggcagtggcggctgcgggtcgactgcagaggttcctccatgacttagacgctttcctcgattggctggtgcgcgctcaggaagcggcaggcggttccgaggggcctctgccaaattcgcttgaagaggctgacgccctgttagcgcgtcatgccgctttgaaagaagaggtcgaccagcgggaagaggactacgcccgaattgtcgctgctagtgaggctctcctggctgccgacggtgccgaacttggtccgggactagcactcgacgaatggctacctcacctcgagctcggttggcacaaactccttggattgtgggaggcccgaagggaggccctggttcaagctcatatctatcagctgttcctacgggacctgaggcaggcactggttgtactccgtaaccaagagatggctctatcaggcgcagagttgccaggaactgtagagagtgttgaggaggcactgaaacagcaccgcgatttcctaacaaccatggagctaagccagcagaaaatgcaagtggccgtgcaagccgcagagggactgttgaggcagggaaatatatatggcgagcaggctcaggaggctgtaacaagattattggagaagaatcaggagaatcagttaagggcacaacagtggatgcaaaagctgcatgaccagcttgagctgcaacacttcttgagagactgtcacgagttagacggctggatccacgagaaaatgctcatggcaagggatgggacccgggaagataatcacaaattacacaagcgatggctccgccatcaggccttcatggccgagcttgcccaaaataaagaatggcttgagaaaattgaaagagaggggcagcagctcatgcaggagaaaccggaactcgcagccagcgtaaggaagaaattgggcgaaattcggcagtgttgggccgagctagagagcaccactcaggcaaaagccaggcagttgtttgaagccagtaaggccgatcagctggtgcagtcatttgcggagttggacaagaagctgctacacatggaaagtcagctacaggacgtggacccaggaggggatctggctacagtgaattcccaactcaaaaaacttcagagtatggagagccaggtcgaggagtggtaccgggaggtgggggagctccaagcccagacggcagccctacctctagaacccgcatccaaagagctggtgggcgaacgccaaaacgccgttggggagaggctggtcaggctgcttgaacctttacaggagaggagaaggcttctgctggcatcaaaggagcttcaccaggttgcgcacgacctggatgatgagctcgcctgggtacaggaaagattgcctttggcaatgcagacagagcgaggaaacgggttacaggctgtgcagcagcacatcaagaagaaccaaggactaaggagagagatacaggcacatggtcctcgccttgaggaagttcttgagcgtgccggagcactggcctctctcaggtcgccagaggctgaggcagttcgcaggggcctggagcagctgcaatccgcctgggccggattgagagaagcggcagagcgcaggcagcaagtgctggatgccgcatttcaggtggagcagtactactttgacgttgccgaggtggaggcttggttgggcgaacaggagctgctgatgatgtccgaggacaaagggaaagacgaacagtctacgttacaactattgaaaaaacacttacagctggaacagggagtagaaaattatgaggagtctatcgcccaactgagcaggcaatgcagagctctgctagagatgggccatccagacagcgagcagattagtcgacggcaatctcaagtagacaggctttacgtcgctttaaaagagctcggagaagagcgacgggtcgccctcgaacaacagtactggttgtatcagttgtctcgccaggttagtgaattggaacattggattgcagaaaaggaggttgtagccggttcacctgaacttggtcaagacttcgagcatgtgagcgtattacaagagaagttttccgagttcgccagcgagacagggatggccggacgggaaaggttagctgccgtaaaccagatggtggatgaattgatcgagtgcgggcacacagccgcagctaccatggccgagtggaaagacggtcttaacgaagcttgggctgaacttttagagctgatgggtaccagagcccagctgctagcggctagccgggagctccacaagttctttagcgacgcacgcgagctgcagggccagattgaagaaaaacgtcggaggctgccccgactcaccactcctccggagccccgtccttctgccagtagcatgcagcgcactcttcgcgctttcgaacatgatttacaactgctggtgagtcaggtacgtcagctccaggagggcgctgcacagctaagaaccgtttacgccggtgaacatgccgaggccatcgcatccagagagcaggaggtgttacagggctggaaagagttgctgagcgcctgcgaggacgccaggttgcacgtgtcctcaactgccgacgctctgagattccactctcaggttagggacctcctgtcctggatggacggtattgcctcccagattggtgctgcagataaaccgagggacgtgtcttccgtggaagttctcatgaactaccatcagggactgaaaacagaacttgaggccagggtgccggagctgactacctgtcaggagctcgggcgttcattgctcctcaacaagtccgcaatggcagatgagatccaagcacagctcgacaagctagggacaaggaaagaggaagtctcagaaaaatgggatagacactgggaatggctccaacagatgcttgaggttcaccaatttgcgcaggaagccgttgtggcagatgcctggctcactgcacaggagccgctcctgcagtccagagaattggggtcctcggtggacgaggtggagcagctaatccggagacatgaagcttttcgaaaagccgcagctgcctgggaagagaggttttccagcttacgcaggctgaccaccatcgaaaagatcaaggctgaacagtccaagcagcctcccactcctttgcttggtcggaagttttttggcgatcccaccgagctcgccgctaaggctgctcctctcctgcggcctggcggttacgagcgcggtttggaacccctcgccagacgcgcatcagacactttgtctgctgaggtccgcaccagagtgggttacgtacgacaggagcttaagcctgaaagattacagcccagaattgacaggctccctgagatcccagggagggtggagcccgcagcattacctgctgcccctgaggatgccgctgagacccctgccaccccagccgctgcagaacaggttagacccagaccagaaagacaggaatcagctgatcgcgcagaggaactgcctagacgacgcaggccggagcgacaggagagcgttgaccaaagtgaagaagcagctcgacggaggagacccgagaggcaagaaagcgctgagcatgaggccgctcactccctgaccctgggacggtacgagcagatggagagacgcagagaacgtagggaaagaagattggagaggcaggagtcatcggaacaggaaatgcccatccggggtgacttggtgaagggtaaggccactctcgccgacatcgtggagcagctgcaagaaaaagaagcaggacccggactgcccgctggaccatccctgccccagcctagggaactgcccccaggaagactccctaatggattggagttgcctgagaggacgccgagaccagaccggccaagagcacgagatcgcccaaaacctagaaggcgaccccgtccacgggagggcggagagggaggaggctcaaggaggtcacgatctgctcctgcacaaggcggaagtgcaccagctcccccacctccgcctactcataccgtccaacacgaggggttcctgctgagaaagagagaactggatgccaacagaaaatcctcgaaccgatcctgggtcagcctttattgtgtactgtccaaaggagagctcggcttttacaaggacagtaaaggccctgcttcggggtccacccacggaggcgagcctctcttgtccctacataaagcgaccagtgaggtggcatctgattacaagaaaaaaaagcatgtgttcaaactgcagacccaggacgggagtgaattcctcctgcaagcgaaggatgaagaagaaatgaacggctggctggaagctgtcgcttccagtgtggcagagcatgccgaaatcgctaggtggggccagaccttgccaactacgtcttcaacggacgaggggaatcctaaacgagagggaggggacaggagagcgtccgggcgtcgcaagta

SEQ ID NO: 242108 - DNA, 2037 bp, synthetic construct
  misc_feature 1..2037: note = Description of Artificial Sequence: Synthetic coding sequence
  source 1..2037: mol_type = other DNA
atgttgatggcgagggatgggacacgggaagataaccataaacttcacaaaaggtggctgagacaccaggcattcatggcagagttggcgcagaataaggagtggctggagaagatcgagcgagaaggccagcagctgatgcaggaaaaaccagagctggctgcctccgtacgaaagaaactgggggagattagacagtgttgggctgaactggagtcaacaactcaggccaaagcgagacagctgttcgaggccagcaaggcagatcaactggtgcagagtttcgcagagttggataaaaaattgctacacatggagagccaattgcaggacgtggatcctggaggggatttagccaccgtgaactcacagctgaagaaactccaatccatggagtcccaggtcgaagagtggtaccgcgaagtgggtgagctccaggcacagacagcagccttgccgttagagcccgcaagcaaggaacttgttggcgaacgccagaatgctgtgggcgagagattggtaagactactggagcccctgcaggaaagaagacggctcctgctggcctcaaaggaactgcatcaggtggctcatgacttggacgatgagctcgcatgggtccaggagcggcttccactggccatgcagacagaacggggaaatgggcttcaggccgtgcaacagcacatcaagaaaaaccaggggctgaggcgggagatccaggcccacggaccacgccttgaggaagtgcttgaacgagccggagcacttgcgtccttgagatcccctgaggcagaggctgtgaggcgcggattggaacagctccaatctgcctgggccggactaagagaagctgcggagaggcggcagcaggtgctcgatgccgcattccaggttgagcagtattatttcgatgtggctgaggtagaggcatggcttggcgaacaggagctgttaatgatgagcgaagacaaggggaaagacgagcagagtactcttcagctgctgaagaaacacctccagctcgaacaaggcgtggaaaactatgaggagtcgattgcccagttgagcaggcagtgtagagcattgctcgaaatggggcacccggacagcgagcagatttcccgcaggcagagtcaggttgacagactctatgtcgcccttaaagaactgggagaggagaggagagttgccttggagcaacagtactggctttatcaattatcaaggcaagtgtccgagctggagcattggattgcagagaaggaggttgtggctggatcgcccgaactggggcaggatttcgagcatgtgtcagtgcttcaggagaaatttagcgaattcgcgtctgagacaggaatggccggaagggagcgcctggcagctgttaaccagatggtggacgagctgatcgaatgcggacatacagcagctgcaactatggccgagtggaaggatggtctcaacgaggcatgggctgagctcctagagctgatgggcacccgagcccaattactggccgcttctcgtgagctgcataagttcttcagcgatgcaagggagctgcaagggcaaattgaagaaaagagacgcaggttacctcgacttactaccccgccagagcccagaccgtctgcgagctccatgcagcggaccctgagggcctttgaacacgacctacagctgctcgtgtcccaggtccggcagctgcaagaaggcgcagcgcaactgcggactgtgtacgctggcgagcatgctgaagccattgccagcagggaacaggaggtgctgcagggttggaaagagctactgtcagcttgcgaggacgccagactgcacgtgtcctctacagccgatgccctgagattccacagtcaagtccgcgacctactgtcgtggatggatggtatcgccagtcagatcggagccgcagacaagcccagatgtccatcttccttgttgggacttcctgcgtctccatggtggcctacccctgccacacccagtcctcttactgctcctttctccatggagtag

SEQ ID NO: 242109 - DNA, 3924 bp, synthetic construct
  misc_feature 1..3924: note = Description of Artificial Sequence: Synthetic coding sequence
  source 1..3924: mol_type = other DNA
atgccccactatcccagttgttccagtgcccctagcctgggcactcctcggccacctcagatccagcagctggaagccaggcatcggaaccaggagaatcagctgagggctcaacagtggatgcaaaagcttcacgaccagctcgaactccaacacttcttgcgtgactgtcatgagctggacggctggattcacgagaagatgctcatggcacgcgacggcacccgagaagacaatcataagcttcacaaaaggtggctgcgccatcaggcctttatggcggaactcgcacagaataaggagtggctggagaagattgaacgggagggtcagcaactgatgcaggaaaagccagagttggctgcaagcgtgagaaagaaacttggagagatccggcagtgttgggcggagctggagtccactacacaggcgaaagctcgtcaattatttgaggcatctaaggcagatcaattggtgcagtctttcgccgaattggataaaaaactgttacatatggaatcccagttgcaagacgttgacccaggaggcgatttggctaccgttaattcccaactgaaaaaacttcagtctatggagtcccaggtggaagaatggtatcgggaagtgggggagctgcaggcacaaaccgccgcattgccactcgaaccagcaagcaaagagcttgtcggagagaggcagaacgccgtcggggagagactcgtaaggctgcttgagcccttacaggagaggagacgcctgctgcttgcaagtaaagagttgcatcaggtcgcccatgatcttgatgatgaactggcctgggtacaggaacgcttgcccctcgcaatgcagaccgaacggggaaatggactccaggctgtccagcagcacattaagaagaatcaaggcctccgacgcgagatccaggcccacggacccaggttggaggaggtcctggaaagggctggcgctcttgctagccttcgctcccctgaggcagaggcagtccgtcgcggactcgaacaattacaatctgcctgggccggtcttcgggaagctgcggagcggagacaacaggtcttagacgctgctttccaggttgaacaatattattttgacgtggctgaagtggaagcctggctgggtgagcaggagttactgatgatgtcggaagacaagggaaaggacgagcagtcgactctccaactcctaaaaaagcacctccaattggagcagggggtggaaaactatgaggaatctatcgcgcagctgagccgtcaatgtagggcactcctggagatggggcatccagattccgagcagatctccagacggcagagccaggtggaccgcctatacgtcgccctgaaggagctgggcgaggaaaggcgagtcgcactcgagcagcagtattggctttatcagctgagcaggcaagtctctgagcttgagcactggattgcggaaaaggaggtggtagcagggtcacctgaacttggacaggacttcgaacatgtgtcggttttgcaggaaaagttttcagagtttgcttcagagacaggtatggctggcagagagcggctggctgctgtgaaccagatggtcgatgaactgattgaatgtggacacacggccgctgccacaatggccgaatggaaagacggtctaaatgaggcctgggcagagctgctggagttgatgggcaccagagcgcagttattagctgctagcagggagcttcacaagttcttctccgacgcacgtgaacttcaaggccagatagaggagaagagacgcaggttaccgaggcttaccacccctccagagccacggccatcagcatcaagcatgcaaagaaccctgcgtgccttcgaacatgatttacagttacttgtgagccaggtcaggcaattacaggagggagccgctcaattgaggaccgtctacgcgggtgaacacgccgaagcaatcgcgagcagagagcaggaagtgctccaggggtggaaggagctgctgtccgcttgtgaagacgcccgtctccatgtctcaagcactgctgatgccctccgattccacagtcaagtgcgagatctgctcagctggatggatgggattgccagtcaaatcggggcagctgacaaaccccgagatgtttcttccgtcgaagtgttgatgaattaccatcagggcctcaagactgagctggaagcgagggtacccgagcttacaacatgtcaggaactcggccgttcgttgctcttaaacaagagtgccatggccgacgagatacaggctcagctggataaactcggaacacggaaggaggaagtttccgaaaagtgggatcgccattgggagtggctgcaacaaatgttggaggtacaccagttcgcacaagaggctgttgtagctgacgcctggttaaccgcgcaggagccactgctacagtcgagagaattgggctccagtgtcgatgaagtggaacagctaatccggcgtcacgaggccttcaggaaagcagccgctgcctgggaagaacgattttcaagcctgcggaggctcaccactatcgagaagattaaagcggaacagagcaaacagccgccaaccccgctgctgggacgcaaattcttcggcgacccaaccgagctcgccgctaaagctgctccgttgctgcggcctggcggttacgagagaggactcgaacccttagctcgccgtgcctcggacacattatctgccgaagtccggactcgtgttgggtatgttcggcaggaactaaaacccgagaggctgcaacctagaattgatcgcttacctgagattccagggagggttgaaccagctgccctgccagcagctcccgaggacgccgctgagacgcctgcaactcccgctgcagccgagcaggtgaggcccaggccagaaaggcaggagagcgcagaccgggctgaagaattgcccagaagaagacggcctgagcgccaggaatctgttgatcagtcagaagaggccgctcggcgtcggcgtccagagagacaagagagcgccgaacacgaggcagcccacagtcttacactggggaggtacgagcaaatggagaggcgacgggaacgaagagagaggcgactggagcggcaagagagctcagaacaagaaatgccaatccgcggtgatctggtgaagggcaaggcaactctggccgatattgtggaacaactccaggaaaaagaggcgggacctggactcccagcagggccttcgctgccccagcccagggagttacccccaggcagactgccgaacggactcgagttaccagagaggaccccccgaccagacaggcccagagccagggacaggccaaagcctcgcagacgcccacgccctcgcgaaggtggagagggtggcggttccaggaggtccaggagcgctcctgcccaaggtggttctgcacccgctcctccccctcctcccacccacacagtccagcatgaaggtttccttctaaggaagcgcgaattggatgccaaccggaaatctagcaataggagctgggtctccctttactgcgtgttatccaaaggagagctaggtttttacaaggacagcaagggcccagctagtggctctacacatgggggagagcccctgttgtcgctgcataaagcgacttcagaggtggcctcagattataaaaagaagaagcacgtctttaagttgcagacccaggatggttccgagtttctgctgcaggcaaaagatgaagaggaaatgaacgggtggctcgaagcggtggccagtagtgtggccgaacacgctgagatcgctaggtggggtcagacactgcctacaaccagtagtacagacgaggggaatccaaagagagaaggtggcgacaggagagcaagcggccgtagaaagtag

SEQ ID NO: 242110 - DNA, 7694 bp, synthetic construct
  misc_feature 1..7694: note = Description of Artificial Sequence: Synthetic coding sequence
  source 1..7694: mol_type = other DNA
atggcgcaggtgccaggcgaagtcgacaatatggaagggctgcccgctccaaacaataatccagcggctcggtgggagagcccagatcgcggatgggagcgggagcagcccgctgcatctaccgctgccgcttcactgttcgagtgttcaagaatcaaagcgctggcagacgagagagaggccgtgcaaaagaaaacatttacgaaatgggttaatagccatttggcccgagtgggctgccacattggagatttatacgtcgatctccgggatggattcgtgctcacacggttactggaggtgctctcaggggagcagcttcctcggccaacccgtgggagaatgagaatccatagcctagaaaatgtggacaaagccctgcaatttctgaaagaacagagggtccatctcgagaatgttgggagtcacgacatcgtggacggtaaccacaggctcactctgggactggtgtggactattatcctccgcttccagatccaggtaataaagatagagacagaggataatcgtgagactcgttcagctaaagacgcactactgttgtggtgccaaatgaaaaccgcaggttacccagaagtgaacattcagaactttaccaccagttggagagacggtttagcgtttaatgccttaatccatagacacaggcccgatctggtggacttttctaagctgactaagtctaacgccaactataacctgcagagagcattcagaaccgccgagcaacacctggggttggcaagactgttagatcctgaggacgtgaacatggaagcaccagacgagaaatccattattacctatgtagtgtcattttaccactattttagcaaaatgaaggccttggccgtggagggcaagcggataggaaaagtccttgaccaggtgctggaggtgggaaaaatcattgagcggtatgaggagcttgctgcggagctgctagcttggattcatcgcaccgtagggttgatctcaaaccagaaattcgccaatagcctcagtggggtgcagcagcaactgcaggccttcaccgcatattgcaccctagaaaagcccgtaaagttccaggaaaagggtaatctggaagtgctgttattctcaattcagagcaaactccgcgcttgcaacagacgcctgtttgtcccgagagagggttgcggcatttgggacatcgataaggcttggggcgagctggagaaagccgagcacgagcgcgaagctgccctacgggcagagctgattcggcaagagaaactcgagctcctggcacaacgctttgaccacaaggtggccatgcgcgagagttggctgaatgaaaaccaacggctggtctcccaggataacttcgggtacgaactccctgcagtggaggccgctatgaagaagcacgaggccatcgaggccgacatagccgcatatgaagagagggttcagggcgtggctgaactcgcccaagcactggcggcagaaggatattacgacattcggagggttgctgcccagagggattccgtgctgaggcagtgggccctgctcactggcctagtaggcgcacgacgtacacggctggagcagaacctcgccttgcagaaggtattccaagaaatggtttatatggtagactggatggaagagatgcaagctcagctgctgagcagagagtgcgggcagcacctcgtggaggccgacgacttgttgcaaaagcacggcttactggagggagatatcgcagcacagtccgagagggtcgaagccctcaatgccgctgccctgaggttttcccagctgcagggatatcagccctgcgatccgcaggtcatctgtaaccgcgtgaatcatgtgcacggatgtctcgcagaactgcaggaacaagcagcccgacgcagggccgagctggaggcaagtaggtccttgtgggccctgctccaggagctggaggaggcagaatcctgggctcgcgacaaagagcgactgcttgaggctgccggagggggaggggcagcaggagctgccggagctgccggtacggccggtggggctcacgacctgtcatctacagccaggctcctcgctcagcataagatccttcagggagaattgggaggacgacgggctcttttacagcaagccctgcggtgcggggaagagctggttgcagccggtggagctgtcggtcccggtgctgacacagttcaccttgtcgggttagcagaacgcgcagcctccgctcggagacgatggcagaggctggaagaggccgctgcgaggagagagaggagacttcaagaggcccgtgccctgcatcagttcggtgccgatctggatggtctgttggactggttgagagacgcctatagactcgctgccgcaggcgactttgggcatgatgaggcctcatccaggcggctcgccagacaacacagggcacttacaggcgaagtggaagctcaccgtggaccagtgtctggtctgcgacgacaacttgctaccttagggggagcctccggggctggaccactcgttgtcgctctacaggtgcgcgtggtggaggcagaacaattgttcgccgaggtgacagaagtggcggctctaaggcggcagtggctgagggacgcactggcagtctatcggatgttcggtgaagtgcacgcctgtgagctgtggatcggtgaaaaggagcagtggctattgagcatgcgtgtgcccgattccctagacgatgtcgaagtggtacagcacaggtttgaaagtttggaccaggaaatgaattcgctgatgggaagggttttggatgtgaatcacacagtccaggaactagtagaaggtggccatccgtctagtgacgaggtcaggtcctgccaggaccacctgaactcccgctggaaccggatagtagaactggtggagcaaaggaaagaggaaatgagcgcggtcctccttgttgagaaccacgtgttagaagttgcagaagtgagagcacaagttcgggagaagaggagggccgtagagtccgctccccgtgcaggcggagcactccagtggagactctccgggttggaggctgcccttcaggccctggaacctcgccaggcggcattgctggaagaggccgctctgctagccgaacgtttccctgcacaggcagctcgactgcaccaaggcgctgaagagctgggcgctgaatggggcgcactggcgtccgccgcacaggcctgtggagaagctgtggcagctgccggaagactgcagcgcttcctgcatgacctggacgcctttctggactggctggtcagagcccaggaagcagcgggtggctctgaaggacctttaccaaatagcctggaagaagcagacgctctgctcgccaggcacgcagcactgaaggaggaggtagatcaaagagaggaggattatgcaaggatagttgcagctagcgaggctctgctagctgccgatggcgctgagctgggcccagggttagctctggacgaatggctgccccatcttgagttgggctggcataaacttctcggcctgtgggaggctcgtcgcgaggccctagtgcaggcccacatctaccagcttttcttacgcgacttgagacaagccctggtggttctcaggaaccaagagatggccctctccggcgcagagctccccggtacagtcgagagcgtcgaggaggctctcaagcagcatcgggacttcttgaccaccatggagctgtctcagcagaaaatgcaggtcgcagtgcaggctgccgagggcctgctgcggcaggggaatatatacggcgagcaggcacaggaagccgtgacaaggcttctggaaaagaaccaggagaatcagcttcgcgcacaacaatggatgcagaaattgcatgaccagttagagcttcagcatttcctcagagactgccacgaactcgatggctggattcacgagaaaatgttaatggctagggacggcacaagggaggacaatcataagctacataagcgttggttgaggcatcaggctttcatggccgagttggcccagaacaaagagtggttggagaagatagaacgcgagggacagcagttgatgcaggagaaacctgagttagcagcttctgttcggaaaaagctgggcgagatcagacagtgttgggccgagttggaaagcaccacacaggccaaggccagacagttgttcgaagcttccaaggccgaccagctggttcagtcatttgctgaacttgataagaagctgctgcacatggagtctcagttacaagacgtcgacccaggtggggatctcgccactgtgaacagccagctgaagaaactgcaaagtatggaaagccaggtggaagagtggtatcgggaggttggagagcttcaggctcaaacggccgcacttccactggagcccgcatcaaaggagctggtgggcgagcgccagaacgcggtaggtgagaggcttgtccgccttctcgaacctcttcaggagcgcaggagacttctgctagcatcaaaagagctccatcaggtggcacatgactggaccacctcctgggcgtgggtgcaggagagacttcctctcgcgatgcagacagagcgcggaaatgggctgcaagcagtccagcagcacattaaaaaaaatcaggggttgcgccgtgaaatccaggctcacggccctcggctggaagaggtgctggaaagagcaggagctctggccagtcttagatcccctgaggctgaggccgtgagaagaggattggaacagcttcagtccgcatgggcaggactcagggaagcagctgaaagacgtcaacaggtgctcgatgccgcttttcaggtggagcagtattattttgatgtggccgaggtcgaagcctggctgggggaacaggaactgctgatgatgtccgaagataagggcaaggatgagcagtctactctgcagttacttaagaagcaccttcagctggaacagggtgtcgaaaactacgaggaaagcattgcgcagcttagtaggcagtgccgtgctcttctggaaatggggcacccagacagtgaacagatcagtcggaggcaatcccaggtcgatcgcctttacgtcgccctcaaggagctgggcgaagaacggcgtgtcgctctcgagcaacagtattggctttatcagttatcgagacaggtaagtgagcttgaacactggatcgctgaaaaagaggtcgtcgcagggtctcccgagctgggacaggactttgaacacgtgagcgtcctccaagagaaatttagtgagttcgcctctgaaacaggcatggcagggagagaacgcctcgcagcggtgaaccagatggtcgacgagttgattgagtgcggacacaccgccgctgccaccatggccgaatggaaggacggcctgaatgaggcgtgggccgagcttctggagttgatgggcacacgggcacagctgctggctgcatcccgcgaattgcataaattcttctccgacgccagggagctgcagggtcagatagaagaaaagaggcgaagactccccagactgacaactccaccagagccccgaccttccgctagttcaatgcagcggaccctgcgcgcttttgagcacgacttgcagttacttgtgagccaggtaaggcagcttcaggaaggagccgctcagctacgcaccgtctacgctggagagcacgctgaggctattgcatctagggaacaagaggtcttacaaggttggaaagagctgctcagtgcctgcgaggacgcaagactccacgtatccagtacagccgatgctctcaggtttcatagccaggttagggacctgctgagctggatggatggcatcgccagtcaaattggagcagctgataagccaagagacgttagcagtgtcgaggttcttatgaactaccaccagggtcttaagacggagcttgaggcacgagtccccgaactgacgacgtgccaggaactcggacgcagtctgttactgaataagtctgctatggctgatgagatccaagcccaactagacaaactaggcactcgtaaggaagaagtctcggagaagtgggacaggcactgggagtggctacagcaaatgttggaagtgcatcagtttgctcaggaagccgtcgtagccgatgcttggctgacagcccaggagccactgctgcagtcacgtgagttgggctcttcagtggatgaagtagaacagctcataaggcgacatgaggctttccggaaggccgctgcagcctgggaagagcggttctcaagtctacgacgactgactacgatcgagaaaatcaaagcggaacaaagtaaacagcctcctactcctctgttagggaggaagttttttggcgacccaacagagctcgctgcaaaagccgcaccacttctgcggccaggcggttacgagagggggcttgagccactcgctcggcgtgcatcagatacgctgtctgccgaggtgcggacgcgcgttggctacgtccgacaggaactaaagcccgagcgcctgcagcccaggattgatagactacccgagataccagggagggtggaaccagcagcacttccggcagccccagaggatgccgctgaaacccctgccacacccgctgccgcagagcaagtaagacccaggccagagcgtcaggagagcgctgatcgggctgaagaattacctagacgaagaaggcccgagcgtcaggaaagtgtcgatcagtccgaggaagcggctaggaggcgacggcctgaaagacaggaatcggccgagcacgaagctgcccactcccttaccctcgggagatacgaacagatggaacgaagacgggagagacgcgaacgaagattggaaaggcaggaatcctctgagcaggagatgcccatccgaggggacctggttaaagggaaggccacgctggcggatattgtggaacagttgcaggaaaaggaggccggaccaggcctaccggcaggacctagcttgccacagcccagagagctgccaccagggagactccccaacggcttggaacttccggaacggacaccaagaccagaccggcctagggcaagggacaggccaaagcccaggcggaggcctcggccaagggaggggggagaggggggagggtctcggaggtctcggtcagcgccagcacagggtgggagtgccccagctcctcccccacctcctacccacacagtgcagcacgagggcttcctgctgcgcaagcgagagttggatgccaacagaaagagcagcaatagatcttgggtaagcctgtactgcgttttaagtaaaggagagctcggattctacaaagacagtaagggacctgcgtctggctcaacccatggaggcgagccactcctctctcttcacaaggccaccagtgaagtcgccagcgactataagaagaaaaaacatgtgttcaaactgcagacacaggacggatcagagttcttattgcaggctaaagatgaggaagaaatgaatggctggctagaggccgtcgcctcttctgtggcggaacacgccgagatcgctagatgggggcagacacttcccaccacgagcagtacagatgaggggaatcctaagagggaggggggagacaggcgcgcaagcggaagacgcaagta

SEQ ID NO: 242111 - DNA, 11025 bp, synthetic construct
  misc_feature 1..11025: note = Description of Artificial Sequence: Synthetic coding sequence
  source 1..11025: mol_type = other DNA
atggccggtcagccccactccccacgcgagcttctcggtgcggctggccatcggagcagacggccaagcactgagctcagggtgccgcctagtcccagcctgaccatggattctcagtacgagactggacacatccggaagctgcaagctagacatatgcaaatgcaagaaaaaacttttactaaatggatcaataatgtgttccagtgtggtcaggctggtatcaagattcgcaatctgtacaccgagctcgctgatggaatccacttattacggctgctggagttgattagcggcgaggcccttcctccgccttcccgaggcaggctgcgcgttcacttcttggagaacagctcacgcgcacttgcctttctgagggcaaaggttcccgtccccctgatcgggcctgagaacatagttgatggcgatcagacactgattctggggttaatctgggtgatcattcttcggttccagataagccacattagtctagataaggaggagtttggagccagtgccgcactgttatctacaaaagaagcccttcttgtgtggtgccagcgtaaaaccgcctcctataccaatgtgaacatcaccgattttagccgctcatggtccgatggtttagggtttaacgctctgatacatgcccaccgccctgaccttctggactatggctctctgcgtcctgaccggccattgcacaaccttgcttttgcttttctggttgccgaacaagagctgggcattgctcagctactcgaccccgaggacgtcgccgctgcccaaccggacgagcgttcaatcatgacatacgtgagcctctactaccattattgctctaggctgcaccagggccaaaccgtccagaggaggttgacaaaaatactgctccagctgcaggagactgagctgctgcaaactcaatacgaacagttggtggcagacctgcttcggtggatcgcagagaaacagatgcagttagaggcaagggacttcccagattctctccctgccatgcgccagctcctggccgcttttacaatcttccgaacccaagaaaaaccacccaggctccaacaacggggagcagcagaggctctattgttccgactgcaaacggccctgcaggcacagaatcgacgaccattcctgcctcacgagggcctgggcctggcggaattgtctcagtgttgggccggtcttgagtgggctgaagcggcacggagtcaggcactccagcagaggctgcttcaactgcagaggcttgaaactctcgccagacgatttcaacacaaggcagcattgagagaatcgttcctgaaggacgcagagcaggtcctggatcaggctagagcgccacctgcctctctggccacggttgaagccgcagtgcaaagactgggcatgttagaggctggtattttacctcaggaaggaaggttccaagctctggctgagatcgcggatatccttaggcaggaacagtatcactcctgggcagatgtcgccagacgccaagaggaagttacagttcgctggcagagacttttgcaacacctgcagggccagcgtaaacaggtggccgacatgcaggccgtcttgtccttgttgcaggaagtggaggccgcaagtcaccaattagaggagcttcaagaacctgccaggtctaccgcatgcggccaacagcttgccgaggtggtggagctgcttcagaggcatgatctgcttgaggcacaagtctccgcacacggggctcacgtgagtcatcttgctcagcagactgcagagcttgactccagcctgggtactagcgtggaagtactgcaggccaaggcgagaacgttggcccagctccagcaaagcctcgtggccctggtgagggcaagacgcgctttactggagcaaacgttgcaaagagccgagtttctacgtaactgtgaggaagaggaagcttggctgaaggaatgtggccagcgtgtggggaatgccgcactgggacgcgacctttctcagattgctggcgcactccagaagcataaagctctcgaggcagaggtgcatcggcatcaggcagtgtgcgtggacctggtaagaaggggtcgagatctaagcgccagacgcccacccacacagccagacccaggtgagcgagcagaggccgtccaaggtggatggcagcttctccaaacccgcgtagtcggccgaggtgcgaggctgcagaccgccttgctggtactgcagtacttcgccgacgctgccgaagcagccagctggctaagggagagaagaagcagcctagaaagggcgagctgcggacaggaccaggcagcagccgaaacgttgctaaggaggcatgttaggctggagagggtcctgagggctttcgccgctgaactgcgcagactcgaggagcaaggcagagccgctagcgctagggcctccttgttcactgtgaattccgccctgtcaccccctggtgagagcctgagaaacccaggtccttggagtgaagcatcctgccatccaggcccaggcgacgcctggaaaatggctcttcctgcagaaccagacccagatttcgaccctaataccattcttcagacccaagatcatctaagtcaagattacgagtcgttacgagctctagcgcaattgagacgtgccaggctggaggaagccatggcactgttcgggttttgttcctcatgcggggagctgcagctgtggctggaaaaacagactgtgctgcttcagagagttcaaccacaggctgacaccctggaggtgatgcaacttaagtatgagaattttttaaccgctctggcggtcggtaaaggactttgggctgaagtatcgtcctccgcagaacagctgcgtcagcgatacccgggaaatagcactcagattcaaagacagcaggaagagctgtcacaacggtggggacagctcgaggcgcttaagagggaaaaggcagttcaactggcacatagtgtggaggtctgttcatttctccaggaatgtgggcctactcaggtccagttgagggacgtgttgctgcagctggaagcgctgcagccaggaagctccgaggacacttgtcatgcgctgcagctggcacagaaaaagaccttggtcttagaacggagagtgcactttcttcagtccgtggtagttaaggtcgaggagcccggatatgctgaaagccagccactgcaaggccaggtggagaccctccaaggtctcctgaaacaggttcaggaacaggtggctcagcgcgcaaggcggcaggctgagacacaggccagacagtcttttctccaggaatcccaacagttactactgtgggcagagtctgtccaagcacaattgaggtccaaggaagttagcgtggatgtggcctccgctcaaaggcttctcagagagcatcaggaccttctcgaggagattcacttatggcaggagaggctccaacagttggacgcccagtctcagcctatggctgcccttgactgtccagactcccaggaagtgccaaatacgctgcgggtgttagggcaacaggggcaggaactgaaggttttgtgggagcaaaggcaacagtggctgcaggaggggctggagctgcagaaattcggaagagaggttgacggattcacagctacctgtgccaaccatcaagcatggttgcacctggacaacctaggcgaagatgtgagggaagccctcagcctgctgcagcagcatcgggagtttggtaggttgctcagcaccctcggcccaagagctgaagccctccgcgctcacggtgagaagcttgttcaatcccagcaccccgctgcccacacagtgagagaacagctgcagtcgatacaggctcagtggactagactgcagggaagaagtgagcaaaggcgtcggcagctgctggcatccctgcagcttcaggaatggaagcaagacgtggccgaactgatgcagtggatggaagagaagggtctcatggcagcacacgaaccatcaggggctcggcgtaacatactgcaaactctgaaaagacacgaagccgctgaatcggaattgctcgcaacgcggaggcatgttgaagcgctgcagcaggttggaagggaattgctgtcacgcaggccttgtggccaggaggatattcagacccgattacaggggctgcgcagcaagtgggaggctctcaaccggaagatgaccgagaggggcgacgaattgcagcaagctggacagcaggaacaactgcttaggcagttgcaagatgcaaaagagcaactggagcagctggagggggcattgcagtctagcgaaacggggcaggatctgcggagcagtcaaaggctacagaaacggcaccagcaattggaatcagagagcaggactctggcagcaaaaatggccgctctggcttctatggctcatggcatggccgcatcccccgcaatacttgaagaaactcagaaacaccttcgccgactggagttgctgcagggacatctggcaattaggggcttgcagctccaggcctctgttgaattgcaccagttttgtcacctgagcaacatggaactgtcatgggtggcggagcacatgccgcacggtagccctacatcatacacagaatgtctgaatggggcacaaagtctgcatagaaagcataaagagttgcaggtcgaagtgaaggctcaccagggccaggtgcagcgggttctgtcatccggacgatcgctcgctgcgtctggtcatcctcaggcacagcatattgtggagcagtgtcaggaactagagggccattgggcggagctggagcgagcttgtgaggcacgcgctcagtgtctgcagcaggcagtcacgtttcagcaatatttcctggatgttagtgaattggagggctgggtggaggagaaaaggcctttggtgtcctcccgagactacggaagagacgaggccgctacactccgcctgatcaacaagcaccaggccctgcaggaggaattggcaatttattggtcaagcatggaagagctggaccagacagcccagaccctgacaggaccagaggtgcctgagcagcagcgggttgtccaggaacgattgcgagagcaactgcgcgctttacaggagttagccgcaacccgcgacagagaactcgaaggtacacttcgtttacacgagttccttagggaggctgaggaccttcagggttggttggcatcacaaaaacaggcagctaaggggggtgagagcctaggcgaagaccctgagcacgcactgcatctgtgcaccaagtttgctaaattccaacaccaggtggagatggggtctcagagagttgcagcatgtaggcttctggcagaatctctgctggagcgtgggcatagcgccggaccaatggttaggcagcgtcagcaggacctccagacagcctggtcggagttgtgggagttaactcaggccagaggacatgcccttcgtgacacagagaccaccttgagggtgcacagggacctattggaggtcctgacacaggtccaggaaaaagccacatcactgcccaataacgtggcaagggatttatgcgggttagaagctcagctgcgcagccaccagggccttgagagagagctggtgggcactgagcgccaacttcaggaacttctcgaaacggcagggcgtgtccagaagctgtgcccgggacctcaagcacatgcagtacagcagcgtcaacaggctgtgacacaggcctgggccgtcttacagcggaggatggagcagcgcagagcccagttggaacgggctagattgctcgcacgattccgcaccgccgtgcgggattatgccagctgggcggctagagtgcgacaggacctgcaggtcgaagagagctcacaggaaccgagctctggacctctgaagctgagcgctcatcaatggctgcgtgctgaactggaggccagagagaaattgtggcaacaagctacacagcttgggcagcaggcgctcctggcagcaggaacgcccacaaaagaagtgcaggaagaactgcgggcactccaagatcagagagatcaggtctaccagacctgggctagaaaacaggaacggctacaggccgagcagcaggagcagctcttcttacgggagtgcggacgacttgaggagattctggctgctcaggaagtgagcttaaagaccagtgccctgggttcatccgttgaagaggttgaacaactgatccggaaacacgaggtttttctgaaagttctgactgcacaggacaagaaggaggctgcccttcgtgagcgcttgaaaacacttcgcagaccacgggttagagacaggttgccgatcctcctacagcggagaatgagagtaaaagagctggccgagtcacgcggacatgcactacatgccagtctgctgatggccagttttactcaggctgcaacacaagctgaagactggatacaggcttgggcacaacagttgaaagaacctgtaccacccggagacctgagggacaaactgaagcccttactcaagcaccaggccttcgaagcagaggttcaggcgcacgaggaagtcatgacttctgtggcgaaaaagggggaggccctcctggctcagtcccaccctagggctggcgaagtgagtcaaagacttcagggccttagaaagcattgggaagacctcaggcaggccatggcgctgcggggacaggaactggaagatcgacgcaatttcctggagttcctgcagcgagtcgacttggccgaagcatggatacaggagaaggaagtgaagatgaatgtgggggatctgggccaggacttagagcattgcctgcagctgcggagaagactgagggaattcaggggcaattcagctggcgatacagtgggagatgcttgcatacgttccatttccgatctttctcttcagctgaaaaaccgtgatcccgaagaggtgaaaatcatttgtcaacggagaagccagttgaacaacagatgggcctcatttcatgggaatcttttacggtaccagcagcagcttgaaggtgctctcgagatccacgtgctatctcgggagctggataacgtcactaagagaatccaggagaaggaggctctgatacaggctctggactgcgggaaagacctcgagtcagtacagaggctgctgcgtaagcacgaagaattagagagggaagtacatccaattcaagcacaggtggagtctttggaaagagaagtggggaggctgtgtcagagaagccctgaggcagcccatggccttcggcaccggcagcaggaagtcgccgaatcttggtggcaactgagatccagggcccagaaacgcagggaggccctggacgcacttcatcaggcacaaaaactccaggctatgcttcaggaattgctggtctcggcccagcggcttagagcccaaatggatactagtcccgctcctcgttcacccgtcgaagccaggagaatgctggaagagcaccaggagtgtaaggctgagctggattcctggactgatagcatcagtttggcgcgaagcactgggcaacagcttctaaccgcagggcaccctttttccagcgacatcagacaagtgctcgccggactagagcaggaactatctagcttagaaggggcttggcaagagcatcagctccagctgcagcaagctctggaacttcagctgttcctgagtagcgtggaaaagatggagcgctggttatgctctaaagaggatagtctagcaagtgagggcctttgggatcctcttgcgcctatggagcctctgctgtggaaacacaaaatgctggagtgggacctggaagtgcaagcaggtaagatctccgcactcgaggcaaccgctcgtggcctccatcagggaggacatccagaggcccaatccgccttagggcgttgtcaggcaatgttactcaggaaagaggctctgttccggcaggccggaactagacggcacaggctggaagaacttcgtcaactacaggcgttccttcaggacagccaggaagtagctgcctggctgagggaaaaaaatctggttgccctggaggaggggctcctcgataccgccatgctgcctgcgcagctgcagaagcagcagaattttcaggccgaactggacgcttccatgcatcagcagcaagagcttcagcgtgaaggccagcgcttgctccaaggcggtcacccagcttccgaagccattcaggagcgcttagaggagctgggtgctctatggggggagctgcaagacaattcacaaaaaaaggtggccaaactgcagaaggcttgcgaggccttgcgtctgcgtcgcagcatggaggaattagagaattggctggagccaattgaagtcgaattgagggcccctactgtggggcaagcattgcctggggtcggagaactgctcggaacccagcgggaactagaggcggcagtggacaaaaaggcccgacaagcagaagccctgttgggtcaggcccaggctttcgtgagggaaggtcactgcttggcccaggatgttgaagagcaggccaggagactattgcagcggtttaagagccttagggaacctctccaggaacgcagaactgctttggaggccagatcccttctgttgaaattttttcgtgacgccgatgaagaaatggcatgggtccaggagaaattacctttggcagccgctcaggactacgggcagtcactgtccgctgtgcgccacctgcaggagcagcatcagaacttggagtctgaaatgagctctcacgaggcgctgacccgggttgttcttgggacgggctacaagctagttcaagccggacatttcgctgcccatgaagtggccgcacgcgtgcagcagctggagaaggcgatggctcacctgcgcgcagaagccgctcggcgaaggttactactgcagcaggcccaagaggcccagcaattcctaacagagctgctcgaggctggatcatggttagcagaaagggggcacgtcctggatagtgaagatatgggacatagtgcagaggctacccaggcattgcttcgtaggctggaggctacgaagagagaccttgaagcctttagtccccgtatcgagaggctgcagcaaaccgcggctctcctggaaagcaggaagaatcctgaaagcccaaaggtgctcgcccaacttcaagccgtgagagaagcacacgcagagttactgcgcagagctgaggccagggggcacggcctgcaggaacaactgcaactccatcagctggaacgggagactttactgctggacgcgtggctgaccactaaggctgccaccgctgagtcccaggactacggccaggacctggagggcgtgaaggtgctggaggagaaatttgatgcctttagaaaggaggtccagtctctcggtcaggccaaagtatacgcactcagaaaactggccggtactctagaaaggggggctcccaggcggtatccgcacatccaggcacagcggtctagaattgaggctgcctgggaacggctggatcaggccatcaaggccaggaccgagaacctcgccgcagcccacgaagtccattcttttcagcaggccgcagctgaactccaggggagaatgcaagagaagaccgcactcatgaagggagaagacggaggtcactctctttccagcgttaggaccctccagcaacagcatagaaggctggaacgggaattggaggcgatggagaaggaggttgctcggctccaaactgaggcttgtcgtcttggacaactgcacccagcggcacccggtgggctggccaaggtacaagaggcctgggccacattgcaagccaaggcgcaggagcgtggtcagtggctcgcacaggccgctcagggacacgcctttctaggaagatgccaggagttgctggcctgggctcaggagcggcaggagctggcgtcaagcgaggagctggcagaggacgtcgctggggcagaacagttgctaggtcagcatgaagagttaggacaagaaatacgggaatgccggctccaggcccaggatctgcggcaagagggccaacagctcgtggacaactcccacttcatgtctgctgaggtgaccgaatgcctgcaggagcttgagggcaggcttcaggagctggaggaggcatgggcgctgcgctggcaacggtgcgcagagagctggggcctgcagaaactccgacagcggctggaacaggcagaggcatggctggcctgttgggagggtcttctgctcaaaccagactatggccacagcgtgtctgacgtcgagctgctactccacaggcatcaggacttagagaagctccttgccgctcaggaggagaagtttgctcagatgcagaagaccgagatggaacaggagctgctgctccagccccaggagcttaagccgggtcgcgctggatcatcactcacgtcttttcaatggagaccatctggacaccagggcttgggagcccaactcgccgaaacgcgggatccccaagacgcaaagggcactcctactatggagggttcattggaatttaagcagcatcttctgccaggcggtagacagccttcttcaagttcttgggatagctgcagaggtaatctgcagggttcttccctgagcttatttctggatgagcgtatggccgcagagaaagtggctagtatcgcgcttttggatcttaccggggcacgttgtgaacgtcttcgcggacgccatgggagaaagcatacattttctcttcgtctaacctctggggctgaaatccttttcgcggctccctctgaggaacaggccgagagctggtggcgtgctttagggtccaccgctgcccagtctctgagcccaaagttaaaagctaagccagtgtcctccctgaatgagtgtactaccaaagatgccaggcctggatgcttgctcaggtctgacccctaa

SEQ ID NO: 242112 - DNA, 942 bp, synthetic construct
  misc_feature 1..942: note = Description of Artificial Sequence: Synthetic coding sequence
  source 1..942: mol_type = other DNA
atgagacataatcaaatgtgctgtgaaacccctcccactgttaccgtctatgttaaatcagggtcaaacagaagtcaccagcctaagaaaccgattaccctgaagaggcccatctgcaaagacaactggcaggcgttcgagaaaaacacacacaataacaataaatctaaaaggcctaagggaccttgccttgtgatacaacggcaagatatgacggctttttttaagctattcgatgatgatctcattcaggatttcctgtggatggactgttgttgtaagatcgccgataaatacctgctggccatgacgtttgtgtattttaagagagcaaaatttacaatatcagaacatacacggatcaatttctttatcgccctttacctagcaaacaccgtggaagaggatgaggaggagacaaagtacgagatattcccttgggccctgggaaaaaactggcgcaagctgtttccaaacttcctaaaactgcgcgaccaattatgggatcgaattgattacagagcaatagtatcccgccgttgttgtgaggaagtcatggccatagctccaacacactatatctggcagcgggaaaggtcagtccaccactctggcgcagtccggaattataaccgagatgaagtacagctccctagaggcccatcagctacaccggtggattgttctctctgtgggaagaaacggaggtacgttaggctgggcctatcaagcagttctagtcttagctcccatacggcgggtgttacagagaagcactctcaggactcttacaattccctgagcatggatatcatcggcgacccgtcacaggcatacactgggtccgaagttgtcaatgatcaccagtccaataagggcaaaaaaacgaattttctcaagaaagataagtctatggaatggtttaccgggtccgaggaatag

SEQ ID NO: 242113 - DNA, 942 bp, synthetic construct
  misc_feature 1..942: note = Description of Artificial Sequence: Synthetic coding sequence
  source 1..942: mol_type = other DNA
atgcgacacaaccagatgtgttgtgagacgccacccactgtgaccgtgtacgtgaaatctggaagtaaccgctcacaccagcccaaaaagcctataaccctgaaacgcccaatctgtaaggacaattggcaggccttcgaaaagaacactcacaataacaataagtctaagagacctaagggcccatgcctggtcatccagagacaggacatgacagctttcttcaaactcttcgacgatgacttgattcaggatttcttgtggatggactgctgttgtaaaatcgcagataaatacctgcttgcaatgacatttgtgtactttaaacgcgcaaagttcaccatcagcgaacacacccggattaatttcttcattgccctctatttggccaataccgttgaagaggacgaggaggaaaccaagtatgaaatttttccctgggccctagggaaaaattggagaaagctcttccccaattttttaaagctccgggaccaactgtgggataggatagactaccgggctatagtgtctaggaggtgttgcgaggaggttatggctattgccccaacccactacatctggcagcgtgagaggtccgtgcatcactctggggctgtgcgtaattacaacagagacgaagttcagctccctaggggcccaagtgctacgccagtggattgttcgctgtgcggaaaaaagagaagatatgtgcgacttggcctcagctcatccagcagccttagcagccatacagccggagtcaccgaaaaacattcccaagactcttataactccctgtccatggatattataggggaccctagccaagcttacactggatcggaagtggtgaacgatcaccagagcaataaggggaaaaagaccaattttctgaagaaagataagagcatggaatggttcacagggtcagaagaatag

SEQ ID NO: 242114 - DNA, 384 bp, synthetic construct
  misc_feature 1..384: note = Description of Artificial Sequence: Synthetic coding sequence
  source 1..384: mol_type = other DNA
atgaggcacaatcagatgtgttgcgagacccctcctaccgttacagtttacgttaaatctggatcaaatcgaagtcatcagcccaaaaaacccattacattaaagcgtccgatttgcaaagataactggcaggcgttcgaaaaaaacacacacaataacaacaagagcaagcgccctaagggcccttgtctggtgattcagcgacaggatatgaccgcttttttcaaactctttgacgacgacctcatccaggattttttatggatggactgttgttgtaagatagctgacaaatatctcctcgccatgacatttgtgtatttcaagcgggctaaattcaccatttcagagcacacccggatcaattttttcatcgcgctctag

SEQ ID NO: 242115 - DNA, 882 bp, synthetic construct
  misc_feature 1..882: note = Description of Artificial Sequence: Synthetic coding sequence
  source 1..882: mol_type = other DNA
atgctatgggccatccctgagctaggcagcccgtgcccaatttcaattagttacgagatgtctgattcacaagatcctaccactagtcctgtagtgaccacccaggtggagctcgggggatgcagtagacaggggggaggcaacggatttctgagatttagacaacaccaggaggtccaagctttcttgagcctactggaggattctttcgtacaggagttcttgtccaaggatccttgtttccagatctctgacaagtacttgttggctatggttcttgtgtactttcagcgcgctcatctgaaattatcggagtacactcacagctccctcttcctggccctctacttagccaacgacatggaggaagatctggaggggccaaagtgtgaaatcttcccatgggcgctgggcaaagactggtgtctaagggtggggaagttccttcatcagcgggacaagctgtgggcccgaatgggcttccgggcagtagtgtctcggcagtgttgcgaagaagtgatggcaaaggagcccttccactgggcatggaccagggaccgtagacctcaccatgggggagtgcaacgcgtctgccctcaagtgcctgttagacttccacgaggacccggtctcagcccccctcattgctcgccatgcggcctgccgcagcactgttcatcccatcttctgaagcctgttagttccaagtgcccctctttgacctccgagtgtcataggcccccaagccaaaattacctctcgagggttaagaatgcctggggaggggacttcctcatcgtgttacctcctcagatgcaattggagccgggaacttattccctgcgcatatttcccaagcctcccgcacgtcccggtcattag

SEQ ID NO: 242116 - DNA, 1122 bp, synthetic construct
  misc_feature 1..1122: note = Description of Artificial Sequence: Synthetic coding sequence
  source 1..1122: mol_type = other DNA
atgaatgtcgataagttccttatagtttgctatttgaaaaaagaggtgtggggctttgaatcatactccctgagcggcacgacatgcttccaatggaattatttcgtctggagtctgaggttcttttttagttgtggatcaagtaaataccacctcactccgctgcctattaagaaggtggactacccacataagagaggacaaaattggggtagctatgtccacaacagcctaccaagatttaattgggattaccgaagttgttttcatacctggaagcgcgctagcgataaccgggagagggcatatgagcacagcgcttatggacatcatgaaagagggacaggcggttttgaccggacccgacattacgaccaggactactatagggacccgcgtgagaggaccttgcagcatggactgtactatgcttcacgatctcggagtcctaatcgcttcgacgctcatgaccctcggtacgagcccagggccagagagcagttcacacttccctccgtcgtgcatcgggatatctatagagatgatattacaagagaagtaagaggcagacgcccagaaaggaattaccagcatagcagatctcggtctccgcattccagtcagtctagaaaccagtccccccagcgccttgcttctcaggccagtagaccgaccaggtccccttctgggagcggttcacggtcccgatcttccagtagcgattcgatctcttcaagcagcagcacctcttccgactctagcgatagctcctcctcttcctccgatgactcccctgccaggtcagttcagagcgctgctgtgcccgcacccacatctcagctgctatccagcctggagaaggatgaaccccgaaaaagcttcggcattaaagtccagaatctccctgttcggagtactgacaccagcctaaaagacggtttgtttcacgaattcaaaaaattcggtaaagtgacgtctgtgcagatccacggtacaagcgaagagagatatggcctcgtcttttttaggcagcaggaggaccaagagaaggccttgactgcttcaaaggggaagctattcttcggaatgcagattgaggtcacggcttggattggcccatag

SEQ ID NO: 242117 - DNA, 10995 bp, synthetic construct
  misc_feature 1..10995: note = Description of Artificial Sequence: Synthetic coding sequence
  source 1..10995: mol_type = other DNA
atggtacgggagactagacacctgtgggtaggtaatctgccagagaatgtgcgggaggagaagatcatcgagcacttcaaacggtacggacgcgttgagtcagtgaagatcttaccaaagcgtgggtctgagggcggagtagctgcgtttgtggatttcgtagacatcaaatccgctcagaaagcccataactccgttaataaaatgggagatcgggacctgcgaaccgactacaacgagcccggtaccattccctcagccgctcgcggactagatgataccgtgtcaattgcctcccgctcccgcgaggtcagcggatttcgaggcggaggcggtgggcctgcctacggtcctccacctagtctgcatgccagggaggggaggtacgagcgcaggctagatggggcatccgataatcgggagcgcgcttatgagcatagcgcgtacggacaccacgagaggggtaccggcggtttcgaccgaacccggcactacgaccaggattattatcgagacccgagggaaaggacactacagcacggactctattatgcttctcgcagccgctctccaaaccgctttgacgcgcatgaccccaggtacgagcctcgagctcgggagcagttcactcttccaagtgttgtgcatagagacatttatcgtgatgatatcacacgagaggtgagaggccgtcggccagaacgtaactaccagcactcccgtagtcgcagtccccatagctcccaaagccgtaaccagagtccccagagactggcatctcaagcctctcgtcccacccgtagccccagtgggtcagggtccagatcaaggagcagtagcagcgacagtatctccagcagctcaagtaccagtagcgattcctccgattcatccagtagttcctctgacgactctcctgctaggtccgtgcaatctgccgcagttccggctccaacctctcagctcctgagctcgctggaaaaagacgaacctagaaagtcttttgggatcaaagtccaaaacttacccgtgagaagtaccgacactagccttaaagatgggttattccatgagtttaagaagtttggtaaggttactagtgtgcagattcacggaacctccgaggaaaggtacggtttagtgttttttaggcagcaggaagaccaggagaaagcactcaccgctagcaagggtaagctgttcttcggaatgcagattgaggtgaccgcctggattgggcctgagacagagtctgagaatgaattcagacccctggatgaacgtatagacgagttccacccaaaagcaacaaggaccctttttatcgggaatctggaaaaaacgactacataccacgatttgcgcaatattttccagcgtttcggtgagattgtggacatcgatatcaaaaaagtcaatggagtgcctcagtacgcctttctccaatattgcgatatcgcctctgtctgcaaggcgataaagaaaatggatggcgaatatctcggtaataatcgcttgaagttgggattcggaaaaagtatgcctaccaactgcgtgtggctggacggactcagtagcaacgtctccgaccagtacctcacccgacacttctgcaggtatggacccgttgttaaggtggtctttgaccgcctaaaaggcatggccctggtgctgtacaacgagattgaatacgcgcaggccgcagtcaaagaaacaaaagggaggaagatcggcggtaacaagattaaggtggactttgctaatcgcgaatctcagcttgccttttaccactgtatggaaaaaagtggccaggatataagggatttctatgaaatgcttgcggaaaggcgcgaggagcgaagggcttcctatgattacaatcaggatcggacgtactacgaaagcgtgcgtacccctggcacgtaccctgaggattccaggagagattacccagccagggggcgtgagttttactcagagtgggaaacttaccaaggcgattattatgagtctcggtattatgacgatccacgcgaataccgggactaccgcaacgacccatacgagcaggatatcagggagtattcctaccgacagagggagagagaacgggagcgcgaaaggtttgaatctgatcgagatagggaccacgaaaggcgtcccatcgaacggtcccagagccccgtacacctgaggcgaccgcagtccccaggggctagcccaagtcaggccgagagactgccaagcgattctgagcgaaggctctacagtaggtccagtgaccggagcggcagctgttccagtttgtccccccctcgctatgagaagctggacaaaagccggcttgaacgatatacaaaaaacgaaaaaacagataaggaaagaactttcgaccccgaacgtgtcgaaagggaacgtaggctgatcagaaaggaaaaggtggagaaggacaagacagataagcaaaagagaaaggggaaagtgcactccccttcgagtcaaagttccgagaccgatcaggaaaacgaacgcgagcagagcccagagaagccaagatcctgtaataagctgtcaagagagaaggcagacaaggagggcattgccaaaaatcgcctggaactaatgccttgtgtcgtactgacccgcgtgaaagagaaggagggcaaggtcatagatcataccccagttgagaaactgaaagctaagttagacaacgataccgtaaaatcttcagctcttgatcaaaagttacaggttagccagaccgaaccagctaagtcagatctttcaaaactggaaagcgtcagaatgaaggtgccaaaagaaaagggtctgtcctcacatgtggaggtggtggaaaaggagggacgactgaaggccaggaaacacctcaaacctgaacagcccgcagacggcgtatccgccgtcgatctggagaaactcgaggccagaaagcgtaggtttgccgactctaacttgaaagcggagaaacagaagccggaagttaaaaagtcaagtcctgagatggaagatgctcgggtactcagcaagaagcagccagacgtgagtagtagagaggttatcctgctgcgcgagggggaagcagagaggaagcccgtgagaaaagaaattctcaagagagaatccaaaaagattaagctggatcggctaaataccgtcgcttcccctaaagattgtcaagaactggcctccatttccgtcgggtcagggtctaggccttcaagcgacctgcaagccaggctgggtgagttagcaggagagagtgtcgagaatcaggaggtccagagcaagaaaccaattccgagtaaaccccagttgaaacagctgcaggttcttgacgaccagggccctgagcgagaggatgttcgcaaaaactattgttcattgcgcgacgaaacaccagagcgcaagtctgggcaggagaagtcccattcagttaatacggaggagaaaattggaatcgatatcgatcacacgcagagctaccggaaacagatggagcagagccggagaaaacagcagatggaaatggagattgcgaagtccgaaaaattcgggagtccaaagaaagacgtggacgagtatgagaggcggagcctcgtgcatgaggtcggtaagcccccacaggacgtgaccgatgacagcccgccatccaagaaaaagcggatggatcacgtggactttgacatctgcaccaaacgagaacgaaattacagatcctctcgacagataagcgaggatagcgagcggaccggtgggtctccgagcgtacgtcacggcagtttccacgaagatgaagatcccatcggatcccctagactcctttccgtgaaaggctctccaaaagtcgacgaaaaggtcctcccatactccaatattaccgtccgggaggaaagcctcaagttcaacccctacgactcaagccgaagagagcagatggccgacatggccaaaattaagctgtcagttcttaactctgaggatgagctgaatcggtgggattcccagatgaagcaggatgctggcagattcgacgtgagctttcccaatagcataattaagagagatagcctgaggaagaggtctgttcgcgatttggaaccaggggaggtgccctctgatagcgatgaagacggagagcacaagtcacattcacccagagcctcagctctgtacgagtccagcaggctgagcttcctgttaagggacagagaagacaaacttcgggagagagatgagaggctgagttcctctttggagcgcaataagttttattcgttcgctcttgataaaaccattaccccagataccaaagctctgctagaaagagctaagagcctgagctcctcccgggaggagaactggtcattcttggattgggacagccgttttgcgaactttcggaacaataaagacaaggaaaaggtggactccgctcccagaccaataccctcatggtatatgaagaaaaaaaagattcgaacagattctgaggggaagatggatgataagaaggaggaccacaaggaggaagaacaggagagacaggaactctttgccagtagatttctccacagcagcatatttgagcaagactcaaaacgtctacaacatcttgaacgtaaggaagaggactctgattttatatctggcagaatctacggcaagcagacttccgaaggagcaaacagcactaccgactccatccaggagcctgtggtgttgttccattctaggtttatggagttaaccagaatgcagcagaaagagaaggaaaaagatcagaaacccaaagaagttgaaaagcaggaggacaccgaaaaccaccccaagactccagaaagcgccccagagaataaagattctgagctgaaaactcccccatctgtgggcccaccgtcagttacagtagtgacgctggagtccgccccatctgccttagagaagacaactggtgacaagactgtcgaggctcccctggtgactgaagagaaaaccgtcgagccagccactgtctcagaagaggcgaagcctgctagcgagcctgctccggctcctgtggaacaactcgagcaggtggacttgcccccaggggcagaccctgacaaagaggcagcaatgatgccggcaggcgtggaggaaggctcaagcggggatcaaccgccatatctggatgcaaagccccctacaccaggtgcctcattcagccaagccgagtcaaacgttgatccagagccggatagcacgcagcctcttagcaagcctgcccagaaatccgaggaggccaatgaaccaaaggccgagaaaccagacgccaccgccgatgctgaacccgatgccaaccaaaaagccgaggccgctcccgagagtcagcccccagcctcagaggacctcgaggtggaccccccagtggctgctaaagataaaaaaccaaacaaaagcaagcggtctaagaccccggtgcaggcagccgcagtatcaatcgtcgaaaaacccgtgacgcgaaaatcggaacgcattgaccgcgagaaactcaagaggagtaactcccctcggggagaggcccagaagctattagagctcaaaatggaggcggagaagataacaagaaccgctagtaaaaattcagccgcagacttggagcatcctgagcccagtctacctttatcccgcactaggagacgaaatgtgagaagcgtttatgccacaatgggagaccacgagaaccgaagccccgtcaaggagcccgtggagcagccacgagtcacacggaaaagactcgagcgagagctccaggaggctgctgcagtccctacaacccctcgcagaggacggccacctaaaactagaagaagggccgatgaggaagaagaaaatgaagccaaagagcccgcagaaactttgaagccccctgaaggctggagaagcccaaggagccagaagactgccgcaggtggagggccacaaggtaagaagggtaagaacgaaccgaaggtggatgcgacacgtcccgaagccacaacggaagtaggtccacaaatcggcgtcaaagaatccagtatggaacccaaggcagccgaagaagaggctgggtcagaacagaaacgagatagaaaggatgcaggcacagacaaaaacccgcctgagacagctcctgtagaagttgtggagaaaaaaccagctcccgagaaaaattcgaagtccaaacgaggacgctctagaaacagtcgcttagcggttgataaatctgcctccttgaagaacgtcgacgccgctgtgtcacctaggggagccgcagcacaggctggggagcgggaaagcggcgtagtcgccgtatctccagaaaagtccgaatcacctcaaaaggaagatgggctgtcatctcaattaaagtcagaccctgtggatcctgataaggaacccgagaaggaagacgtctccgcttctgggccatctccagaggcgacccaacttgccaaacagatggagttagaacaggccgtcgagcatatagcgaagctcgccgaagcctcagccagcgcagcctacaaggcggacgctcctgaaggcctggcccctgaggatcgggataagcctgcccatcaggcctccgaaactgaactggccgctgctatcggaagcatcatcaatgacatttccggtgagccagaaaacttcccagcccctccgccatacccaggggagtcccaaactgaccttcagccgcctgctggggctcaggcacttcagcctagcgaagagggaatggagacggatgaagccgtaagcgggatactggagacggaagcggcaacggaatcttcacgcccacccgtgaatgcccctgaccctagtgcgggtcccacagacaccaaagaggctcgcggaaatagttccgaaactagtcactccgtgccggaggcgaaaggatctaaggaggttgaggtcaccttggtacgcaaagacaaaggcaggcagaaaactactcggagccggaggaagcgtaatacaaataagaaggtggtcgctcctgtagaatcacacgttccagagagtaaccaggcccagggggaatcaccggcagccaatgaaggcacaactgtccagcatccagaggccccacaggaggagaaacagtctgaaaaaccacacagcactccgcctcagtcttgtacttctgatttgtctaagataccgagcacagagaattcatctcaggagattagtgtcgaggaacggacaccgacaaaggcctctgtgcctcccgatctgccacctcccccacagcctgccccagtcgacgaagagccgcaggcacggttcagggtgcatagtattattgaaagcgatccggtcacgccaccgtccgatccaagtatccccattcccaccctcccctccgtcactgctgccaagcttagccctcccgtggcaagcgggggaatccctcatcaatccccacccacgaaagtgaccgagtggattaccaggcaggaggagccacgagctcagtccacgccttccccggctctgccacctgataccaaagcctctgatgtcgacacaagctccagcacactcagaaagatcctcatggaccctaaatatgtgtcggccacaagtgtgacttcaactagcgttaccaccgcaattgcggagcctgttagtgccgctccatgcctgcatgaagcgcctccaccgccagttgatagtaagaaacctctcgaggaaaaaacagctcctccggtgactaataactccgagatccaggctagcgaggttctggtggctgctgacaaagagaaggtcgctcccgtgattgcccctaagattacctcagtcatcagcagaatgcccgtgtccattgatctagaaaattcgcagaagatcacactcgctaaaccggctccacaaactctgacagggctcgtttccgctctcacgggcctggtaaacgtcagtttggtacctgtgaacgccttgaaaggccctgtgaaaggttctgtcacaactctgaaatctctggttagcactcccgctggccctgttaacgtgcttaagggcccagtcaatgtactgacagggccagtcaacgtcctgactactccagtgaatgctaccgttggcactgttaatgccgcaccgggaacggtaaacgccgctgccagtgccgtgaacgcaaccgcatcagcagtgaccgttaccgcgggagctgtgactgcagccagtggaggagtgaccgctactactggcacggtgaccatggccggagccgtgattgctcccagcacgaaatgtaagcagcgcgcatcagctaatgaaaacagcagattccacccgggatcgatgccggttatcgacgaccgcccagcagatgctggatccggagccggactgcgcgtcaacacctccgagggcgtagttctattatcctattccggtcagaagacggaggggccacaaaggatctccgccaagataagccagatcccgccagcgagcgccatggacatagagtttcagcagagcgtgagtaaaagccaagtcaagcccgatagcgtcacagcaagccaacctcctagcaagggtccgcaagctcctgccggttatgccaatgtggcgacccactccactctggtcctcaccgcccagacttataacgcatctccggtcatttcctcagtgaaagcagatcgcccttccctcgaaaagccagaacctattcacctctccgtttccactcccgttacccagggcggaaccgttaaagttctcacccaggggattaatactccgcctgtgctggtccataaccagctagtgcttacccccagcatcgtgacaacaaacaagaagcttgctgatccggtgactctgaagatcgagacaaaggtcttgcagcccgctaacctgggctcaaccctgaccccccatcaccctcctgctctcccctcaaagctccccaccgaagtgaatcacgtgcccagcggcccaagcattcctgccgaccgcacggttagccatctggcagcggctaagctggatgctcattccccccgaccctctggcccaggcccatcaagctttcctcgggcttcgcacccttcttccactgccagcaccgccctgagcacgaacgccacggtgatgctcgccgcaggtattccagtcccacagttcatcagtagcatccatccagagcagtctgtgattatgcccccacactcgatcacccaaaccgtaagcctttcgcacctttctcagggggaagtgagaatgaatacaccgaccctgccatcaatcacttattcgattagacctgaggctctccactcacctagagcaccgctccagccgcagcagatcgaggttagagccccacagagagccagcaccccgcagcctgctcctgctggcgtcccggctctcgcatcacagcacccacccgaagaagaagtgcattatcacctacctgtggcgagagccacggcgcctgttcagtccgaagtcctggttatgcagtccgagtaccgactgcatccatacaccgtcccacgagatgtccggatcatggtgcatcctcacgttaccgctgtctccgaacaaccccgagcggcagacggggtcgtcaaggtgccccctgcttcaaaggcccctcagcagcccggaaaggaggccgctaagacaccagacgccaaggcagcgcctactccaacgccggctccagtaccagtccccgtgccactgcccgctcctgccccagccccacacggcgaggctagaattctgaccgttacaccgtccaatcaactccagggcctgcccctcacgcccccagtcgtggttactcatggtgtgcaaattgtgcactcgagcggagaattattccaggaataccggtacggggatatccggacctaccacccgccagcacaattgacacacacacaattccccgcagcaagttcagtggggttgccttctaggactaaaactgccgcacaggggccaccccctgagggcgagccattacagcctccccagccagttcagtctactcagccggctcagccagctccaccatgccctccctcacagttgggccagcctggacagcccccttcttctaagatgcctcaagtctcccaggaagccaagggaactcagactggggtggaacagcctcggttacccgcagggcctgcaaatcgacctcctgaacctcacacacaggttcagcgagcgcaggcggaaactggcccaacgagcttcccgtcgccagtctctgtaagtatgaagccggacttgcctgttagcttgcccacccagacagcaccgaagcagcccttgttcgtgccaactacctctgggcctagcaccccacctggtctggttctgcctcataccgagttccagcccgcacccaaacaggattcctccccacatttgacgtcacagaggcccgttgatatggtccagctgttgaaaaagtatcctatcgtctggcaaggattactggctctcaagaacgacaccgccgcagtgcagctccactttgtgtctgggaacaatgtgttggctcaccggagtctgccacttagcgagggcggacctccattgcgtatcgcacagaggatgcggctggaggccacccagttggaaggggtggccagacgcatgacagtcgagacagactattgtctgcttctggccctgccatgtggaagggaccaggaggatgtggtgtcacaaacagaaagtttgaaggctgccttcataacctacctgcaggctaagcaggccgctggtatcattaatgttcccaatccaggttctaaccagcccgcatacgtcctgcagatttttccaccctgcgaattctccgagtcacatctttcccggctggctcctgacctgctggcttcgatcagcaatatctctcctcatctaatgatcgtgatcgcgtctgtttaa

SEQ ID NO: 242118 - DNA, 1122 bp, synthetic construct
  misc_feature 1..1122: note = Description of Artificial Sequence: Synthetic coding sequence
  source 1..1122: mol_type = other DNA
atgaacgtagataaatttctcatcgtttgctacctgaagaaagaggtgtggggatttgaatcctattccttatccggcacaacctgcttccagtggaattactttgtatggagtctgcgcttctttttttcttgtggatcatcaaaataccacctcacccccctccccatcaagaaggttgattatccacacaaacgcggacagaactggggctcctacgtacataactctcttcctaggttcaactgggattatcggtcctgtttccacacttggaaacgcgcatctgacaacagagaacgggcatacgaacactcagcatatgggcaccatgaacggggaactggaggatttgacagaactcgtcactacgaccaggactactatagggaccccagagagcgaactctacaacatggcctgtactacgctagccggagtcggtcccccaaccgattcgacgcccacgatcctaggtacgagcccagagctcgcgagcaattcactctcccatccgtcgtccacagagatatataccgtgatgacatcacacgggaagtgcgaggaagacgacccgaacggaattaccagcatagccggagcaggtcaccacatagctcacagagtaggaaccagtccccacagaggcttgctagccaagcctctagacctacgagatctccatccggtagtggtagtcggtcgcgctcctcctcatccgactccatcagttcaagctcatctacgagtagcgatagcagtgattccagtagtagtagttccgacgattctccagctcggtctgtgcagtcggccgcagttcctgcgcctacttcacagctcctgtcaagcctggagaaagacgaaccaagaaaatccttcggaattaaagtgcaaaacttacctgtgaggtcgaccgatacctctctgaaggatggcctgtttcacgaatttaaaaagttcggcaaagtcactagcgtgcaaatccatggtacaagtgaagagcgatacggcctggtcttttttaggcagcaggaagatcaggaaaaggcacttaccgccagcaagggcaaactgttttttggcatgcagattgaggtgaccgcctggattggtccgtag

SEQ ID NO: 242119 - DNA, 894 bp, synthetic construct
  misc_feature 1..894: note = Description of Artificial Sequence: Synthetic coding sequence
  source 1..894: mol_type = other DNA
tagcaggcctcccgacctactagaagcccaagcggcagcgggtctcgttcccgatcctcatcctctgatagcatctcctcatcaagcagtacatcctcagatagtgactcttccagtagcagtagcgacgattcgccagctcgctctgtccaatctgccgctgtgccagctcctacatctcagctccttagctcccttgagaaggacgagccgaggaagtcttttggaatcaaggtgcaaaacttgcctgtgcgcagcactgacacttccctgaaggacggactgtttcatgagtttaagaagtttggtaaggtaacatcagttcaaatccacggaacctcagaggagaggtacggcttagtcttctttcggcagcaggaggaccaggagaaggctttgaccgccagtaaaggtaagctgttcttcggtatgcagatagaggttaccgcctggataggtcccgagactgaatcagaaaacgagtttagaccactggatgaacggatagacgagtttcaccccaaagccaccagaacgctattcatcgggaacctggagaaaacaacaacataccacgatcttaggaatatatttcagcggttcggggaaattgtggatatcgatataaaaaaggtaaatggggtacctcagtacgcgtttttgcagtactgcgatatcgcaagcgtctgtaaagccataaagaagatggacggggagtacctcgggaataatcgactcaagctcggcttcgggaaatctatgcctactaattgtgtttggctggatgggctgtcgagtaatgtttctgatcagtatctgacacggcacttttgtagatatggcccagtggttaaagtagtgttcgatagacttaagggaatggccctggtatag

SEQ ID NO: 242120 - DNA, 885 bp, synthetic construct
  misc_feature 1..885: note = Description of Artificial Sequence: Synthetic coding sequence
  source 1..885: mol_type = other DNA
atgagtccacggggaaccggttgcagcgctgggttgctgatgactgtgggctggctcttactcgccggattgcaatccgccagaggtactaacgtcactgctgctgtgcaggacgccggtttggctcatgaaggcgagggggaagaggaaaccgaaaataacgattccgagaccgctgagaactatgccccaccagagaccgaagatgtgtcaaaccgaaatgtggtgaaggaggttgaattcggcatgtgtacggtgacctgcggtattggtgtacgggaggtcatcttaactaatggctgtcccggaggcgaaagcaagtgcgtagtgcgggtagaggaatgccgcggaccgacagactgtggttggggcaagccgatttcggagagcctggagtcggtcaggcttgcttgcattcacacgtcacccctgaacagattcaagtacatgtggaagctgctcaggcaggatcaacagagtatcatcctggtaaacgatagcgccattctggaggttagaaaagagtctcatccattggctttcgagtgtgataccctggacaacaacgaaatcgtggcaacaataaaattcaccgtgtacaccagctccgagcttcagatgaggcgttcaagtctgccagcaactgacgccgctcttatttttgtactgacgatcggagtcatcatctgtgtctttatcatcttcctccttatatttataattatcaattgggctgctgtgaaagccttttggggggcaaaagctagcactcctgaagtgcagtcagaacagtcttccgttagatacaaggattcaacttcattagatcagttaccaaccgagatgcctggagaagacgatgcactgtctgagtggaacgagtag

SEQ ID NO: 242121 - DNA, 648 bp, synthetic construct
  misc_feature 1..648: note = Description of Artificial Sequence: Synthetic coding sequence
  source 1..648: mol_type = other DNA
atggtttccgcactaaggggggctcccctcattcgagtgcatagctcacctgtttcttctcctagtgttagcggtccccgtagactcgtgtcatgcctgtcctcacagtccagcgccctgagccaatctggtggaggctcaacttcagccgcagggatcgaggctcgcagcagggcgctgaggagacgatggtgtccagccggaatcatgctgctagccctggtgtgtctgctgtcctgtcttcttccatcatctgaagccaaactatacgggagatgtgaacttgctcgcgttctgcacgatttcggactggacggctacagaggctattcactggcggactgggtgtgccttgcctatttcacttctggatttaatgcggctgccctggactacgaagcagatggctccacaaacaatggcatctttcagattaatagcaggagatggtgctccaatttaacacccaatgtgccgaacgtttgtagaatgtactgttctgaccttctaaatccgaacttgaaggacactgtaatctgcgctatgaagattacacaggagccacagggtctgggctattgggaggcatggagacaccactgtcagggcaaggatttgacagaatgggtcgacgggtgtgacttctag

SEQ ID NO: 242122 - DNA, 627 bp, synthetic construct
  misc_feature 1..627: note = Description of Artificial Sequence: Synthetic coding sequence
  source 1..627: mol_type = other DNA
atgattcaggaagatcacgagggaagtcaagatggcggagttcatagctctcccgtgtcttcacccagcgtttccggacctagaaggcttgtgagctgcctgagttcgcagtctagcgctctaagtcagagcggcggagggtccactagcgccgctggcattgaggccaggtccagagcactgcgacgaagatggtgtcctgcgggaataatgctattagcactagtttgcctgctgtcgtgcctgctgcctagtagcgaagccaagttgtacggaagatgcgagctggcgagggtgcttcacgacttcgggctggacgggtatcgcggttatagtctggccgattgggtttgtcttgcatacttcacttccggttttaatgcagccgctctggattatgaggccgatggtagcacaaacaatgggatttttcaaattaacagtaggagatggtgttctaacctgacccccaatgttcctaacgtgtgccggatgtattgctccgatctgctgaatcctaacttaaaggatacggtcatctgcgcgatgaagattacccaggaaccacagggacttggctactgggaggcctggagacaccactgtcagggaaaagacctgacctag

SEQ ID NO: 242123 - DNA, 339 bp, synthetic construct
  misc_feature 1..339: note = Description of Artificial Sequence: Synthetic coding sequence
  source 1..339: mol_type = other DNA
atggtttccgcactcagaggggctccactgattcgcgtctgcctcgcctactttacctccgggttcaacgccgctgccctggactacgaagctgatgggagcacaaataacgggattttccagataaatagccggaggtggtgctcaaatttgacacctaatgtacctaacgtgtgccgcatgtattgctctgacctgctgaatcctaacctgaaagacacagtgatctgtgctatgaagatcacccaggagccacaaggactgggctactgggaggcctggagacaccactgtcagggcaaggacctgacggaatgggtggatggatgcgacttctag

SEQ ID NO: 242124 - DNA, 372 bp, synthetic construct
  misc_feature 1..372: note = Description of Artificial Sequence: Synthetic coding sequence
  source 1..372: mol_type = other DNA
atgacaagcgggtggaccgatacaggcgacactgcctggctgaccgcctatgcgctcccttacgctggagtgtgtctcgcttattttaccagcgggttcaacgccgcagctctcgactatgaagcagacggctctaccaacaacgggattttccagatcaattcccgccgttggtgtagtaaccttactccaaacgttcctaatgtgtgccgtatgtattgctcagaccttctcaaccccaacctgaaggatacagtgatctgcgccatgaagatcacccaggagccacagggcctcggttattgggaggcgtggcgacaccactgccagggaaaagacttgacggaatgggtagatggatgcgacttttag

SEQ ID NO: 242125 - DNA, 375 bp, synthetic construct
  misc_feature 1..375: note = Description of Artificial Sequence: Synthetic coding sequence
  source 1..375: mol_type = other DNA
atggtgctctgttggttacttctcctggtgatggctctccctccaggaacgaccggcgttaaagattgcgtcttttgcgagctaacggacagcatgcagtgcccaggtacatatatgcattgtggcgatgatgaggactgcttcaccgggcacggagtcgcaccaggcacgggccctgttatcaataagggctgcttgcgggcaaccagctgtggactcgaagaaccggtgagctacagaggcgtgacatactcgcttactacaaattgctgcacagggcgattgtgcaatcgggctccttccagccagacagtaggggctacaacttctttggctctgggcctggggatgctactgccaccaagattactgtag

SEQ ID NO: 242126 - DNA, 480 bp, synthetic construct
  misc_feature 1..480: note = Description of Artificial Sequence: Synthetic coding sequence
  source 1..480: mol_type = other DNA
atgaaggcctgggggacagttgtggttacgttggcaacattaatggtggtgactgtagacgctaagatctacgagcgatgcgaactggccgcaaggctagagcgggctgggctaaacggttacaaaggctacggcgtgggagactggttgtgtatggctcactatgagtcaggctttgatacagccttcgttgaccataatccagacggatcatcagagtatggtattttccagctgaatagcgcctggtggtgtgacaatggtattacacctacgaaaaacctgtgccacatggattgtcatgacctactaaaccggcatatcctggacgacatccgatgcgcgaaacagattgtttcctcccagaatggcttgagtgcgtggaccagctggagactacattgcagtggtcacgacctcagcgagtggcttaagggctgcgatatgcatgttaagattgatcctaaaattcacccctag

SEQ ID NO: 242127 - DNA, 480 bp, synthetic construct
  misc_feature 1..480: note = Description of Artificial Sequence: Synthetic coding sequence
  source 1..480: mol_type = other DNA
atgaaggcctggggaactgtggtggtaacattagcaaccctcatggttgtgacagtcgacgccaagatttacgaacgttgtgagttagccgcaagactggagcgcgcaggcctgaacgggtataaagggtacggcgtgggcgattggctctgcatggcacactacgaaagtggctttgacaccgcattcgtggatcacaatcctgacggctcttcagaatatggcatttttcagcttaactcagcctggtggtgcgacaacgggattactcctacgaaaaacttgtgtcacatggattgccatgacctgctcaatagacacatcctggatgatatccgatgcgcaaagcagattgtgtccagccagaacggactgagcgcctggacttcatggagactccattgctccggtcacgacctctcggagtggttaaaagggtgcgacatgcacgtgaaaatcgatcccaagatccatccatag

SEQ ID NO: 242128 - DNA, 3207 bp, synthetic construct
  misc_feature 1..3207: note = Description of Artificial Sequence: Synthetic coding sequence
  source 1..3207: mol_type = other DNA
atgaggtccgcagcgaaaccctggaacccggcaatccgcgctggaggacacgggcctgatcgggtccggcctctccctgccgctagctccggcatgaaatcatccaagagtagcacatctttggcctttgaatcaaggcttagtcgcctgaagcgagcgagtagtgaagacaccctgaataaaccgggttccacagccgcttccggagtggtacggttaaagaaaacagccaccgcgggagctattagtgaactgactgagtcacgtctccggagcggaacaggggcttttacgacaaccaagcgaaccgggatcccagccccaagggaattctctgtcactgttagcagagaaaggtccgttcctagaggtccctcaaacccaagaaagagcgtcagctccccaacctcatccaacacgcccactcctactaaacatctccgtacgccaagcacaaagccaaaacaggagaacgaaggcggtgaaaaggctgcactggaatcccaggtccgggagctgttggccgaggcaaaagctaaagactccgaaatcaaccgtctgcggtcagagctcaagaagtacaaagaaaaacgcactctgaacgccgaaggcacagatgcactcggccctaacgtggatggcacttcagtctcccccggagacactgagcctatgatcagggcgcttgaggagaaaaacaaaaatttccagaaggagctctctgatctggaggaggaaaaccgggtgctcaaggaaaaactcatctaccttgagcatagccccaattctgagggggcagcctcccatactggtgatagtagctgtcccacgtccattactcaggagtctagctttggttccccaaccggcaatcagatgtcgagcgatatagatgaatacaagaagaatatccatggtaatgccttacggaccagcgggtcctcctcaagcgacgtgactaaagcttccttatcacctgatgcatctgactttgagcatatcaccgccgaaaccccttcacgcccattgtcttccacctcgaacccctttaaatcatctaaatgttccaccgcagggtccagccccaacagcgtgagtgagctgagcctcgcctcacttactgagaagattcagaaaatggaagaaaatcaccactcaacagccgaggagctacaagccactctgcaggagctaagcgatcagcagcagatggtgcaggaacttacggctgagaatgagaagctggttgatgaaaagaccatcctcgagacctcttttcaccaacaccgggagcgcgctgagcaactgtcccaggagaacgagaaactcatgaatcttctgcaggagagagtaaagaatgaagagcccacgacacaggagggaaagattatcgaactagagcagaagtgcaccgggattttggaacaaggcagatttgaacgggaaaaactattaaacatccagcagcagctgacctgctctctgaggaaagtggaagaggagaatcagggagctctggagatgattaagcgcctgaaagaggagaacgagaaactaaacgaatttctggagttggagcgccacaacaataatatgatggctaagacgctggaggaatgccgcgttactctggagggacttaaaatggagaacggatcgcttaagtcacacttacaaggggaaaagcaaaaagctactgaagctagtgccgttgaacagactgcagaatcgtgtgaggttcaggaaatgcttaaagtggccagggcagagaaggatctcctcgaacttagctgcaatgagcttaggcaggagctgctaaaagccaacggcgaaataaaacacgtgagttcccttcttgccaaagtcgaaaaagactattcttacctcaaagagatttgcgatcaccaggctgagcaattgagtagaaccagtctgaaactgcaggaaaaggcatcagaaagcgacgcagagatcaaggacatgaaagagactatcttcgagttagaagaccaagtggagcagcaccgcgcagtgaagctgcataacaaccagcttatcagcgagctggagtctagcgtgattaagctagaggagcagaaatcagacctcgagaggcaattgaagaccctcaccaagcagatgaaggaggaaaccgaggaatggcgccgttttcaggcagacctccagacagcagtagtcgtagctaatgatattaaatgtgaggctcaacaggaacttcgaacagtgaagcgaaagctattggaagaggaagagaagaacgctagactccagaaagagctcggcgacgtgcaggggcacgggagagtagtgacttcacgagccgctccacccccagtggatgaagagcctgagagctcagaggtagacgctgccggtcgctggccaggggtttgtgtttccagaaccagccccacacctcctgagtcggctaccaccgtgaagagcctgattaaatcttttgatttgggaagacccggaggtgccggtcagaatatcagtgtgcataagacgcctaggtctccactgtctggcatccccgtgcgcacagcccctgcagctgctgtctcacccatgcaacggcacagtacatactcctcagtgcgcccagcatcccgaggtgtcacacagcgcctagacctcccagacttgccgttgtcagatatacttaagggtcgaactgagaccctcaagcccgatccgcaccttcgaaaatctccttcactcgaaagcctgtcacggcctccttcccttggcttcggcgacacacggctgctatctgcttcgacacgcgcatggaaacctcagtcaaaactttccgtcgaacgaaaggatccactggccgctctggccagggagtatggcggttccaagagaaatgcgctgctgaaatggtgccagaagaagacccaagggtacgctaatattgacattacgaatttctcatccagttggtccgatggtctcgctttctgcgccttgcttcatacatatttgccggcacacataccttaccaggagctgaatagccaagagaagaagcggaatctgttacttgccttcgaggcagccgagtctgtggggattaaaccctcccttgagctgtcagagatgctttacaccgatagacctgattggcagtcagtaatgcagtatgtagcccaaatctataaatactttgagacgtag

SEQ ID NO: 242129 - DNA, 2112 bp, synthetic construct
  misc_feature 1..2112: note = Description of Artificial Sequence: Synthetic coding sequence
  source 1..2112: mol_type = other DNA
atgggaaaccacagtgggcgtccagaggaccccgaacccggtgccttcaccacgacaaaaagaacgggcattcccgctccaagagagttttccgtgacagtgagcagggagaggagcgttccgagaggaccatcaaacccacggaaaagcgtcagctcaccaacttcctcgaatacccccactccaacgaaacatctgcgcacaccctctacaaagcctaaacaggaaaatgaggggggtgagaaggcggctctggaatctcaggtgcgcgagctgctggccgaggccaaggcaaaggattccgagatcaatagattgcggagcgaactcaagaagtacaaagagaagcgcaccttaaacgctgaaggcactgatgcattggggcctaacgtcgatggtacctccgtgtcacctggagacaccgagcctatgattcgggctttggaggaaaaaaacaagaactttcagaaggaactgagcgatttagaggaagaaaatagagtgctcaaggaaaagctcatttacttagagcatagccctaacagtgaaggggcagctagtcatacaggcgatagctcttgcccaacttcaatcactcaggagagctctttcgggagtcccacaggtaaccaaatgtccagtgacattgatgaatataagaagaacatccacggtaacgcactgaggacatccggaagcagtagttccgacgtgaccaaagccagtcttagccctgacgcatccgacttcgaacatattactgctgagactccaagcaggccactgtcttccacaagcaacccctttaaatcaagcaagtgcagtacagccggttcatccccgaatagcgtatctgaactcagcctcgcttctctcaccgaaaaaatacagaaaatggaggaaaaccaccactcaacagccgaagagctgcaggctacattacaggagctgagtgaccagcagcagatggtgcaggagctgactgccgagaatgagaagttggtcgatgagaaaaccatcctggaaacgtcctttcaccagcatcgggagcgggctgagcagttgagccaggagaacgagaagcttatgaatttgctgcaggaaagggtgaaaaacgaggagccgacaacccaggaaggaaagataatagagctggaacagaagtgcactggaatcctggagcagggacggtttgaacgcgaaaagttgttaaacatccaacaacagctgacatgctccctacgaaaagtggaagaggagaaccagggagcactcgaaatgatcaaaagactcaaggaagaaaacgaaaagctgaatgagtttttagaattggagaggcacaataataacatgatggcaaagactctggaagaatgtagagtcacactagaggggctgaagatggagaacggaagcttaaaatcacacttgcaaggcgagaaacagaaggctacagaggcctcagcggtggagcagactgctgagagttgcgaggtgcaggagatgttaaaggttgccagagcagaaaaggacctgctggagctctcctgtaatgagttgcggcaggagcttcttaaggcaaacggagaaattaagcacgtaagctccttgttggcgaaggttgaaaaagactacagttatctcaaagaaatctgcgaccaccaggctgaacagctgtcacgcacatcactgaaacttcaggagaaggctagcgaatctgatgccgaaatcaaagatatgaaagaaaccatctttgaattggaggaccaggtggagcagcatcgggcagttaaattgcacaataaccagcttatcagcgagttggagtcctcagtgataaagctggaggagcagaaatccgacttggagcggcagctcaagacgcttaccaagcagatgaaagaagaaacggaagaatggcggagattccaggcggatctgcaaactgcagtagtagtggccaatgacatcaagtgcgaagcacagcaagagctacgcaccgttaagaggaagctattagaggaggaagagaaaaatgctcgacttcagaaggagctaggcgacgtccagggccatggaagagtggtaacatctcgagcagccccaccatag

SEQ ID NO: 242130 - DNA, 2130 bp, synthetic construct
  misc_feature 1..2130: note = Description of Artificial Sequence: Synthetic coding sequence
  source 1..2130: mol_type = other DNA
atggggaaccattccggacgccctgaggaccccgagcctggagcgtttaccaccacaaagcgaacagggatccctgcgcctagggaattcagcgtcactgtttccagggagcggtctgtgcccagggggccaagcaacccaaggaagagtgtgtcctccccaacttcttcaaacacgccaacccctaccaagcatctcagaacacccagtacgaagcccaagcaagaaaatgagggcggtgaaaaagctgcgctggagtcccaagtgagagaactccttgctgaggccaaggctaaagactctgagatcaaccgactccgctctgagttgaaaaagtataaggaaaaacgaacactcaatgcagaagggacggacgcacttggaccgaatgtggatggtacatcggtaagccccggagacacggagcctatgattagggctctagaggagaaaaataagaatttccaaaaggaactgagtgacttggaagaagagaacagggtccttaaagaaaaactgatctaccttgaacactctccaaattctgagggtgccgcatcacataccggagattcatcctgccctacttctattactcaggagtcgagctttggctctcccactgggaaccagatgtcttctgacatagatgaatacaagaaaaacatccatggcaatgccctcaggacctcaggctctagctccagcgatgtcaccaaggcttccctgagtcccgacgcttcagatttcgagcacatcacagccgaaacaccttccagaccactgagctcgacgagcaaccccttcaagtcttctaagtgctccacagcaggttcatcacctaactcggtgagcgagctgtccctggctagcctaacagagaaaatacagaaaatggaggagaaccaccacagtactgctgaggagttacaggcaacactgcaggaactgagcgaccagcaacaaatggtgcaggaacttaccgctgagaacgagaagcttgtcgacgagaaaacgatcttggaaacaagctttcaccagcatagggagcgcgctgaacagctttctcaggaaaacgagaagttgatgaacctgctccaggagagggtgaagaacgaagagccaacaacccaagaaggaaagattattgaactcgagcaaaagtgcacgggcattctggaacagggccgattcgaaagagagaagctcctaaatatccaacaacagctgacatgttccttgaggaaggtagaggaagagaaccagggggctttagagatgatcaaaagactgaaggaggaaaatgagaaactaaatgaatttcttgaactcgagagacacaataacaatatgatggctaagactctggaggagtgccgcgtcactctcgaaggccttaaaatggaaaacggatccctgaagagccatctgcaaggcgaaaaacagaaagcaaccgaggcttcggcggtggaacagactgccgaatcgtgtgaggtgcaggagatgttgaaggttgctcgggctgaaaaggatctgctggagctcagctgcaatgagcttaggcaagagctcctgaaagctaatggcgagatcaagcacgtttcctctctgctcgctaaggtcgagaaggattatagctatctcaaagaaatctgcgaccaccaggccgagcaattgagtagaacctcattgaagctgcaagagaaagccagcgagtccgatgccgaaatcaaagatatgaaggagactatatttgaattggaggaccaggtagaacagcatcgggcagtaaaattgcacaacaatcaactgataagcgagctcgagtcctctgtaatcaagctcgaagagcagaagagtgatcttgaaagacagctcaaaaccctgacaaaacagatgaaagaggagactgaagagtggcgccgatttcaggcggacctccagaccgcggtcgtcgtcgctaatgacataaaatgtgaggctcagcaggagctacgtacagtgaagagaaaattactcgaagaggaagaaaagaacgcccgtctccagaaggagctgggagacgtccagggccatggtcgggtggtgacatcccgagctgctccacctagcctgggtagtgtgtcatag

SEQ ID NO: 242131 - DNA, 2964 bp, synthetic construct
  misc_feature 1..2964: note = Description of Artificial Sequence: Synthetic coding sequence
  source 1..2964: mol_type = other DNA
atgggaaatcattccgggaggcctgaggatcccgagccgggtgcattcactaccaccaagaggactggtattccagccccacgggaattttccgtaactgtttcccgcgaacgttcagtgcctcgaggcccaagcaatccaaggaagtccgtcagctcccctacaagcagtaatacaccaaccccaacgaaacatctcaggacgccatccaccaagcctaagcaggagaacgagggcggagagaaggctgccctcgaaagtcaagtgcgagagctgttagcagaagccaaggccaaagatagcgagatcaacaggctgagatctgagctgaaaaaatacaaggagaagagaactctgaatgcagaaggcacagacgctctcggtcctaatgtcgatggcacttcagtgtcccctggagatacggaaccaatgatccgagcactggaagaaaaaaataagaacttccagaaagaactctccgatttggaagaagaaaatcgtgtgctcaaagaaaagctcatctacctggaacattcacccaattcagaaggcgctgctagccacactggagacagcagctgccccacatctattacccaggaatctagcttcggttctcccacagggaaccaaatgtcttccgacatagacgagtacaaaaaaaacattcacggaaacgcactgaggacgagtggcagtagttcaagcgatgtcaccaaagctagcctgtcacctgacgccagcgatttcgagcacattactgctgagaccccatccaggcccttgagctccacatccaacccgttcaaaagctccaagtgtagcacggcaggctccagccccaatagcgtttccgagctgtcgctcgcctcactcacagagaagattcagaagatggaggagaatcatcattcaacagccgaagagctgcaggccaccctgcaagagctgtctgaccagcagcagatggtacaggaactcaccgccgagaacgaaaagttggtggacgaaaaaacaatcctggaaacttcatttcaccagcaccgcgaaagggcggaacagctgtcccaagagaacgagaagttgatgaacctcctgcaagaaagggtgaaaaacgaagaaccgactacccaggaagggaaaatcattgaactggagcagaagtgtactggcattctggaacaagggagatttgaacgggagaagctactgaacatccaacagcaattgacctgcagtttgcgcaaggtggaagaagagaatcagggagccctcgagatgatcaagaggcttaaagaggagaatgagaagttaaatgagtttctggagcttgaacgacacaataacaatatgatggcaaaaactcttgaggagtgcagggtgacactcgaaggcctgaagatggagaatggcagtttgaagagccacttacaaggcgagaaacagaaggcgacagaggcgagcgcagtggaacagactgccgaatcttgtgaggtccaggaaatgcttaaagttgctcgggcagaaaaggatttactggagctctcttgcaacgagctgaggcaggaacttctgaaagctaacggagaaattaagcatgtctcaagcctcctcgcaaaggtggagaaggattacagttatctgaaagaaatttgcgatcaccaagcagaacagctgtcaagaacgtcactgaaattgcaggaaaaggcctccgagagtgatgccgagattaaagatatgaaggagacaattttcgaactggaagaccaggtagagcagcacagggccgtaaagctgcacaataatcaactgatctctgaactggaatcctcagtgattaagctcgaagagcagaaaagcgacttggagagacagttaaagacactcactaaacagatgaaagaagaaacggaagaatggagacgcttccaggctgacttacagacggccgttgtcgtggctaacgacattaagtgtgaggctcaacaggaacttcgtacggtgaagaggaagctactggaagaggaggaaaagaatgcgagactgcagaaagagctgggagacgttcaaggccacggtcgggtcgtaacctcccgtgctgccccacctcccgtggacgaggagccagaatcaagcgaggtagatgcagctggtcgttggccgggagtttgtgtcagcaggactagccccaccccacccgagagcgcgacaactgtgaagtccttaataaaaagcttcgacctggggaggccaggcggagcaggacagaatataagcgttcacaaaacaccacgctcccctctgtctgggattccagtgaggacagctccagcagccgcagtgtcccctatgcaacggcacagcacctattcgagtgtacggcctgcatcccgcggagtaacacaacgccttgacttgcccgatttgcccttatctgacattctgaaggggaggacagaaactcttaagcccgatccgcatctgaggaaatcaccttctttggagtctctctccagacctccaagcttgggattcggggatactaggctgctaagcgctagcacccgggcttggaaaccgcagtctaaacttagcgttgaaaggaaagaccctttggcagcacttgcacgagaatatggtgggagcaaaagaaatgctttactgaaatggtgtcagaaaaagactcagggttatgccaacatcgatattactaattttagttcaagctggtccgacgggcttgccttctgcgctctcttgcacacatatctaccggcacatatcccctaccaggagctgaactcccaggaaaaaaaacggaacctcttattggcttttgaggctgctgaaagcgtcggaataaagccatccttagagctgagcgagatgctgtataccgatagacccgattggcagagtgtgatgcaatacgtggctcagatctacaaatatttcgaaacatag

SEQ ID NO: 242132 - DNA, 2373 bp, synthetic construct
  misc_feature 1..2373: note = Description of Artificial Sequence: Synthetic coding sequence
  source 1..2373: mol_type = other DNA
atgcggtccgcggcaaagccttggaaccctgctattagagctgggggtcacggcccagacagggtcagacctctccccgcagcctcttcgggcatgaagtcgagcaagtcctccacaagtttagcattcgagtctcggctttcccgcctcaaacgggcaagctccgaggacacgctgaacaaaccgggatctaccgccgcaagtggagtcgtgcggctcaagaagacagccactgccggagcgatctccgaactgacagagagccggctgaggtcgggaactggcgctttcactaccaccaagaggactggcattcccgctcccagggagttctcagtcaccgtgtccagggaaaggagtgtgcccagggggccttccaaccctagaaaatccgttagtagcccaacctcatccaacacacccacccccacaaagcatctgcgtacccctagtactaagccaaagcaggagaatgaaggaggggagaaggcggctctggaatctcaggtgcgcgagttgttggccgaggctaaagctaaagattccgagatcaatcgcctgcggtccgagctgaagaagtataaggaaaagcgtactttaaatgctgagggaacggacgctctgggacctaacgtggatggcacctctgtgtcaccaggtgatacagagccaatgatacgggctctggaggagaaaaataaaaactttcagaaagagttaagcgatctcgaggaggaaaatcgagtcctcaaagaaaaacttatctacttagagcacagcccaaatagtgaaggagcggctagtcacaccggtgattcatcctgtcctacttcaattacccaggaaagctcattcggttcccctacagggaatcaaatgagttccgatattgatgaatataagaaaaatattcacggtaacgcactccgtacatctggatcttcttcctcggacgtgacaaaggcatctttatcccctgatgctagtgactttgagcatattactgcagagaccccatcacggcctctcagttctacctccaaccctttcaaaagtagtaagtgcagcaccgcagggtcaagccctaactctgtcagcgagctgtcactggctagtctgaccgagaaaatccaaaagatggaggaaaatcatcactccacagcagaagaactccaggccactctgcaagagttgtccgatcagcagcagatggtgcaggaattgactgctgagaatgaaaaactcgtcgacgaaaaaacaatccttgaaactagtttccatcagcacagagaacgggctgaacagctttctcaggagaacgagaaactcatgaatcttctgcaagaaagggtgaaaaacgaggagccaactactcaggagggcaaaattattgagctcgaacagaagtgtacaggaattcttgaacaaggaaggtttgagcgcgagaaactgttgaatattcagcagcagctgacctgcagcctgaggaaggtcgaggaagagaatcagggagccctcgaaatgattaagaggctgaaagaggagaatgaaaaactcaacgagtttctggagctcgagaggcacaataacaacatgatggccaagaccctggaggaatgccgggtgacacttgaggggctaaaaatggaaaatggttctctgaagtcacatttgcagggagagaaacaaaaagccacagaggctagtgccgtggaacaaaccgccgagtcttgcgaggtgcaagagatgcttaaagtggcacgcgctgagaaggacctgctggagctcagttgtaacgaactccgccaagagctcctgaaggccaatggtgagattaaacatgtgtctagtctccttgcgaaggtggagaaagattatagctatttaaaggagatctgcgaccatcaggccgagcagttgtctcgcacatccctgaagttgcaagaaaaggctagtgagagtgatgccgaaattaaggatatgaaggagaccatcttcgaactggaagatcaagtcgagcaacacagagcagttaagctgcataacaaccaacttatctcggaacttgaatctagtgtgatcaaattggaggaacaaaagagcgatttggagcgtcagttgaaaaccttgaccaaacagatgaaggaggaaactgaagagtggagaagatttcaggccgatctccaaacagctgtggtggtggcgaacgacataaagtgcgaggctcagcaggaactgcgaaccgtgaaacgaaaactgctggaggaggaggaaaaaaacgcccgtctccagaaagagcttggagatgtgcagggacacggcagagttgtgacctccagagcggcaccaccttcgctgggtagcgtgagctag

SEQ ID NO: 242133 - DNA, 3090 bp, synthetic construct
  misc_feature 1..3090: note = Description of Artificial Sequence: Synthetic coding sequence
  source 1..3090: mol_type = other DNA
atgagaagtgccgctaaaccctggaacccagcaatacgggcagggggacacggccctgatagggtgcggccactaccagccgcatcatctggtatgaaaagttccaagagtagtacatccttggcctttgaatccaggctctctcgcctcaaaagggctagttcggaagatacactcaacaaaccaggtagcaccgctgcctccggtgttgtcaggctcaaaaaaacagctacggccggagcgatttccgagcttacagagtcccggctgcgatctgggacgggggctttcaccacaacaaaaaggactggtataccagcccctcgcgaattttctgttactgtaagccgagaacgcagcgtacctagggggccatcgaaccctcggaaatccgtcagctctccaacctcctctaatacacccacacccaccaagcacctgagaacaccaagtaccaagcctaagcaggaaaacgagggcggagaaaaagccgcactggaatctcaggtgagagagttgttagctgaagccaaggccaaagatagtgaaatcaataggcttcgtagcgagttaaaaaagtacaaggaaaagcgcaccctgaatgctgaagggaccgacgccctggggcctaatgttgatggaaccagcgttagcccaggagatactgaacccatgatcagggccctcgaggaaaagaacaagaattttcagaaggagttgtcggacctcgaggaggagaatcgggtgctcaaggaaaagctcatttacctcgagcacagcccaaatagcgagggagccgcatcccataccggggactcctcttgcccgacaagcattacccaagagagcagcttcggctctcctacaggtaaccagatgagctccgatattgacgaatacaagaagaatattcatggcaatgctctgagaactagtggctccagctcgtccgatgtaactaaagcttcactgagcccggacgcctcagacttcgagcatatcactgctgaaacgccatctaggcctctgagctcaacgtcaaaccccttcaaatcaagcaagtgttccactgccggatcctctcccaatagcgtgagcgaactctcgttggcgtccctgacagagaagattcaaaagatggaggaaaaccatcacagcacagcagaagaattgcaggcaacacttcaggaattaagcgaccaacaacagatggtgcaggagctcactgcggagaacgagaagctggtcgacgagaagactattctggaaacttctttccaccagcaccgagagcgggcagagcagctgagccaggaaaatgagaaactcatgaacttactgcaggaaagggtgaagaatgaggaacccaccactcaagagggcaaaattatagaactggagcagaaatgcaccggtatactggagcagggccgtttcgagcgggagaaactgctcaacattcagcagcaactcacttgctctctcagaaaggtcgaagaggaaaatcagggagctctcgagatgatcaaaaggctaaaggaggaaaacgaaaagctgaatgaatttctcgagcttgagcggcacaataataatatgatggcgaagactctggaggagtgtagagtcacattagaggggttgaaaatggaaaacggctctctcaagtctcacctccaaggcgagaaacagaaggctacggaggccagcgccgtggagcagaccgcagagtcgtgtgaggtccaagaaatgctgaaagtggctcgggctgaaaaggacttgctcgaactgtcctgtaacgagcttaggcaagagcttctcaaagctaatggagagataaaacacgtatcaagcctgcttgcaaaggtggagaaggattatagctatcttaaggaaatctgcgatcatcaggccgaacagctttcccgtacctctctgaagttgcaggagaaggcctcggagagcgacgcggaaatcaaagacatgaaagaaacaatctttgaactagaggatcaggtcgagcagcatagggctgtgaagctccataataatcaattgatatctgaattggaatcttctgtcattaagttggaggagcagaaatcagacttagaaaggcaactgaagacgctgacaaagcagatgaaggaggaaaccgaagagtggcggcgatttcaagccgatttgcagactgcagtggtggtcgcgaacgacattaaatgcgaagcccagcaagagttacgaactgtgaaacgaaagctgctggaagaagaagagaagaatgccagacttcagaaggaactcggcgacgtacaagggcatggaagagtcgtcactagccgagccgctcctcctcctgtcgacgaggaacctgagtcaagtgaggtggatgccgcaggaagatggcctggtgtgtgtgtgtcccggacctcaccgactccccctgagtccgctaccactgtgaaatcgttgatcaaaagttttgaccttgggcgacccggaggggctggacagaatatttcagtgcacaagacccctcgatctccgctgtccggtattcctgtgcggaccgcacccgctgctgctgtgtcccccatgcagagacattccacctattcttccgtgcggccagcctccaggggtgtaactcaaagactggacttgcccgatctgcctctgtctgacattctcaaggggagaacagaaacccttaaacctgatccacaccttcgcaagagtccatcattagagagccttagccggccaccatctctgggtttcggggatacaaggcttctgagcgcctcgaccagggcctggaagccacagagcaagctctcagttgaacggaaggaccctcttgctgccttagcccgagaatatggtggtagtaagagaaacgccttgctcaagtggtgccagaagaagactcagggatacgctaagaggaaccttcttttggcattcgaggctgcggagtctgtcgggatcaagccatcccttgagctgtccgaaatgctatacacagatcggccagactggcaaagtgtgatgcagtacgtggcccagatatacaagtattttgaaacatag

SEQ ID NO: 242134 - DNA, 237 bp, synthetic construct
  misc_feature 1..237: note = Description of Artificial Sequence: Synthetic coding sequence
  source 1..237: mol_type = other DNA
atgcggagcgcagccaagccttggaaccccgctataagggccggtggccacggtcctgaccgggtcagacccctcccagccgcttcctctggtatgaagtcttcaaagtcaagtactagccttgcttttgagagccgcctgtcaaggctgaagcgggcttcatcagaggacactcttaacaagcctggaagtaccgccgcttctggcgtcgtaaggctgaagaaaacagcaacatag

SEQ ID NO: 242135 - DNA, 1227 bp, synthetic construct
  misc_feature 1..1227: note = Description of Artificial Sequence: Synthetic coding sequence
  source 1..1227: mol_type = other DNA
atgaaggagacgatcttcgaactggaggaccaggttgagcaacacagagctgtcaagctgcataataaccagctcatcagcgagctggagagttccgttataaagctcgaggaacagaaatccgatctggaacgccagctgaagaccttaacaaaacagatgaaagaagagaccgaggaatggagacggtttcaagccgacctgcagacggccgtcgtagtcgcaaatgacattaagtgcgaggcacagcaggagctgcggacagttaagagaaagctgctggaggaggaggagaaaaacgccaggctacaaaaggagcttggagatgtgcagggacatgggagggtagtgaccagccgcgctgctcctcctcccgtagacgaagagcccgaaagctccgaagtggatgcggctggtcggtggcctggagtttgtgtgtcccgcactagtcccaccccacccgagagtgctaccaccgtgaagtctctgatcaaaagcttcgatctgggccgacccggaggtgccggtcagaacatttccgtgcacaagactccacgcagtcccctgtcaggcattccggtgcggaccgctccagcagccgctgtctcccccatgcagaggcacagcacatacagctccgtccggcctgcttctcgaggagtgactcagcggcttgatctcccagacctccccttgtccgacattctgaagggacgcacagaaacgctgaaacccgacccccatttgcggaagagcccgtctttggagagtttatccaggccccctagtctggggttcggcgatacaagactgctatctgcctctacccgagcatggaaacctcagtcgaagctttccgtggaacggaaggaccccctagccgctctggctagagagtatggaggatccaagcgcaatgccttattaaaatggtgccaaaagaagacccaggggtacgccaatattgatatcactaacttctcgagttcttggtctgatgggctggccttttgtgctcttctgcatacctatctgcccgcacacatcccctatcaggagctgaattcccaggaaaagaagcggaacctccttcttgcttttgaggccgctgagtcagtagggattaagccatcattagaactctctgagatgctttatacagaccggcctgactggcagagtgtcatgcagtacgtggcacaaatttataaatactttgagacctag

SEQ ID NO: 242136 - DNA, 3354 bp, synthetic construct
  misc_feature 1..3354: note = Description of Artificial Sequence: Synthetic coding sequence
  source 1..3354: mol_type = other DNA
atgaaaaaggcgtcccgaagtgtaggttccgtccccaaggtctccgccataagtaaaacgcagaccgccgaaaagataaagccagaaaactcatctagcgcgtctactggtgggaagcttgtgaaacccggaactgctgccagcctttccaagacgaaatcttctgacgatctgctggcgggtatggcgggtggcgtgaccgtcaccaacggggtgaaagggaagaagagtacctgcccaagcgccgcaccttcagcgagcgccccagctatgacaacggtggagaataagtctaaaatatcaaccggcaccgcctcgtcaaccaagcgctccacatccacagggaacaaagagtctagctcaactcgcgaacggctaagggaaaggacccgcttaaatcagagcaaaaagctcccatccgcagggcagggggctaatgatatggcccttgcaaagaggagcagatctcgcacggctacggagtgcgatgttcggatgagcaagtctaaaagtgacaatcagatcagcgaccgcgctgcactcgaggctaaggtgaaggacctattaactctcgcaaagactaaagacgtggagatccttcatctaaggaacgagctgcgggacatgagggcgcagctgggaatcaatgaggaccatagcgaaggcgatgagaaaagcgagaaggagaccatcatggcacatcagcctacggatgtggagagtaccttactccagctgcaggagcagaacaccgcgattagagaggagttaaaccagctgaaaaatgagaacaggatgctgaaagacagactgaatgccctgggattctcactggagcaaaggttggacaatagcgaaaagttgttcgggtatcagtcactttcccccgagataacacctgataatcaatccgatggcggaggtacacttaccagctctgtggaaggttcggccccaggatctgtggaagatctactgagccaggatgagaacactcttatggaccatcagcatagtaatagcatggacaacctagactcggagtgcagtgaggtttaccagccccttacatctagtgatgatgcccttgatgcgccttcaagttcagagtctgaaggaatccctagcatcgagaggtccagaaaaggctcgtccggtaacgcctctgaggtgagtgtcgcctgtctgactgaaaggattcatcagatggaagaaaatcaacattctacatcggaagagttgcaggccacattgcaggagcttgcagacttacagcagattacccaggagttgaatagtgaaaacgaacgcctgggcgaagagaaggtgattctgatggaatcactttgccagcagtccgataaattggaacactttagtcggcagattgagtatttcagaagcctgctcgacgaacatcacatttcttatgtgattgacgaggacgtgaagtctggacgctatatggagctggaacagcgctacatggatcttgccgagaatgctaggttcgagagggagcaattactgggtgttcaacagcacctcagtaataccttgaaaatggcagagcaggacaacaaggaagcacaggagatgatcggggcactgaaggagcggtcacaccatatggagcgcattattgagagtgagcaaaaggggaaggcagctctcgcagccaccttggaggaatataaagctaccgtggcttcagaccagatagagatgaacagactcaaggctcagcttgaaaacgaaaaacaaaaggtcgctgaactgtactctatccacaattctggcgataagagtgacatacaagacttgctggagtcagtccggctcgataaagaaaaagccgaaacactggcatctagcctgcaggaggacttagcacacacccgcaacgacgccaacaggctacaagatgctatcgccaaagtggaagacgaatacagggcatttcaagaggaagctaaaaaacaaatcgaagatcttaatatgacactcgagaagttacggtcagaccttgacgagaaggagacggaaaggtcagatatgaaggaaaccatcttcgaactcgaagacgaggtggagcagcaccgggcagtgaaactccatgacaacctgattatatcggacctggaaaacacagtcaagaagctgcaggaccagaagcacgatatggagcgggagataaagactctgcataggcgcctgagggaagagtccgccgagtggcgtcagttccaggccgacctgcagaccgctgtggtgattgccaacgatattaagagcgaggcacaagaggaaatcggcgacctcaaacggcgattgcacgaggcccaggagaagaacgaaaaactcaccaaagaattggaagagatcaagtcaaggaaacaagaggaagaaagagggagggtgtataattatatgaatgcagtagagcgagatttagcagctttacgacaggggatggggttgtctcgcagatcttcgaccagcagcgagcccacaccaaccgtgaaaactctcattaaatcatttgattcagcgtctcaggtgccaaacccagccgcagctgcgatccctcggaccccactgtccccgagtcccatgaagactccaccagctgccgctgtcagtcctatgcagagacattcaataagtggcccaattagcacttcaaagcccctgacggcactcagcgacaagcggcctaattacggcgagattcctgtccaggagcaccttctacgtacaagctcagcgtcacgacctgcatcccttcctcgagtaccagcgatggagagcgcgaaaacacttagcgtcagtaggcgttcctctgaggaagtaaaaagggacatctctgcccaagagggggcttcgcccgcttcccttatggccatgggcactacctcaccacaattaagtttatcttcttcccctacagcttccgtaacgccgactacccggtctagaatccgagaggagagaaaggatccgttgtctgcgctagctagagaatacggcggttcgaaacgcaatgctctcttgaaatggtgccagaagaagactgagggctaccagaatatcgatatcacaaatttttcatcttcgtggaatgatgggctggcgttctgtgctctcctccatacatatctgcccgcacacattccttatcaggaactaaattcacaggacaagaggaggaattttatgttagcatttcaagccgcagaatccgtgggaattaagagcactctggatattaatgaaatggtgcgcaccgagcgccctgactggcaaaatgtcatgctgtacgtaactgctatctataaatacttcgagacttag

SEQ ID NO: 242137 - DNA, 2820 bp, synthetic construct
  misc_feature 1..2820: note = Description of Artificial Sequence: Synthetic coding sequence
  source 1..2820: mol_type = other DNA
gtccccgaagccgtgcgatggggctatttcatacctgaacagtctcagttcgcctgtaagtgcatcacaaagcgccagccccgaatgaaaaaagcgtcccgtagtgtggggtctgtcccaaaggttagcgccatttccaaaacccaaaccgctgaaaaaatcaaacctgagaattccagctcagcaagcaccggagggaaattagttaagcctggtaccgccgctagcctgagcaaaaccaaatcttctgacgacctccttgctggcatggccggaggggtgacggttactaacggtgtcaaagggaagaagtctacctgcccgtcggccgctccatcagcttctgcacctgccatgaccaccgtcgaaaataagtcaaagatcagcactgggacagctagttcaaccaagcgtagcaccagcaccggaaacaaggagagttcatcaacacgggagcgtctccgagaaaggacacgcctgaaccaaagcaaaaagctgcctagcgctggtcagggcgcaaacgacatggcactagccaagagatcgcggtcgcgaacagcaacagagtgtgacgtgcgaatgagtaaaagcaagtccgacaaccaaatctctgacagggccgctctcgaagctaaggtgaaagacctgctcactttggcgaaaacaaaggacgtcgaaatccttcacctgagaaatgagcttcgcgatatgagagcacagctgggtataaatgaggatcatagtgagggcgacgaaaaaagcgagaaggagaccatcatggcacaccagcctaccgacgtcgagtccacattgctgcagctccaggaacagaacactgccatccgagaagagctcaaccaactgaagaatgagaacaggatgcttaaagaccgccttaatgcgctggggttctcattggagcagaggctggacaacagcgaaaagctgttcggttatcagtcgctgtcacccgaaatcactcctgataatcagagtgacggcggaggaacgctgaccagctccgtagagggaagtgccccaggttctgtggaggatctgctgagccaggacgagaacacactgatggatcatcagcatagcaactcgatggacaatctggattccgagtgttccgaggtttaccaaccattgacctcttccgatgatgcactggatgcccctagctcctctgagtccgaagggattccctccatagaaagatctcggaagggcagcagcggcaacgcttcagaagtaagcgtcgcctgcctgacagagcgaatccatcagatggaggaaaatcagcacagcacatccgaagaactacaggcgaccttgcaagagctagccgacctgcagcaaattactcaggagcttaattccgaaaatgagcggctgggagaggaaaaggtcatcctgatggaaagtctgtgccagcagtccgacaagctggagcacttcagtcggcagatcgaatacttccgaagccttctggacgaacatcatatatcttacgtgattgatgaagacgttaagtcaggacgctacatggagttggaacaaagatatatggaccttgccgagaatgctcgctttgagcgcgagcagctcttgggggttcagcagcatctcagtaatactctgaagatggcagaacaggacaataaggaggctcaagaaatgatcggcgctctcaaggaacgcagccatcatatggaaagaattatcgagagtgagcagaagggtaaagctgccctggccgcaacactggaggaatacaaagcgactgtggcctccgaccagatcgagatgaatcgcctgaaggctcaacttgagaacgaaaagcagaaggtcgccgagctgtacagtattcacaattcaggggataaaagtgatattcaagatctcctggaaagcgtcagactcgataaggaaaaggccgagactttagcttctagtctgcaggaggacctggctcacaccagaaatgatgcaaacagactccaggacgccatcgctaaagtggaagatgaataccgcgctttccaagaagaggccaaaaaacaaatcgaggatctgaacatgacactcgagaagctcaggtcagacttggacgaaaaggaaactgagagaagcgacatgaaagaaacaatcttcgagttagaagatgaggtagagcagcacagagctgtaaagctacatgataacctcattatttccgacctggagaacactgtgaaaaagttgcaggaccagaaacacgacatggaacgcgaaattaagactctacacaggagactgagggaggagtccgctgagtggagacagttccaggcagacctgcaaaccgccgtggtgattgccaacgacatcaagtccgaagcacaggaagaaattggggacctcaagcgccgactgcatgaggctcaggaaaaaaacgagaaactaaccaaggagttggaagagattaaaagtaggaaacaggaagaggagcgtggccgtgtctacaattacatgaacgctgttgaacgggaccttgctgccctgagacagggcatgggactgtcacggaggtcttcaaccagttccgagcctacacctacggtgaaaaccttgatcaagagtttcgatagtgctagccaggtaccaaatccagccgctgccgctatcccccgtactcctttgagtccatccccaatgaaaactccacctgcggcagccgtctccccaatgcagatggagtcatcctccgtggcccacgctggtatgcaatggagagatctcggatccctgcagcctcttccaccaggtttcaaatag

SEQ ID NO: 242138 - DNA, 2370 bp, synthetic construct
  misc_feature 1..2370: note = Description of Artificial Sequence: Synthetic coding sequence
  source 1..2370: mol_type = other DNA
atgaaaaaggcaagtcgatctgtgggaagcgtccctaaagtttctgctatttccaaaacacagacagcagaaaagatcaagcctgagaattcttcatcagcttccacaggcggaaagttggtcaaacccggtacagccgctagcctgtccaaaacgaaaagtagtgacgatctccttgctggcatggctggcggtgtgacagtaacaaacggggttaagggtaaaaaaagcacttgtccgtctgcagccccttccgcctcagccccagccatgactacggtggagaataagagcaagatctccacagggacagcgagttcaaccaagaggagcacctcaaccggaaacaaagagagtagctctacccgcgaacgtctccgcgaacgaacacgcttaaatcagtctaaaaagctacctagtgctgggcagggggctaatgacatggctctggccaagcgcagtcggagccgtacagccactgaatgtgatgtgagaatgagcaagagcaagagcgacaaccagattagcgatagagctgcacttgaagccaaagtgaaggacctcctaacccttgccaagactaaggacgtagagatactgcacctgagaaacgagttgagagatatgcgtgcccagctgggcattaacgaagatcactccgagggggatgagaagagcgagaaggaaaccataatggcacaccaaccaaccgatgttgagagtaccttactgcaattgcaagagcagaacacagccattagagaagagctcaaccaactcaaaaatgagaataggatgttaaaggatcggttgaatgccttgggcttcagtctggaacagcgcctcgataattccgagaagctttttggctaccagtcgcttagcccagaaattacccctgacaatcagtccgatgggggaggcacactgacatcctcagtggaaggcagtgccccagggagcgttgaagatcttctatcccaagatgagaacaccctcatggaccaccaacactcaaactccatggataaccttgactccgagtgttccgaggtttatcagcctttgaccagcagcgatgatgcgctcgacgctccatcctcctctgaatcggaggggattcccagtattgagaggtctcgtaaaggatctagcggtaacgcctctgaggtctccgtcgcctgcctaactgagcgcattcaccaaatggaagagaaccagcattctacttctgaggagctgcaagccacactgcaggagctggcagaccttcagcagatcacccaagagttgaatagcgagaatgagagactgggggaggaaaaagtgatcctcatggagtccctctgccagcagtcagacaagctcgagcatttctccagacagatcgagtattttcggtctctgctggatgagcaccacatctcttatgtgatcgacgaagatgttaagagcggcaggtatatggaactggagcaacggtacatggacttggcagaaaatgctcgattcgaacgagaacagctactgggggtgcagcaacacctcagtaacacattgaaaatggcggaacaggataacaaagaggcgcaggaaatgatcggggcactcaaggaacgaagtcatcacatggagagaatcatagagtctgaacaaaaaggtaaagctgctctcgctgcaaccctggaagagtacaaagcaacggtggcatccgaccagattgagatgaacaggctgaaggcgcaactggaaaatgaaaagcagaaggtggctgagctgtactctatacataactctggcgacaaatccgatatccaggatctgttagagagtgtcagacttgacaaggaaaaggcggagacattagcatcctccctgcaagaagacttagcacatactcggaatgatgcaaatcgcctgcaggatgctattgctaaagtggaagacgaatatcgggcttttcaagaggaagcaaaaaaacagatcgaagaccttaacatgacgctggaaaagctgcggtcggatctcgatgaaaaagaaaccgaacggtctgacatgaaggaaacaattttcgagctggaagatgaggtcgaacagcaccgagcagtgaaactgcatgataatttgatcatttctgacctcgaaaatacagtgaaaaagttgcaggatcaaaagcacgacatggaaagggaaatcaaaacacttcaccgcagacttcgggaggagtcagccgagtggaggcagttccaggccgatctgcagactgcagtcgtgattgcaaacgacatcaagtccgaggcccaggaggaaattggggacctgaaaaggcgcctgcacgaagcacaagagaaaaacgagaagcttacctag

SEQ ID NO: 242139 - DNA, 3354 bp, synthetic construct
  misc_feature 1..3354: note = Description of Artificial Sequence: Synthetic coding sequence
  source 1..3354: mol_type = other DNA
atgaaaaaagccagccggagcgtcggtagcgtgccaaaggtgtccgcaatttccaaaactcagacagcagagaaaatcaaacccgaaaactcaagttccgcttcgacaggtgggaaactagtgaagccaggcactgctgcatccctgtccaagactaaatcttctgatgacctgcttgctgggatggctgggggagttactgttaccaacggcgtgaagggtaaaaaatcgacatgtccctccgccgctccctctgcgtctgcacccgcaatgacaacagtcgaaaacaagtctaaaattagcaccggcaccgcttcatccacgaagagatctaccagcactggcaacaaggagtcatcatccacacgcgaaagactgagggaacgcacccggttgaatcaaagtaagaaactgccatccgccggacagggcgcaaacgacatggccctcgcaaagcgcagtcggtctcgtacagcaacggagtgcgacgttcggatgtcaaagagcaaatccgataaccagatttctgacagggcggcattagaggcaaaggtaaaagatctgcttacactcgctaaaacgaaagacgtggagatcttgcacctgaggaacgagttaagggatatgcgggcacagctagggatcaacgaagatcactcggaaggagatgagaaatccgaaaaggaaactataatggctcatcagcccacggatgtggagagtacactcctgcagctccaggagcagaatacggcaatccgggaggaattgaatcagctgaagaacgaaaacaggatgctgaaggaccgactgaacgcattaggcttttctctcgagcagcgattagacaatagcgagaaactcttcggctaccagtctttgagccctgagatcacccccgacaatcaaagcgatggaggcggaaccctgacctccagtgtggaaggcagcgcacctgggtccgttgaagaccttctctcccaggacgaaaacaccttaatggaccatcagcactccaattctatggataacttggactctgaatgctctgaggtgtaccagcctctaacctcctccgacgatgctttggatgccccaagctcaagtgagagtgagggtatcccttccatcgaacggagtcgaaagggctctagcggcaatgctagtgaggtttcagtagcatgccttacagagcgaatccaccaaatggaagagaatcagcactccacgagcgaggagctgcaggcaaccctgcaggagctcgccgaccttcagcagatcacacaggaactgaattccgaaaacgaacgcctgggtgaggaaaaggtgattctgatggaaagcctgtgccagcaatcagacaaactggaacatttcagtcggcaaattgagtacttcaggtcactactagatgaacaccacatatcttatgtgatagatgaggacgtgaagtctggcagatatatggagctcgagcagaggtatatggacctcgctgaaaacgccaggttcgagagggagcaacttctgggcgtgcagcaacacctgtcgaacacacttaagatggctgagcaggataacaaagaagcccaagaaatgatcggcgctctgaaagaacgttcacatcatatggaaagaataatcgaatccgagcagaaggggaaggccgctttggcggctactcttgaggaatataaggcgaccgtggcctctgaccagattgaaatgaatcgcctcaaggcgcagttggagaatgagaaacagaaagtggccgagctgtactcaattcataatagcggggataagtctgatattcaggaccttctggagtcggtccggctcgacaaagagaaagcagaaactctcgcgagcagcttgcaggaagatcttgcgcatacccggaatgatgcaaaccgattgcaagacgcaattgccaaggttgaagacgagtatcgcgctttccaagaagaggccaagaagcagatcgaagacctcaatatgacacttgagaaactgcgaagcgacctagacgaaaaggagacagagagaagcgacatgaaagaaacgattttcgagcttgaggatgaggtagagcagcacagagcagtgaagctccatgacaacctgatcataagtgacctggagaacacggtcaagaagctgcaggaccaaaaacatgacatggaacgggagataaagaccctccaccgacggctgagagaagagtccgctgaatggaggcaatttcaagctgacctgcaaacggcagtcgtgatcgccaatgacatcaagtctgaagctcaggaagaaatcggggatctcaagaggcgcctccatgaagcacaggagaaaaacgaaaaactgactaaggaactggaagagattaaatcacgtaagcaggaggaggaacggggacgggtctataattacatgaatgcagtcgaacgcgacctcgccgcactgcgtcagggaatgggactttctagaaggagcagtacgagctcggagcccacccctaccgtaaagaccctcattaagtccttcgattcagccagccaggtccccaacccggcagcagctgccatccctaggacaccactgtcaccttcccccatgaaaactccaccagcggcagccgtcagtcctatgcagcgacacagcatcagcggccctatatcaacttctaaaccgctgacggccctatcagacaagcgccctaactatggcgagatacccgtccaggagcaccttctcagaacatcatccgcttctagaccagcctccctgcccagagtcccggctatggaatctgctaaaactctctcagtgtcacgcagaagtagtgaggaggtgaaacgcgacatatctgcacaggaaggtgcttcacctgccagcctcatggcaatggggacaaccagtccccagttatcattgtcaagttcccctacagcgagcgtcacgccaaccacaaggtcccgtatcagagaggaacgaaaggatcctctgagtgctttggccagggagtatggcggttcaaagcgaaatgctctgttaaagtggtgtcaaaagaagactgaaggctatcagaatatagatatcacgaatttctcttctagttggaatgatggccttgccttttgcgctctcctccatacctatctgccggcacatattccttatcaagagctcaatagccaggataagcggaggaatttcatgctggcctttcaggcagctgagtccgtggggatcaaaagtaccttggacattaacgaaatggtccggacagaacggccagactggcaaaacgtaatgctttatgtaaccgctatatacaagtactttgaaacttag

SEQ ID NO: 242140 - DNA, 3237 bp, synthetic construct
  misc_feature 1..3237: note = Description of Artificial Sequence: Synthetic coding sequence
  source 1..3237: mol_type = other DNA
atgaagaaggcatctcgatcagtggggtctgtaccaaaagtttccgcaattagcaaaacgcagaccgccgagaagataaagcccgagaactcctcctcggccagtaccggaggaaaactggtgaagccgggaactgcggcttccctgtcaaagacgaaatcctcggacgacctacttgccggaatggccggtggagtgaccgtgactaatggcgtgaagggaaaaaaaagcacttgcccgagcgccgcacccagcgccagcgcccctgcaatgaccaccgtcgagaacaagtcaaagattagtacggggaccgcctcatccaccaaacggagcaccagcacgggaaacaaggaatccagcagcactcgtgagcggctgcgcgaaagaacacgactaaatcagagcaagaagctgcccagtgccggtcagggggctaatgacatggctctggccaaaagatctagatcacggaccgctacggagtgtgacgtcaggatgtccaaaagtaaatccgacaaccagatctccgacagggccgctctggaggccaaggtcaaggatttgctaactctcgcaaaaactaaggatgttgaaatcttacatctcagaaacgaattaagggacatgagggcacaattgggaattaacgaggaccattccgagggggacgagaagagcgagaaagagacgatcatggcacaccagcccaccgacgttgagtcaacactactgcagctgcaggagcagaacactgcgatccgggaggaactgaatcagttgaagaacgagaataggatgctgaaggaccgcttgaatgcacttggcttttctttagagcagaggctggacaatagtgaaaagctattcggataccaatcactgtcgcccgagattactcctgacaaccagagtgatggcggtggaaccctgacatcctcagtggagggctcagcgccagggagtgtggaggacctactgagccaggatgagaatacgctcatggatcatcaacactcaaactcgatggacaatctcgactccgagtgcagcgaagtgtaccagccacttacctcctccgatgacgcactcgacgccccttcctctagcgaatctgagggaatacccagcatcgagcgtagccggaaaggttcatccgggaacgctagtgaagtgtcagtggcatgcctgaccgagaggattcaccagatggaggaaaatcagcactcaacctctgaggagttgcaagctaccttgcaggagttggccgacctgcagcagatcactcaggagctgaactccgaaaacgaaagactgggcgaggaaaaggtgattttaatggagtctttgtgtcagcagagcgacaagttggaacacttcagtagacaaatcgagtactttcggagtcttctcgacgagcaccatatctcttatgtaattgatgaagacgtgaagtcaggaagatacatggagctggaacaaagatatatggatcttgccgagaatgcaagatttgagcgggaacaactactcggcgtgcagcaacatctctcaaacaccttgaagatggctgaacaggataacaaggaagcacaggaaatgatcggggctctcaaggagcgtagccaccacatggagcgcattatcgagagtgagcaaaaggggaaagctgctctggctgctacccttgaggaatacaaggccaccgtggcttcagaccagatcgaaatgaatcgtctgaaggcacagctggaaaatgagaaacaaaaggtggccgagctctattctatccataactcgggagataagagcgatatccaagacctcctggagtctgtcaggttggataaggagaaggctgagacattggcatcttctttacaggaagacctggcccacaccagaaatgatgctaaccggttacaggacgcgatcgcgaaggtcgaagacgaatacagggcttttcaggaggaagccaaaaagcagattgaggacctaaatatgacgctggaaaaactcagaagtgatttggatgaaaaagagaccgaacggtccgatatgaaggaaaccatcttcgagcttgaggatgaggtggagcagcaccgcgctgtaaaattacacgacaacctgataatctccgacttggaaaacactgttaaaaagttgcaagaccagaagcacgacatggaacgggagatcaagactttgcaccggaggcttagagaggagagtgccgaatggcggcagttccaggccgatctgcagaccgccgttgtaatcgcaaacgatattaagtcggaagcacaagaggagatcggagatctgaagcgtaggctccatgaagcccaggaaaagaacgaaaaactcactaaagaactggaagaaattaagagcaggaaacaggaggaggaacgaggcagggtctataactacatgaacgcagtggaaagagatctggcggcactgcggcaagggatgggcctgtctagaagatcatcaacaagctctgagccaacccccacagtgaaaactttaatcaagtctttcgattccgcgtcccaggtgccaaatccagcggctgccgcaatcccaagaaccccattatcaccttcccctatgaagacgcctcctgctgctgcagtcagcccaatgcagcggcattccatttccgggcctatcagcaccagtaagccacttactgccctgtcagataaacggccaaactacggtgagatccccgtccaggagcaccttctccgcacaagtagcgcgtcgaggcccgcaagcctcccacgggtgcctgcaatggaatccgcaaaaaccctttctgtttcaagaagaagctcagaggaggtcaaacgcgacattagcgcccaagagggcgcatctccagcttcactgatggctatggggacaaccagccctcagctctcactgtcttcatctcccacagcttccgtgacaccgacaactcgtagccgcattcgcgaggaaaggaaggatcctctatctgctctcgccagggaatatggtgggagtaaacggaacgcacttttaaaatggtgtcaaaagaagacagagggataccaacgccgtaatttcatgctcgcatttcaggctgcggagtctgttggaattaaatcgaccctagacatcaatgagatggttaggacagagcggcctgactggcaaaacgtgatgctgtatgtcaccgcaatctacaaatatttcgaaacgtag

SEQ ID NO: 242141 - DNA, 2781 bp, synthetic construct
  misc_feature 1..2781: note = Description of Artificial Sequence: Synthetic coding sequence
  source 1..2781: mol_type = other DNA
atgaccaccaaagactatccctctctttgggggtttggcacaactaagacattcaaaatccccatagaacacctggattttaaatacattgagaaatgctcagacgtcaaacacttggagaagatcctttgcgtcctaaggtccggcgaggagggttactacccggagttgaccgaattctgcgagaagcatcttcaggccttggcgcctgagtccagggccctgcgcaaggataagcccgcagccaccgccgcatcatttactgctgaagaatgggagaagatcgatggagacatcaaatcttgggtgtctgagattaagaaggaggaagacaaaatgcactttcacgaaactgagactttccctgccatgaaggataacttgccccctgttagaggatctaatagctgcctgcacgttggaaaggagaagtatagcaaacgaccaaccaagaagaaaaccccaagagattacgcggaatgggacaaatttgacgttgagaaggagtgcttaaaaatagatgaagattacaaggaaaagaccgtgatcgataaatcccatctctccaaaatcgaaacacgcattgacactgcgggtctcacagagaaagaaaaagactttctcgcaacgcgcgagaaagaaaaaggaaacgaagccttcaactcaggtgactacgaggaggccgtgatgtactacacacgtagcatctccgctctccctaccgttgtggcttacaataacagagcccaggctgagataaagctacaaaattggaattcggcattccaggattgcgagaaggtgttggaactggagcccggtaatgtgaaggccttgctgcgccgagctaccacatataagcaccaaaataagctgcgcgaggccacagaggacttatcaaaggtattggatgtagagcctgataacgatctagccaagaagaccttatctgaggttgagcgggacctgaaaaattccgaagccgctagcgagactcagacaaaggggaagcggatggttattcaggagattgagaactccgaagacgaagaggggaaaagcgggagaaaacacgaggacggcggtggagacaaaaaacctgctgaacctgcaggagcagccagagctgcgcagccttgcgtgatgggcaatattcagaaaaaacttacgggcaaggccgagggaggcaaaagacctgcaagaggcgctccacaacgaggacagaccccagaagccggagctgataagagatctcctagaagggcttccgccgcagccgcagccggagggggagctaccggccacccaggcggtgggcaaggcgcagaaaacccagcaggactgaaatctcagggcaacgagttgtttcgtagtgggcagttcgccgaagcggcagggaaatactctgcagccattgcccttctggagcctgctggatctgagatcgccgacgacttgtccatactgtactcaaatcgtgcggcttgttacctgaaagagggcaactgttctggctgcattcaggactgcaaccgggctctggagctgcacccattcagtatgaagcctctgctgaggcgtgccatggcatacgagacactggaacagtatggaaaggcttacgtcgactacaaaacagtgctgcagatagattgcggactgcagctggcaaatgattccgtcaaccgtctgtccaggatcctgatggaactggacggaccaaactggagagagaagctaagccccatccccgctgtcccagcaagcgtccctctccaggcctggcacccggcaaaggagatgataagcaagcaggcgggagactcttctagccacaggcaacagggtataacagacgagaaaacttttaaggcattaaaagaagagggtaaccagtgtgtgaatgataagaattacaaagacgctctaagcaagtacagtgaatgtttaaaaatcaataacaaagaatgtgcaatttataccaaccgtgcgctgtgttatctgaagctttgccagttcgaagaagctaagcaggattgcgaccaagccctgcagctggcagacggcaatgtgaaagctttctatcgacgggcactggcccacaaaggcctcaaaaactatcaaaagtcactgattgatttgaacaaagtaatcctgctggacccaagcatcattgaagcaaaaatggaattagaagaggttactaggcttcttaacctcaaggacaagacagctcccttcaacaaggagaaggagaggagaaaaattgagatccaggaggtgaatgaggggaaagaagaacctggccgtcctgcaggcgaagttagcatgggatgtctggcgagtgaaaaaggtggtaagagcagtcggtcaccggaagaccctgaaaagttgccgattgccaagcctaataacgcatatgaatttggacagataattaacgccctgtctaccaggaaggataaggaggcctgcgcacacctgctcgccatcaccgcaccaaaggaccttccaatgttcttgtcaaataagctggaaggagacacatttctgctgcttattcagtccctgaaaaacaacctgattgagaaggatccaagtctcgtttatcaacatctgttgtacctatctaaagcagagcgattcaagatgatgcttacacttatcagcaaaggtcagaaggagctgatcgagcagctcttcgaggacctgagcgatacacccaacaaccacttcactctagaggatatccaagccttaaagcggcagtatgagttgtag

SEQ ID NO: 242142 - DNA, 2781 bp, synthetic construct
  misc_feature 1..2781: note = Description of Artificial Sequence: Synthetic coding sequence
  source 1..2781: mol_type = other DNA
atgaccaccaaggattatcctagtttatggggcttcgggaccactaagacattcaaaatccccatcgagcacctggattttaagtacatcgaaaagtgcagtgatgtgaaacatctggagaagattctgtgtgtacttagatctggtgaagaaggctattatcccgaactgaccgaattctgtgagaagcacctgcaggccctcgcaccggagagtcgcgcactcaggaaagacaaaccagccgcaaccgctgcttcatttaccgctgaagaatgggaaaagatcgatggagacatcaagtcatgggtgtctgagattaagaaagaggaagacaaaatgcatttccatgagaccgaaacttttccagccatgaaagataacctaccccctgttcggggtagcaactcctgtctccacgttggaaaagaaaagtacagcaagcgacccacgaaaaagaagacccctcgtgactacgcagagtgggacaagttcgacgtggagaaggaatgcctgaagatagacgaagactacaaggaaaaaactgttattgacaagtcgcatctctctaagatagagacacggatcgacaccgctggtctcacagagaaggaaaaggatttcctggccacaagagagaaagagaaaggaaacgaagctttcaactccggcgactacgaagaagccgtgatgtactacacccgatccatttccgcgcttcctacagtggtagcatacaataaccgagctcaggccgaaattaagctccagaactggaactctgcatttcaagattgcgagaaagtactggagctggagcccggaaacgtgaaagccctgctccggcgtgccacgacatataaacatcagaacaaactccgggaggcaacagaggacctgagcaaggtgttagacgtggaacccgacaacgacctagccaagaagactctatcagaagtggagcgcgatcttaagaacagcgaagctgctagcgaaacacagactaaaggaaaacgaatggtcattcaggaaattgagaacagcgaggatgaggagggcaagtctggcagaaaacacgaagacggaggaggcgacaaaaagcctgccgagcccgctggagctgccagggctgcccagccctgcgtgatgggaaatatccagaagaagcttaccggcaaggccgaaggcggtaagagaccagctagaggcgctccacaaagaggccaaactccagaggccggagctgataaaagatcccctaggagggcttctgcagcggctgcggcaggcggaggagctactggccatcctgggggagggcaaggggcagaaaatccggctgggctgaagtcacaaggcaatgagctgtttagaagcggccagttcgccgaggccgcaggtaagtactcggctgcgatcgctctgctcgaacccgctggttctgagatcgcggatgacctttcaatcctgtactcaaaccgcgcagcttgttaccttaaagaaggcaactgctcgggttgtatacaagactgtaacagggctcttgagctccatccttttagtatgaagcccctgctgaggagagctatggcttacgagacactagagcagtacggcaaagcttacgtggattataagactgtcttacaaatcgattgtgggctgcagcttgccaacgatagcgtcaatcgcctctcccgcatcctcatggagctcgacggtcccaactggagagaaaaattatctcccatccccgctgtccctgccagtgtgccactgcaagcctggcacccggcaaaggaaatgatcagcaaacaggccggagacagcagcagtcaccgacagcagggaatcaccgacgagaagacgtttaaagcgctcaaagaggagggaaaccagtgtgttaatgataaaaattacaaggatgccctcagcaagtatagtgagtgccttaagatcaacaataaagagtgtgcaatatataccaaccgagcactatgctacctaaaattgtgccagttcgaagaggccaaacaggattgcgaccaggctcttcaacttgcagatggaaatgtcaaggccttctatcgcagagcccttgcgcataagggtctgaagaattaccagaagagcctgatcgaccttaacaaagtgattctgctggaccctagtatcatcgaagctaagatggaattggaggaggtgaccagacttcttaaccttaaggataaaactgcgccatttaacaaggaaaaggagcgcagaaagatagaaattcaagaagtgaacgagggcaaagaggagcccggtcgaccggcaggcgaggtgtcaatggggtgtcttgcatctgagaagggcggaaagtcttcgcggtcacccgaggatcctgagaaactgcccatcgccaagcccaacaacgcatatgaattcggacagataataaacgcgctgtctacccggaaagacaaagaggcctgtgcccacttgctcgcaataactgctcccaaggatctgccaatgttcctttcaaacaaactcgagggggatacctttctgctactgatccaaagcttaaaaaacaatctcatcgaaaaggaccccagtctggtttatcaacacctgctgtatctctctaaggctgaacggtttaaaatgatgctgacactgattagcaaaggtcagaaagaactgattgaacagttgttcgaagacttatccgacaccccaaacaaccatttcacactggaggatatccaggcccttaagcggcagtacgagctgtag

SEQ ID NO: 242143 - DNA, 1044 bp, synthetic construct
  misc_feature 1..1044: note = Description of Artificial Sequence: Synthetic coding sequence
  source 1..1044: mol_type = other DNA
atggctgctcaaagggggatgccatcttccgctgtaagggtgctggaagaggcccttggaatggggcttaccgcagccggagacgcacgcgacaccgcagacgctgtcgcagcagagggagcgtactatctcgaacaggtgacaattaccgaggcatctgaggatgattatgaatatgaggagatccccgacgacaattttagcataccagagggcgaggaggacctggccaaagcaatccagatggcacaggaacaggctactgacacagaaatcctggagagaaagaccgttctccctagtaaacatgcagtcccagaagtcatcgaagatttcctctgcaacttccttatcaaaatgggtatgacacggacactagactgctttcagtccgagtggtacgaacttattcaaaaaggcgtcactgagctgcgtactgtgggtaacgtcccagatgtgtatacccagatcatgcttctcgagaacgagaacaaaaatctcaaaaaggatctgaagcattacaaacaagccgctgataaagctagagaggacctgctcaaaatccaaaaagagagggatttccatagaatgcatcacaagagaatagtccaggagaaaaacaagcttatcaatgatctgaaaggattaaagctccactacgcatcctacgagcctaccatccgggtcctccacgaaaagcaccatactctacttaaggagaaaatgttgacttccctcgagcgcgacaaagtcgtcggccagatctctggcctacaggaaacgctgaagaaactccagcgaggccattcctaccacggccctcaaattaaggtggaccacagccgtgagaaagagaacgcgcctgagggtccaacacaaaaggggctacgcgaagctcgggagcagaataaatgtaaaactaagatgaagggaaacaccaaacagtggacggggaacagccagacgtggaataagacagtgccactgcaagatactattgggagacggcaggaaaataattctgcacaccagcacatcgactag

SEQ ID NO: 242144 - DNA, 1896 bp, synthetic construct
  misc_feature 1..1896: note = Description of Artificial Sequence: Synthetic coding sequence
  source 1..1896: mol_type = other DNA
atggctgcccagcgtggaatgccttcgtccgccgtcagggtcttggaggaggccctgggcatggggctgacagctgcaggagatgcccgtgatacagccgacgcagtggctgctgaaggcgcttactacctggagcaggtcaccataactgaggcgtccgaggacgactacgagtacgaggagattcccgacgataatttctctatccctgaaggtgaggaggatctggcaaaggccattcaaatggcacaggagcaggctaccgacactgaaatactcgaaagaaagaccgtcttgcccagcaagcatgccgtgcccgaggtaattgaggactttctgtgcaatttcctgatcaaaatgggaatgactagaaccctggactgttttcagagcgaatggtacgagctgattcaaaagggagtcactgagcttcggaccgttggaaatgtgcccgacgtgtatacccagatcatgctgctggagaacgaaaacaagaatttaaagaaggacttgaaacactacaagcaggcggctgataaagcgcgtgaagacttactgaaaattcagaaggagagggattttcacaggatgcatcataaaaggattgtgcaggagaaaaataagctgatcaatgacttgaaaggactgaaacttcattatgcatcctacgaaccaacaattagggtcctgcatgaaaaacaccatactctactcaaagagaaaatgctgacttcccttgagcgagataaggtggttggacagatttctgggctacaggaaacccttaagaaactacagagaggccacagctatcatgggccacagatcaaggttgaccacagccgcgagaaggagaacgcacctgaaggccctactcagaaaggcctaagggaggcacgcgagcagaataagtgcaaaaccaagatgaagggcaatacaaaggattccgaattccctattgatatgcagcctaatcccaatttgaatgtctcaaaagaatccttgagtcccgcaaagttcgactacaaattaaagaatattttcaggctgcatgaattgcctgtgtcatgtgtgtcaatgcagccccacaaggacattttagtgtcatgtggggaagatcgtttatggaaagtgcttgggctccctaagtgtaacgttttgctgaccggcttcggacacactgattggctgtctgactgttgctttcacccctcaggcgacaagcttgccaccagcagcggagatactaccgttaagttgtgggacctgtgtaagggagactgcatactgaccttcgagggtcacagcagggctgtgtggagttgcacatggcactcctgcggcaattttgttgccagttcctcacttgataagacatcaaagatttgggatgttaattcagagcggtgtaggtgcaccttgtacggccacaccgattcggtgaacagtattgagtttttccctttttctaataccctgctgacaagtagtgcagacaaaacactcagcatttgggatgcccgaaccggtatctgcgaacaaagcctctacggccacatgcactctattaatgacgcaattttcgatccaagagggcatatgatcgctagctgtgatgcatgtggcgtcactaagctctgggattttcggaagctcctgccaatcgtgtccatcgacatagggccatcaccgggaaacgaggtcaattttgattctagtggccgtgtcttggcccaagcttcaggcaacggtgtcattcacttgttagacctgaaaagcggggaaatccacaaactgatgggacacgaaaacgaggctcacactgtagtgttctcccatgatggagagatattattcagcggcggttcagatggcacggtacgaacgtggtcctag

SEQ ID NO: 242145 - DNA, 1614 bp, synthetic construct
  misc_feature 1..1614: note = Description of Artificial Sequence: Synthetic coding sequence
  source 1..1614: mol_type = other DNA
atgacaatgaatatgaagcgataccagatgactatattagctagccagaaggtgaagaaaatctggcagaagcagtttagatggcccaaaaacagactgcaaatcctcaagttttggtatgagttaatccagaagggggtcaccgagctgcgcacagtgggaaacgttccagatgtgtatacacagattatgctgctcgaaaacgaaaataaaaatctcaaaaaagacctgaagcactacaagcaagctgctgacaaggcaagagaagacctgctcaagatccagaaagaaagggacttccatcgcatgcaccacaaaagaatcgttcaggagaaaaataaactgataaacgatctcaagggtctcaaattgcattacgcctcgtacgagccaacaataagggttctgcacgagaaacaccacaccttgcttaaggagaaaatgctgacttcccttgaacgagataaagtagtgggacagatctccgggttacaagaaacattaaagaagctgcagcgcggtcactcctaccatggacctcagataaaggtagatcattcccgggagaaggaaaatgcaccagaaggacctacacaaaagggtctgcgggaggctcgggaacagaacaagtgtaaaacaaagatgaagggtaacacaaaggattctgagtttcccattgacatgcagcccaacccgaacctgaatgtgagcaaagaatcactgtctcctgccaaatttgactacaagcttaaaaacattttcaggctgcatgaactgcccgtgtcttgtgtctccatgcagccccataaggatatacttgtcagctgtggagaggatcggctttggaaggtgttggggcttcccaaatgcaacgtgctgcttacaggattcggtcatactgattggctcagcgattgttgcttccaccctagcggagacaagttggcgacgtcgagtggggacacaacagtcaagctctgggacttgtgtaaaggagactgtatactcacctttgaaggtcacagcagagcagtttggtcatgtacatggcattcgtgtggcaattttgtggccagttcctctcttgacaagacatcaaagatctgggacgtgaatagcgagaggtgtcgttgcactctgtatgggcatacagactctgttaatagtatcgaattcttcccgtttagcaacacactgctcacgtctagcgctgataaaaccctgagcatttgggatgcacggacaggtatctgtgaacagtcactctatgggcacatgcactcaatcaatgatgcaatctttgatcctcgaggccacatgattgcctcctgcgacgcgtgcggtgtgacaaagctgtgggatttcaggaagctactccccatcgtttctatcgacatagggccttcccccggaaacgaagtgaatttcgactccagcggcagggttctcgctcaggcctctggcaacggggtgatccatctattggacctcaagtcgggcgaaatccacaaacttatgggacacgagaatgaggcccacactgtggttttttcccatgatggagaaatcctgttttctggaggctccgacggcaccgtgagaacctggagttag

SEQ ID NO: 242146 - DNA, 756 bp, synthetic construct
  misc_feature 1..756: note = Description of Artificial Sequence: Synthetic coding sequence
  source 1..756: mol_type = other DNA
atgggggttggtaccaaggcccgagcgtctcactggcgacggctgttaagcctgggtgctactccagaagaacccctgctggatttcaaaatcccagatgacaatttttctattccagagggcgaggaagatctggcgaaggctattcagatggcacaggagcaggcgacagacactgagatcctggaacgcaagacggtattgccatcgaagcatgctgtgcctgaggtgatcgaggattttttgtgcaatttcctcattaagatggggatgaccagaacccttgactgcttccaatccgagtggtatgagctgatccaaaaaggtgttacagagcttcgaactgtgggcaacgtgccagacgtatacacgcagatcatgttattggagaacgaaaacaagaatctaaaaaaagacctcaaacactacaagcaggctgctgacaaagctagggaagacttattaaagattcagaaagagagggacttccaccgtatgcaccataagcgcatcgtgcaagagaagaataagctcatcaacgaccttaagggactgaagctgcactacgcttcttacgagccaacaattagggtcctgcacgagaagcatcatacccttctaaaggaaaaaatgctcacatccctggagcgagataaagtggtcggccaaatctccggccttcaagaaactctgaaaaagctgcagagaggacattcctatcacgggcctcagatcaaaggcaaatgcaagatgtag

SEQ ID NO: 242147 - DNA, 552 bp, synthetic construct
  misc_feature 1..552: note = Description of Artificial Sequence: Synthetic coding sequence
  source 1..552: mol_type = other DNA
atggcagctcagaggggcatgccatcttctgccgtgagagtgcttgaggaagccctggggatgggactgaccgctgccggagacgcacgggatactgctgatgccgtggcagctgagggcgcatactacctggaacaggtgacaataactgaggcctcagaagacgattatgagtacgaggaaattccagacgacaactttagtatcccggagggcgaagaggatctggccaaggctatacagatggctcaggagcaggccactgacactgaaatcctggaacgcaaaacagttttacccagcaagcatgcagtgcctgaggtgattgaagactttctctgcaactttctgatcaagatgggcatgacccggacactggactgctttcagtccgagtggtacgaattgattcaaaaaggcgtcaccgagctacgtaccgtggggaacgtccccgatgtgtacacgcagatcatgcttctcgaaaatgagaacaagaatctgaagaaagacttgaagcattacaaacaggctgcagaatatgtcatcttctag

SEQ ID NO: 242148 - DNA, 768 bp, synthetic construct
  misc_feature 1..768: note = Description of Artificial Sequence: Synthetic coding sequence
  source 1..768: mol_type = other DNA
gacagtgaatttccaatcgatatgcagccgaacccgaacctgaatgtgtctaaagagtctttgtcaccagctaagttcgattataaactgaagaacatcttccggctccatgagctgccagtgtcatgcgtgtctatgcagccgcataaagacatccttgtgtcatgtggcgaggaccgactctggaaggtcctgggattgccaaagtgcaacgttctgcttacaggctttggtcatactgattggttgtctgactgctgtttccaccctagtgaaagatgtaggtgtacactgtacgggcatacagactccgttaattctatagaattttttccattttccaatactctgttaacctccagtgccgacaaaacccttagtatttgggatgcccgaacaggaatctgtgagcagtccctgtatggacatatgcattccataaatgatgcaattttcgatccccgagggcacatgatcgcaagctgtgacgcatgtggggtgaccaagttgtgggatttccggaagctgttaccgatcgtgtccattgatattggcccatcccccggaaacgaagtgaacttcgacagctctggcagggtactggcccaggcatctggaaatggggtgattcacctcttggatctgaagtccggggagatacataaactcatggggcatgagaatgaagcccatactgtagtcttttcgcacgacggggagatcctctttagcgggggtagtgacggaaccgtcaggacctggtcttag

SEQ ID NO: 242149 - DNA, 1314 bp, synthetic construct
  misc_feature 1..1314: note = Description of Artificial Sequence: Synthetic coding sequence
  source 1..1314: mol_type = other DNA
atgaggaggagctctcgaccaggatcagcttcttcttctcgcaagcatacacctaacttctttagcgaaaacagttctatgtctatcacatcggaggatagcaagggactgcgctctgctgagcccggtccaggagagccggaaggacggagagccagggggccttcttgtggagagcccgctctgtcagcaggggttccgggagggactacctgggccggttcttctcagcagaagcctgcccctcggtctcataattggcagactgcttgtggagctgccactgtgcgcggtggagcatccgagcctactggcagtcctgtggtgagcgaggagccacttgacctgttgccaacccttgacctgcgacaggaaatgcctccgccacgtgtattcaaatcattcctgtctctgttgtttcaaggtctgagcgttttgctaagtctcgcaggagacgtattggtgtccatgtatcgcgaggtgtgtagcatacgattcctgttcacagcagtctccttactgagcctttttctgtctgccttctggctcgggctcctgtatctggtaagtccactggagaacgagccaaaagaaatgctgacattaagcgaataccatgaaagagtgaggagccagggtcagcaactccaacaactacaggcagaactggataaactccacaaggaggtgtctacagtaagagcggctaacagcgaacgagtggccaagctcgtgttccagagacttaacgaggactttgttagaaaaccagactacgctctgtcatccgtgggcgcatctatcgacctgcagaaaacctcccatgattatgcggatagaaatactgcttacttttggaaccggttctctttttggaattacgcacgacccccaactgttattctcgagcctcatgttttcccgggaaactgctgggcgttcgagggagaccaaggtcaggtagtcatccagttacccggtagggtccagttgagcgacatcacactccaacatcctccacctagcgtggagcatacagggggtgccaattccgcaccacgcgacttcgctgttttcggacttcaggtctacgacgagaccgaagtgtcattggggaagtttactttcgatgtggagaagtccgaaatccaaaccttccatctccagaatgatcctcccgctgcatttcctaaggtcaaaatccagatcctgtctaattggggacatccgagatttacctgtttgtatagagtgcgagcccatggcgtgcgcacctctgaaggagccgagggttccgcccaaggaccacattag

SEQ ID NO: 242150 - DNA, 1377 bp, synthetic construct
  misc_feature 1..1377: note = Description of Artificial Sequence: Synthetic coding sequence
  source 1..1377: mol_type = other DNA
atgagccagcgtcaggtgctgcaggtctttgagcagtatcaaaaagcccgaacccagttcgtccagatggttgctgagttagcaaccaggccgcagaatattgagaccctgcagaacgccggtgtgatgagtctgctacgaaccctgcttctagacgtagtgcctaccattcagcaaacggccgcacttgccctaggcaggctagccaattacaatgatgatctggccgaggccgtggtgaagtgcgacattctgccccagctggtgtattctcttgcagaacaaaatcgtttctacaaaaaagcagcagcattcgttctgcgtgcggttggtaaacattctccacagctcgctcaggccattgttgactgcggagcgttggacacactggtgatctgtctggaggacttcgacccgggagtgaaagaagccgctgcgtgggcactgaggtacatagccagacataacgcggaactgtctcaggccgtcgtggatgccggagctgtccccctcctggttctgtgcatacaggaaccagagattgcgctcaaacggattgctgcttctgccctgtcagatattgccaaacactcccccgagctcgctcagactgtggtggatgcaggtgccgttgctcacttggcccagatgatcctgaacccagatgccaagctaaaacatcagatactcagcgcgctgtcacaggtttcgaaacactccgttgacctcgcagaaatggttgtggaggctgaaattttccccgtagtactgacctgtctaaaagataaagacgaatacgttaagaagaatgcttccactctgataagagagattgcgaagcacaccccagaactcagtcagctcgtggtcaacgccggaggggtagcggctgttatcgattgtataggatcttgcaaaggtaatacgcgactgcctggtattatgatgcttggctacgtggctgctcattcagagaacctggccatggccgtcatcatttctaagggtgtacctcagctatccgtctgcttgagcgaagagccggaagaccacatcaaagctgctgctgcctgggccctgggacagatagggcgtcacactcctgagcacgcaagggccgtcgccgttacaaacacactccctgttctgctttctttatatatgagtacagaatccagtgaggacctccaggttaagtcaaaaaaggccattaaaaacatcttacaaaagtgcacgtaccttcctgccctcgagccttttctgtacgacgcacctccaaatattttaaagcacgtggtgggccagttttctaaagtgttgtttccttggattttcagatacacatctgcggagggaggtcagctctcaacgacatag

SEQ ID NO: 242151 - DNA, 813 bp, synthetic construct
  misc_feature 1..813: note = Description of Artificial Sequence: Synthetic coding sequence
  source 1..813: mol_type = other DNA
atgtcacagaggcaggtactccaagtgtttgaacagtaccagaaggctagaacccagtttgttcagatggtagcggaattggctaccaggccccagaacatagaaaccttgcagaacgcaggggtcatgagtctgctgaggactctgctgttggacgtcgtgcctaccattcaacagacggccgcactcgccttgggaagactggcaaactacaatgatgacttagctgaagcggtggtaaaatgtgacatcctcccacagttagtctattcactggctgaacagaacggagtcccccagctgtctgtctgcctctctgaagagcctgaggatcacatcaaagccgctgcagcctgggccctgggccagatcggcaggcacacgccagaacatgcccgagcagtggctgtaacaaacacactgccagttctgctgtctttgtatatgtcaaccgagagctcagaagacctgcaggtgaagtctaagaaggccattaagaacatcctgcagaagtgcacctatctacccgctctggagccatttctttacgacgctcctcccaatatcctgaagcatgtcgtggggcaatttagtaaagttcttccccatgatagcaaggccagacggctgtttgtcaccagcggtggcctgaaaaaggtgcaggagattaaggcagagcctggcagtctactgcaggagtatattaatagcataaatagttgttatcctgaggagattgtgcgttattactctcctggctacagtgataccctactgcagagagtggactcataccagccattaaataactag

SEQ ID NO: 242152 - DNA, 1758 bp, synthetic construct
  misc_feature 1..1758: note = Description of Artificial Sequence: Synthetic coding sequence
  source 1..1758: mol_type = other DNA
atgtcccagcgacaagtgctccaggtgttcgagcagtaccagaaggccagaacgcagttcgttcagatggtggccgaactcgccactcgaccacagaatatcgaaactttgcagaacgccggtgaaccgggtgctcgcacgccagtggctcctcgagccttgtcaccacgccgtctgcggccagctgccctgccagttgaactgcttggatcccgctccgtgggcaccggcgttcgaaagagtatccactccttccagagggtgtttggcggacaggctgagcgtgtgaagctgccagatggctgtggtcgatgcgctctctccctgtttccttccagtctgcacaccggagtgatgagtctactcaggactcttctccttgacgtcgtgccaactatacagcaaaccgctgcgctcgcactgggccgacttgccaattacaacgatgacctggcggaggcggtggtgaagtgcgatatacttccacagcttgtgtattctctggccgaacagaatcggttctataagaaagcagctgcctttgtgttgcgcgctgttggaaaacacagcccccagctcgcgcaggcaattgtcgactgcggtgccttagatactctggtgatctgtctggaggactttgatccaggcgtaaaagaggcagctgcctgggctcttagatatatagctcgccacaatgccgagttgagtcaggcagtggttgacgccggagcagtgcctctgctcgtgttgtgtattcaggagcctgagatcgcactgaagcgcattgccgcatctgctctctccgacatcgccaaacacagccctgaacttgcccagactgtcgttgatgcgggtgcggtcgcccaccttgctcagatgattctcaatccagacgcaaagctaaagcaccagattcttagcgccctttcacaggttagcaagcactcagtcgacctcgccgagatggtggtcgaagctgaaattttccctgtggtcctcacgtgcctaaaggataaggacgagtacgtgaagaagaatgcctccaccttgattagggaaatcgctaagcacacacccgagttgtctcaactggtggtgaacgccggtggcgtggcggcagttatcgattgcatcgggtcttgcaagggaaatacccgcctcccgggtataatgatgctgggctatgtcgcagcgcactccgaaaacttggccatggccgttataatatctaaaggtgtgccacagctgagtgtttgtctgtccgaggaaccagaagaccacatcaaagcggcagctgcctgggcgcttggtcagattggcagacatacccctgagcatgctagagcggtcgcagtaacaaacactctcccggtcctcttgtccctgtatatgtccaccgaatcctccgaggatttgcaagtcaagagcaagaaggcaatcaagaatatacttcagaagtgcacctacctgccagcactcgagccgttcttgtatgacgcccctcctaatattttgaagcacgtggttggacagttttctaaagttttgcctcacgactccaaggctagaagactgtttgttactagcggcggtctcaagaaggttcaggaaatcaaggctgagccgggaagcctgctgcaggagtatataaacagcatcaactcctgctaccctgaggagattgtgcggtactactctccaggctactcagacactcttctgcagcgggttgacagttatcagcccttgaataactag

SEQ ID NO: 242153 - DNA, 1530 bp, synthetic construct
  misc_feature 1..1530: note = Description of Artificial Sequence: Synthetic coding sequence
  source 1..1530: mol_type = other DNA
atgagccagcgccaggtgctgcaggtctttgagcagtatcaaaaggccaggacccagtttgtgcagatggtcgctgagctcgctacgcgcccacagaacatcgaaaccctgcagaatgctggcgtcatgtcactgctgcgtactctcttactcgatgtagtgcccacgattcagcaaactgctgcactcgcccttggcaggcttgccaactataatgatgacctggcagaggccgtggtgaaatgcgacattctgccacagttggtgtattcactggctgagcagaatcggttctacaaaaaggctgctgcctttgtcttacgggctgtcggcaagcactcaccccaactcgcccaggctatcgtagattgtggagcgctggatactctggtgatttgtctagaggacttcgaccctggtgtcaaggaggcggctgcttgggctctgcgatatatcgcacggcacaacgccgagctatcccaagccgtggttgacgctggtgcagtgcccctactggtattgtgtatacaggagcccgaaatcgcccttaagaggattgcagctagcgcactcagcgacattgctaagcattcccccgaactggcacaaactgttgttgacgctggcgctgtggcacatttggctcagatgattctgaacccagatgccaaactgaaacatcaaattttgtcagcattgtcccaggtgagtaagcacagtgttgacctagccgagatggtggttgaagcagagatttttcccgttgtccttacatgccttaaggataaagatgagtacgtgaaaaagaacgcttccactcttatcagggagattgcgaagcacactccagagctgagccagctagttgtcaacgccggaggtgtcgccgcagtgatagactgcataggttcttgtaaaggcaataccagactgcccggtatcatgatgctggggtatgttgcggctcattctgagaatctcgcaatggctgttatcatctcgaagggagttccccagctatcagtgtgcctgtccgaagagccagaggaccatattaaagctgccgctgcctgggcactgggccagattgggaggcacacacccgagcatgcacgggcagtcgctgtgaccaataccttaccggttttgctctcactgtacatgtctactgaatcaagcgaagatctgcaagtaaagagcaaaaaagccattaagaatattctgcaaaagtgcacatacttaccggcactggaaccgtttctttacgacgctcccccaaacattctgaaacatgtggtcgggcagtttagcaaggtgcttccacacgactccaaagcacggagactgttcgtgacatctggcggactgaagaaagtgcaggagatcaaggccgagcctggttctctgctgcaggagtatattaatagtattaacagttgctatcctgaggagatcgtcagatattattccccaggttattctgatactttactgcaacgtgtggattcttaccagccattaaacaattag

SEQ ID NO: 242154 - DNA, 741 bp, synthetic construct
  misc_feature 1..741: note = Description of Artificial Sequence: Synthetic coding sequence
  source 1..741: mol_type = other DNA
atgtcacaaagacaggtgctgcaggtctttgagcaatatcagaaggcacggacgcaattcgtccagatggtagcggagcttgcaacccgcccacagaatattgagaccctgcagaatgcaggagaaccaggtgctcgtacgcctgtcgcgccaagagccctgagccccagacgcctcagaccagctgcactgccggtagagctgcttggttcaagaagcgtcgggaccggggtgaggaagtctattcacagctttcagagggtgttcggcggtcaggccgaacgcgtcaagctacctgacggttgcggcaggtgcgccctcagcttgttcccctctagcctccacaccggagtaatgagcctgctccgcactctgctactcgacgttgtgcctaccattcaacaaaccgcggctctcgctcttggaagacttgccaattacaatgatgacctggctgaggctgtggttaagtgcgacattctacctcagctggtatatagcttggcagaacagaatagattctacaaaaaggccgctgccttcgttcttagagccgtgggcaaacattctcctcagttggcccaggcgattgtagactgcggcgctctcgacacccttgttatatgcctggaggactttgaccctggggtcaaggaagctgctgcctgggcacttaggtatattgcccgtcataacgcggagctgagccaggccgtggtagacgccggtgccgttccatag

SEQ ID NO: 242155 - DNA, 576 bp, synthetic construct
  misc_feature 1..576: note = Description of Artificial Sequence: Synthetic coding sequence
  source 1..576: mol_type = other DNA
atgtctcagaggcaggtactgcaagtattcgagcagtaccaaaaggcgaggacccagtttgtccagatggtggccgagttggcaacaaggccccagaatattgaaacactgcagaacgcgggagtgatgtccctcctgcggaccctgcttttggacgtggtccccaccattcagcagacggccgctcttgcactgggcaggctggctaactacaacgatgatctggccgaggcagtggtgaagtgtgatattctgcctcagctcgtctactctttagccgaacagaatggcgtgccccagctatcagtatgcctcagtgaagagccagaggatcatattaaagctgcagctgcctgggctctcggtcagattggacgccatacaccagaacacgctcgtgccgttgccgtgaccaatacgctgcccgttctgctttctttgtacatgtccacagagagcagtgaggatctgcaggttaaatccaaaaaggccatcaaaaacatactccaaaagtgcacttatctgcctgccttggagcccttcttgtatgatgccccaccaaatattctcaaatag

SEQ ID NO: 242156 - DNA, 1455 bp, synthetic construct
  misc_feature 1..1455: note = Description of Artificial Sequence: Synthetic coding sequence
  source 1..1455: mol_type = other DNA
atgcactcactcaccatggatctttggattccaaacgggcaggcgggtgtcatgtcccttctcaggacacttctgctggatgtggtccccactatacagcagaccgcagcacttgccctcggcaggctggcaaactataatgacgatctggccgaagctgtggtcaaatgcgatatactcccacagctagtgtactccctcgctgagcagaatcgattctacaaaaaggcagccgcttttgtgctgagagcagtcgggaagcatagcccacaactggctcaggctattgtcgactgtggggcactcgatacccttgtgatctgtctggaggattttgaccccggtgtcaaggaagctgccgcatgggccctaaggtacatagcaaggcataatgccgagctgtcacaggccgtcgtggacgcgggtgccgtcccactgttggttctgtgcatacaagagcctgagatcgcgctgaagcgtatcgcggcatcggcactgtcagatattgcaaaacattcacccgaactcgcgcaaacagtagttgatgcgggagcagtagcacatcttgcgcagatgattctcaacccggacgcgaaactgaagcatcaaatactctccgcactttcccaggtaagcaagcattcagtcgatctcgcagagatggtcgtggaagccgaaatcttcccagtagtactgacctgtctgaaagataaggacgagtacgtgaagaagaacgccagcactctgatcagggaaatagccaagcatacccccgagctgagtcagttagtggtcaatgcaggaggcgtggcagcagttatcgactgcataggctcttgcaaggggaacacccgccttcccggtattatgatgctaggttatgttgcagcgcactccgagaatctggccatggcagtcattatttcaaaaggagtacctcaactgagcgtttgcctgagcgaggagccagaagaccacatcaaagctgcagcggcatgggctctgggccagatcggtcgccacactcctgaacatgctagggctgtcgccgttacaaacacattgcccgtactgctttctctgtatatgtccacagagtcttccgaagatttgcaggtgaaatctaaaaaggctattaagaacatattgcagaagtgcacctacctaccagctctggaaccattcttatatgatgcacctcccaacatactaaagcacgtagtcggacaattcagtaaagttctgccccatgactcaaaagctaggcggctgttcgtcacttccggagggctcaagaaggtacaagagatcaaagccgagcccggatccctgcttcaagagtatatcaattctattaacagctgttacccagaggagatcgtgagatattactctcctggttactccgacacactcctgcaacgagtcgacagttatcaacctctgaacaactag

SEQ ID NO: 242157 - DNA, 1506 bp, synthetic construct
  misc_feature 1..1506: note = Description of Artificial Sequence: Synthetic coding sequence
  source 1..1506: mol_type = other DNA
atggagacaaatgaatcgacagagggctctagatctcgatccagaagtctggatatccaaccttcgtccgagggcctaggaccaacaagcgagccatttccgagtagcgacgactccccaagaagcgccctcgcagcagctacagcagcggctgcagccgcagctagcgcagccgcagccaccgccgctttcacaactgccaaggctgccgcactaagcaccaaaaccccagcaccgtgtagtgagttcatggaacctagcagtgatcccagtcttctgggcgagccctgcgcgggacccggtttcactcataatattgcccacggctcactgggttttgagcctgtgtacgtgtcttgcatagcccaggacacttgcactaccacagatcactcctcaaatccaggtccagtccccggttcttcttcggggcctgttcttgggtcttcctcaggggcagggcatggctctggcagcggttctggccctgggtgcggaagcgtcccaggtagtgggtcaggcccaggccctgggtccgggcctggcagtggtccgggacatggaagcgggtctcatcctggtcccgcaagcggacccggtcccgatactggcccagatagcgaattaagcccatgtatcccacctggctttaggaatctggtggctgacagggtgcctaattatacaagttggagccagcattgcccctgggagccacaaaaacaacccccatgggaatttctccaggttctggaacctggggcacgtggcttatggaagcccccagacatcaagggcaaattgatggtgtgctacgaaacgctccctcgtggtcaatgtttactgtataactgggaggaagagcgagcgactaatcacctggatcaagtcccaagcatgcaagacggctcagagtcctttttctttcgccacgggcatagaggcctcttaaccatgcagctgaaatcacctatgccatcctccactactcagaaagattcctaccagcctcctggaaatgtctactggccgcttagaggcaagcgcgaggctatgttggagatgctgttacagcaccagatctgtaaagaggttcaagctgagcaggaacctactcgcaagctgttcgaggtggaatcggtgacacaccacgactaccgtatggagctggcacaagcagggaccccagctcctactaagccacatgattacaggcaggagcagccagaaacattctggatccagagagcaccccaactgcccacctggtggcctctgcctacccaagtgcctgcggctgaagattacttgacatggaaagagtgggggttcactggcgtccaggaagtcctgtctgccctgctgcgggctactccgggtgaatatagtgtcaacatatgcggcatgaacgagcacccagtatgcagccggacctggactaacagactctgccaccaagagatgggctctaagaaaactgtgacacaggaggaccgagggtggtag

SEQ ID NO: 242158 - DNA, 1458 bp, synthetic construct
  misc_feature 1..1458: note = Description of Artificial Sequence: Synthetic coding sequence
  source 1..1458: mol_type = other DNA
atggagactaatgaaagcactgagggaagccgttcgcgcagccggagccttgacatccagcccagttctgagggcctcggcccaaccagtgagccctttccctcctctgacgacagtcctcggtccgctctggcagccgctactgctgcagcggcagctgctgccagcgcagccgcagccaccgctgccttcactactgccaaggccgcagccctttcgaccaagacaccagccccatgctctgaattcatggaaccttcgagcgacccgtctctgctgggagagccctgcgcgggaccaggcttcacacacaatattgctcacggcagtctcggctttgaacccgtgtacgtgagctgtattgcccaggatacctgtactactaccgaccacagctccaaccctggtcctgtgccaggatctagctctggcccagtattaggaagcagttctggagctggccatgggtcgggtagtggaagtgggccagggtgcggttccgtgcctggttcaggctcggggcctgggcctgggagtggacccggatccggtcctggccacggttctggctctcacccgggacccgcttccggacctggcccagatacaggaccagatagcgaattaagcccctgcatcccaccaggcttcagaaacctggtcgccgatagggtgcctaattacacttcatggtctcaacattgtccctgggagcctcaaaagcaacccccatgggaattcctacaagttctggagcccggagctagaggactgtggaagcctccagatataaaggggaaactcatggtctgctatgaaacacttcccagaggccagtgcctcctgtataattgggaagaggaacgcgcaactaatcacctggaccaggtacccagcatgcaagatggttctgagagttttttttttcgacatggtcatcggggactgctgactatgcagttgaaaagccctatgcctagcagcaccacacagaaggactcataccagcctcctggcaatgtgtactggcccctgcgtgggaagagggaggccatgctagagatgctcctgcagcaccagatatgtaaggaagtccaagcggaacaagaaccaacacgtaaactgttcgaagtagagtccgttacacatcacgattacaggatggagttggctcaggcaggcaccccggctcccaccaagccccatgactatcgccaggaacagccagagactttctggatccagcgggctccacagctgcccggagtctcgaacattagaacactcgacaccccctttcgcaaaaattgctccttcagtactccagtgcctctcagcctcgggaagctcctaccctatgaacccgagaactacccctaccaactgggggagatctcttccttaccatgtcccggagggaggctcggaggcggaggaggcagaatgacccccttctag

SEQ ID NO: 242159 - DNA, 1281 bp, synthetic construct
  misc_feature 1..1281: note = Description of Artificial Sequence: Synthetic coding sequence
  source 1..1281: mol_type = other DNA
atggaaactaatgaatccacagagggcagtagatcccggagtcggagcctggacattcagccaagctctgaaggactgggacctacatccgagcctttcccctccagcgacgattcccctaggtctgcccttgccgctgccactgccgctgctgcagcagccgcatctgctgcggctgccactgctgcctttacaaccgccaaggctgccgcactaagcacaaagacgcccgctccctgtagcgaattcatggagccaagcagcgacccgagtttactgggggagccatgcgcgggtcccggatttacacacaacattgcccatgggtctctgggttttgaacctgtgtacgtaagctgcatcgctcaggacacgtgcacaactacagatcacagttcaaatcccggtcctgtgcccggaagctcctccgggccagttttgggatcaagctccggagcgggtcatggctctggttccgggtcaggacccggatgcggatctgtgcctggctccggtagcggccctgggccaggcagcggacctgggtccgggcctggccacggctccggctcacatccaggcccagcctctgggccagggccagataccggtcccgattctgagctgtccccttgcattcctcctggattccggaacctggttgctgatcgcgtccccaactacacaagctggtcgcagcactgcccttgggaaccacaaaaacagcctccctgggagtttctgcaagtgctggaacccggagcaaggggcctgtggaagcctcctgatatcaaagggaaactcatggtgtgctacgagacactgcctcgtgggcaatgcctattatacaactgggaggaagaacgggcaaccaaccacctagatcaggtgccctcgatgcaagacggcagcgaaagtttcttctttcgccatggccatcgaggcctgctcacaatgcagcttaagagtcctatgccaagttcgactacccaaaaggactcctaccagccgcctgggaacgtgtattggccacttcgtggcaagagagaagccatgttagaaatgttgttgcaacaccagatttgcaaggaggtgcaggcagagcaggagcccacaagaaagctttttgaggtcgagtcagtaactcaccacgactatcgcatggaattagcacaggctggcacccccgcacctacgaaaccacacgactacagacaggaacaacctgagaccttctggattcagcgtgctccccaacttcccgtatgtgagggtgattag

SEQ ID NO: 242160 - DNA, 3966 bp, synthetic construct
  misc_feature 1..3966: note = Description of Artificial Sequence: Synthetic coding sequence
  source 1..3966: mol_type = other DNA
atggagctggaagatggtgttgtctaccaggaagagcccggaggcagcggcgcagtgatgtccgagagggtctctgggctggccggaagcatctacagggagtttgagcggttgattggcagatacgacgaggaagtagtaaaggaactgatgccgctcgtggtggctgtgctggagaacttggactctgtttttgctcaagaccaggaacaccaggttgagctggagctcctgagagacgataatgagcagctgatcactcagtatgaacgcgagaaggctcttagaaaacacgcagaggaaaagtttatagagtttgaggactctcaggagcaggaaaagaaggacctccagactcgcgtggagtcattggaatcccagaccagacaactggaactgaaagctaaaaattacgccgaccagatttcacgactcgaagaacgcgaggccgagttaaaaaaggaatacaatgcgctgcaccaacgccacaccgagatgatccataattatatggagcatctcgagcggacaaaattacatcagctctccggcagcgaccagttagaatccaccgcacactcccgtatccgcaaagagaggcccatcagtttgggtatcttcccgctacctgccggagatgggctgctaacccctgatgcacaaaagggcggagagacacctggaagcgagcagtggaaattccaggagttatcccagcccaggtctcacacgtccctgaaagtcagcaattctcctgagccgcagaaggctgtcgagcaggaggatgaactatcagacgtgagccaggggggatcaaaagctactaccccagcaagtacggccaattcggatgttgctacaattcctacagacacacccctgaaggaggagaatgaagggtttgtgaaagtaacagatgcccctaacaaatcagaaatctcaaaacacattgaagttcaggtcgcccaggagacaagaaatgtcagcacagggtctgccgaaaacgaagaaaagagtgaggtgcaagctataatagagagcactccagagctagatatggacaaggacctgtctgggtataagggttcatctacacccaccaagggaattgagaataaagccttcgaccgtaacaccgaatcactgtttgaggagctcagctctgccggtagtggtctgataggtgatgtggacgagggggctgacctgctgggtatggggagagaagtggaaaacctgatactcgaaaatacacagctgctcgaaaccaaaaatgcactgaatattgtaaagaatgacctgatagctaaagttgatgaactgacctgcgagaaggacgtccttcagggggagctggaagctgtgaaacaggcgaaactgaagctggaggaaaagaatcgtgagctggaagaagaacttcggaaagctcgagcagaagccgaggatgcccgacaaaaagccaaagatgacgacgattcagatataccaacagcccagcggaaaagattcactagagtggagatggcgcgagtgctgatggaaaggaaccagtacaaggaaaggctgatggagctccaggaggccgtgagatggacagagatgattagggcctcaagggagaatcccgcaatgcaggaaaaaaagcggagtagcatttggcagttcttctctcgactcttttcgagcagcagtaataccactaagaagccggaacctccagtgaatctgaagtacaatgccccaacatcgcatgtaacaccgtcagtgaagaagcgtagctccactctttcccagttgcctggcgataagtccaaagccttcgatttcctaagcgaagagacggaggcatcgctggcgagccgaagagagcagaagcgcgagcaatatcgtcaagttaaggcccatgtgcagaaggaagacggaagggtccaggccttcggatggagccttccccagaaatataagcaggtaaccaacggtcaaggagagaataaaatgaagaacctgcctgtgcccgtgtatctaagaccactggacgagaaagatactagcatgaaactctggtgcgccgtcggggtcaatttgagcgggggaaaaacaagggacggtggctcggtggtcggcgcttctgtattctataaggatgtggctggactagacacagagggatccaaacaacgtagcgctagccagtcctccctggacaagctggaccaagagctgaaggagcagcagaaagaattaaagaaccaggaggagctgtcaagcctcgtctggatctgcacctctactcactcagcaaccaaagtgctgattatcgacgcagtacagccgggtaacattcttgatagtttcaccgtctgtaattcacacgtgctgtgtatcgcgtcggtacccggtgccagagagaccgattacccagccggagaagaccttagtgagtctggccaggtcgataaggcttcactttgcgggagcatgaccagtaattcctctgctgaaactgactcacttctgggcggaattacggtggtgggatgttcagcggaaggtgtgaccggcgctgcaacaagcccctctactaacggcgcatctcccgtgatggataaacccccagaaatggaggcagaaaacagcgaggtggacgagaacgtccccacagccgaggaagccaccgaagccactgagggcaatgctggatccgcagaagacacagttgacatttcacagaccggggtatacacagagcatgttttcaccgatcccttaggcgtgcagatccctgaggacttaagccccgtctaccagagttctaacgattcagatgcttacaaggaccagatttctgttttgcccaatgagcaggatttagtgcgggaggaggcgcagaaaatgagctcactgcttcctactatgtggctgggcgcacaaaatggctgcttatatgttcactcctccgtagctcaatggcgcaagtgcctgcactccatcaaacttaaggactcaatcctctcgatcgtgcatgtgaaggggatcgttctagtcgccttggccgatggaacactggccatctttcataggggtgtcgacggtcagtgggacctttccaattaccacctcctggatcttggaaggccacatcactctattagatgcatgaccgtggtgcacgataaggtgtggtgcggatatcgtaacaaaatctacgtggtacagccaaaagctatgaagatcgagaaatcctttgacgctcacccaagaaaagagtcccaagtacggcagctcgcctgggtgggcgacggtgtttgggtgtctatccgactcgactctaccctgagactctaccatgctcatacctatcagcatctccaagatgtggacattgagccttatgttagtaaaatgttaggaactggcaagctgggcttctcgtttgttcgaataaccgcgctcatggtctcgtgtaacagactttgggtgggcacgggcaatggcgtaatcataagcattcctctcaccgagacaaacaaaacgagcggggtgccgggtaacagaccgggttctgtcattcgagtgtatggagatgagaattccgataaggtgacccctggaacatttattccttattgttctatggcccacgcacagctgtgcttccacgggcacagggacgcagtcaaattctttgtggccgtccccggacaggtaatctcaccccagagcagctcctccggcacagatctgaccggtgataaagccggtccttctgcacaggagcctggttcacagactcctctgaagtcaatgctggtaatttccggcggtgaagggtacattgattttcggatgggggatgaagggggtgagagcgaattgctgggagaggaccttccacttgaaccgtcggtgacaaaggcagagagaagtcacctcatcgtctggcaggtcatgtatggcaatgagtag

SEQ ID NO: 242161 - DNA, 3924 bp, synthetic construct
  misc_feature 1..3924: note = Description of Artificial Sequence: Synthetic coding sequence
  source 1..3924: mol_type = other DNA
atggaactcgaagatggagtagtgtatcaagaggagccaggcggaagtggcgctgtcatgtcagaacgcgtcagcgggctcgccggatcgatttaccgcgaatttgaaagacttattggcagatacgatgaagaggtcgtcaaggagctgatgcccctcgtggtggccgttctggagaatttggacagcgtgttcgcacaagatcaggaacaccaggtggagctcgaacttttgagagatgataatgagcagctgataacacagtatgagcgggaaaaagcgctgcgcaaacacgcggaagaaaaattcattgaatttgaagactctcaggaacaggagaaaaaagacttgcagactcgcgtcgagtccctagagagccagacccggcaattggagttgaaggcaaaaaactacgccgaccagataagcaggcttgaggaacgtgaagcagagttgaagaaggaatataacgccctgcaccagagacacactgaaatgatccataactacatggaacacctcgaacgcactaagctgcaccaactgagcggaagtgatcagctcgaaagtaccgctcactcccgcatcaggaaagagcgcccaattagcctaggtatttttcctctcccagcaggcgatggacttctgacgcccgatgctcagaagggaggcgagacccccggttcagagcagtggaagtttcaggagctctctcaaccgcgaagccacacaagtctaaaggacgaactctcagacgtgagtcaagggggtagcaaagccaccacacctgcatctaccgcaaactctgacgttgccacgattcctaccgacacaccactgaaagaagagaatgagggatttgtgaaagtcaccgacgcgccaaataaatcggagatcagtaagcacattgaggtgcaggtggctcaggaaaccagaaacgttagcacaggtagtgcggaaaatgaggaaaagtccgaagtgcaagctataatcgagagcacgccagagctggatatggataaagacctcagcgggtacaaggggagctctacccctacaaaggggattgaaaataaggccttcgaccgcaatacagagtctctgttcgaggagttgtcgtccgccggaagcggtctgatcggcgatgtagacgagggtgctgaccttctggggatgggcagggaggtggagaaccttattctcgagaacacccagcttctagaaacaaagaacgcactcaacatcgttaaaaacgacctgattgcaaaggtagatgagctgacctgcgagaaggacgttctgcagggcgaactggaagccgtgaaacaagcaaagctgaagcttgaagagaaaaatcgcgagcttgaagaggagttacgtaaggcacgggcagaggccgaagatgccaggcagaaggccaaggacgatgatgacagcgacatacctactgcacagagaaagagattcacccgggttgagatggcaagggttctcatggagcggaatcaatataaagagagactgatggaactacaagaggccgtgaggtggactgagatgatcagggcttcaagggagaaccccgctatgcaggagaagaagcggagcagtatttggcagtttttttctaggctttttagtagttcttcaaacaccaccaaaaaacctgaacctcccgttaatctcaagtacaatgctccgacgagtcatgtgacaccttcggtgaagaagcgcagttccactttaagccagttgccaggagataaatcaaaagcattcgatttcctttccgaagagactgaagcctcacttgcctcccgcagggagcagaaaagggaacagtacagacaagtgaaggcccacgtacagaaagaggacggacgggttcaggcgtttggctggtccttaccacagaaatataaacaggtgacaaacggacagggggaaaacaagatgaaaaacctacctgtgccggtgtacctccgaccattggacgaaaaagatacaagcatgaaactatggtgcgcggtgggggtaaatttaagtggagggaaaacacgcgacggcggatcagtagtgggggcatcagtgttctataaagatgtggccggactggacactgaggggtcaaagcagaggtccgcctcccagtccagcctggataagttagaccaggaactcaaagaacagcagaaggaactcaagaatcaagaagagcttagctccctggtgtggatatgcaccagcacgcacagcgctacaaaggtactgattattgacgcagtacagcctgggaacattcttgacagctttactgtatgtaattctcacgttttatgtatcgccagcgttcctggggctagggaaaccgactatcctgctggtgaggatctgtccgagtcaggacaggtggataaggcctctctgtgtggctctatgacctctaatagctccgctgaaacagatagcctgctcggaggaattaccgtggtgggctgtagcgcagaaggcgttaccggcgcagcaacctcaccttctaccaacggcgcatcccctgtgatggacaaaccccctgaaatggaagccgagaattcagaagttgacgagaatgtgccaaccgccgaggaggctactgaagccaccgagggcaatgcgggtagtgcggaagacaccgtggatatcagtcaaaccggagtttatacggagcacgtcttcactgatcccctcggagtccaaatcccagaggacttgtcacctgtgtaccagtcttccaacgattcagatgcttacaaagaccagatttcagtgcttcctaacgaacaggatctggtgcgcgaagaggcccagaaaatgagctcacttctgcccacaatgtggctgggcgctcagaatggttgcctgtatgtgcattcttcagtcgcacaatggcgaaagtgcctgcactctattaagttaaaggattctatcctatctattgttcacgtgaaaggaatcgtgcttgttgctctggctgatggcactttagccatttttcaccggggagttgacggacaatgggatctgtctaactaccatcttctagacctgggaaggcctcatcattctatacggtgtatgacagtggtgcatgataaagtttggtgcggttataggaataaaatctatgtcgtccagccaaaggcgatgaagattgaaaaatcattcgatgctcatcccagaaaggagtcgcaggtcaggcaactcgcttgggtcggggatggggtatgggtgtcaatccggctggattctactctgagactgtaccacgcccacacctaccagcacttacaagatgtggatattgagccctacgtttcaaagatgctggggaccggcaagttaggcttttcattcgttcgtataacagcactgatggtaagctgtaatcgactatgggttgggactggcaacggggtgatcatcagcatcccccttacagagaccaacaagacgtccggagtgcccggtaaccgaccaggctctgtgatcagagtgtacggggacgagaacagtgacaaggtaacacccggtacatttatcccgtattgctccatggctcacgctcagctgtgtttccatggtcaccgcgatgccgtgaagtttttcgtggctgtgcccggtcaagtgatctccccacagtcatcttcatccggtacagacctgacgggcgacaaagccggtccatccgcccaagaacccggatcccaaactcctcttaaatcgatgttggtcatctctggcggtgaaggctatatcgattttcgcatgggcgacgagggaggggagtctgagcttcttggggaggacctgcccttggagccttccgtgactaaagcagagagatcacaccttatcgtttggcaagtcatgtatgggaatgaatag

SEQ ID NO: 242162 - DNA, 1908 bp, synthetic construct
  misc_feature 1..1908: note = Description of Artificial Sequence: Synthetic coding sequence
  source 1..1908: mol_type = other DNA
tccctgaaagatgaactgtctgatgttagtcagggtggtagtaaagcaaccacacctgcgtctaccgccaactccgacgtggcaacgatcccaactgacaccccactgaaggaggagaatgagggctttgttaaagtgacagacgcaccaaacaaatctgaaatcagcaagcacatcgaagtccaggtcgcccaggagacacgaaacgtttccactgggagcgctgagaacgaagaaaagagcgaggtccaggcaattatcgaatctacccctgaactggacatggataaggacctgagtgggtataagggaagctccacacctactaaaggaatcgagaataaggccttcgatcggaacacagagtccctgtttgaaaaacgaagctccaccctatcccagctccccggagacaagtcaaaggccttcgactttttatcagaggagactgaggccagcttggcctcccggagagaacaaaaaagggaacagtaccgacaggtgaaggcacacgtgcagaaggaagacggcagggtacaggctttcgggtggagcctaccacagaagtacaagcaggttaccaacggccaaggagagaataaaatgaagaatctgcctgtccctgtctatctgaggcctctggacgaaaaagacacctctatgaaaaagctctggtgcgccgttggcgtgaatttgtcagggggtaaaacaagagatggcggttccgtggttggtgcgtctgtattttacaaggatgtggcaggcttagacactgagggctcaaagcagcggtctgctagccagtcgtccctcgacaagctcgatcaggagcttaaggaacagcagaaggagctgaagaaccaggaagaactctctagcctggtttggatatgtacatcaacgcactcagcgactaaggtgctcattattgatgccgtgcagcccggtaatattctcgactcgttcactgtatgtaattcacacgtcttgtgcattgccagcgtccctggagctcgtgagaccgactaccctgccggtgaagacctgagtgagtcaggccaagttgacaaagcctccctgtgcgggagcatgacttctaatagctctgctgagaccgatagtttgttgggagggatcacagttgtggggtgtagtgccgagggagtgacgggcgctgccacaagcccgagcactaatggtgccagccctgtgatggacaaacctcccgaaatggaagctgagaatagtgaggtcgatgagaacgtgccaaccgcagaagaagctacagaggcgactgagggcaacgccggatcggccgaggacacggtggatattagccagaccggggtgtacactgaacacgtctttaccgatccgcttggcgtgcagattcctgaagatctatcccccgtatatcagagctcaaatgatagtgatgcttataaggatcagataagcgtgttgcctaatgaacaggatctggtgcgtgaagaagcccagaagatgtcatccctgctaccaaccatgtggctcggtgcacaaaacggatgcttatacgtccactcaagcgtagctcaatggagaaaatgtttgcattccatcaagttgaaggacagtatactgagcatcgtgcacgtgaagggcatagtgctcgtcgccctggccgatggtaccctcgctatctttcataggggggtagatggccagtgggatctgtctaactaccacttgctggaccttgggagaccccaccactcaatcaggtgcatgactgtggtccacgacaaagtttggtgcggctaccgaaataaaatctacgtgctccattcttccctgggggacggtgctcggccatgtctgaaaactgataagcaagccaagaacagactcaaatccggatttcattag

SEQ ID NO: 242163 - DNA, 3207 bp, synthetic construct
  misc_feature 1..3207: note = Description of Artificial Sequence: Synthetic coding sequence
  source 1..3207: mol_type = other DNA
agtttgaaggacgagctgagcgacgtgtcgcaaggcggaagcaaggctactacccccgcatcaactgccaattccgacgtggccacgatccctactgacactcccttgaaagaggagaacgaggggttcgtgaaagtgacagacgccccaaataaatcggagatctcaaaacatattgaggtgcaggtggcacaagagacaaggaacgtctccaccggatctgccgaaaacgaagaaaagtctgaagtgcaggccatcatcgagagtaccccagaactggacatggataaggacttatcaggctataagggctcatctacccctactaaaggaatcgagaacaaggcttttgatcggaatactgagagtttatttgaggagctatccagtgctggatcaggactaataggcgatgtggacgaaggcgctgacctgctcgggatggggagggaggttgagaatttaattctggagaatactcaactcctagaaaccaaaaacgctttgaacatcgtcaaaaacgatctgatcgccaaggtggatgagctgacatgtgaaaaggatgtccttcagggagaactggaggccgtgaagcaggccaagctgaagctagaggagaagaacagggaattggaagaggaattaagaaaggctagggctgaagccgaagatgcacgtcaaaaagcaaaggatgacgatgattcagacattcctactgcccagaggaagcgcttcacccgtgtggagatggcacgtgttctgatggaaagaaaccagtataaggagcgacttatggagctacaagaggccgtgcgctggactgaaatgattcgggcttcccgcgagaaccccgctatgcaggagaagaagcgaagttcgatatggcagtttgtgcccacacgatttagtaggctattctcgagctcttccaatactaccaagaagccagaacccccagtcaacttgaaatataacgcgccaacgagccacgtcactccctccgttaaaaagagaagctccacactttcccaactgccaggtgacaaatctaaagcttttgatttcctgagcgaagaaaccgaagcttcattggcttccagacgagagcaaaagcgtgaacagtacaggcaggtgaaggctcacgttcagaaggaggatggcagggtccaggcctttggatggtctctcccccaaaaatataagcaggtgacaaacggacagggagaaaacaaaatgaagaaccttccagtgcccgtttatctcagaccgctagacgagaaggacaccagcatgaagaaactgtggtgtgctgtcggagtgaacctatcaggaggtaagactcgcgacggcggtagcgtcgtgggagcatccgttttctacaaagacgtggccggattggataccgagggtagcaagcaaaggagtgcatctcaatcaagtctcgacaagctagatcaagagttgaaggagcagcagaaggagctcaagaatcaggaggagttgtcttcattggtatggatttgtacttctacgcatagcgctacaaaagttttgatcattgatgcggtgcagccaggcaacatactggattctttcaccgtgtgcaactcccacgtgctgtgtatcgcttcagtccccggtgcgcgtgagaccgactaccccgctggggaagacttatcagaatccggccaggtcgataaggcttcgttatgtggcagtatgacaagcaacagtagcgccgagacagactcactgctcggaggaataacagtggtgggttgcagcgctgaaggcgtgactggcgcagcaaccagcccttccaccaacggggcttcacccgtaatggataagccacccgagatggaggcagagaatagtgaagtggacgagaacgtccctaccgccgaggaggctacagaagcaacagagggcaatgccggttcggccgaggatactgtcgacatcagccagaccggcgtatataccgagcacgtgtttacagatccactgggtgtccaaattcccgaagatctttctccagtgtaccaatccagtaacgacagtgatgcctacaaggaccagatctcagtactgcctaacgaacaggacttagtgcgtgaggaggcccagaaaatgtcttcgctgctaccaacgatgtggttgggcgctcagaatggctgcctgtacgtgcacagtagtgtggcacaatggcgtaaatgcctgcactcaatcaaactgaaggactccatattgagcatagtgcatgttaagggtatcgtcctggtagccctcgccgacgggactttggctatctttcacagaggtgtggatgggcaatgggatctctccaattatcatttgttggacttggggagaccacatcactccattagatgtatgactgtggtgcatgacaaagtgtggtgtgggtaccgcaacaagatttacgttgtacagcctaaggccatgaagatcgaaaagtcattcgacgcccacccaagaaaagagagtcaggttcgccagctggcgtgggtgggggatggcgtctgggtatcaatccgcctcgactcaacactgagactttatcacgcacacacctaccagcacttacaagatgtagacatcgaaccgtacgtcagtaaaatgctgggaacaggaaaactcggcttttcatttgttcgaataaccgccctgatggtgtcttgcaatcggttgtgggtagggactgggaacggggttatcataagtattcccctgaccgagactaataagacctcaggggtgccagggaaccgacccggatccgtgatccgcgtctacggcgatgagaacagcgacaaggtgacccctggcacatttatcccctattgcagtatggcccacgctcagctctgttttcatggccaccgggacgccgtaaagtttttcgtagctgtgcccggacaagtaatttctccccagagttcctcatcaggaaccgatctgaccggggacaaagcaggcccatcagcccaggagcccggaagccagactcccttaaaatctatgctcgtgatctctggcggagagggatacatagattttcgcatgggggatgaaggaggcgagagcgaactgctgggagaggacctgcccttagagcctagcgtcaccaaggctgagcgctctcacctgattgtgtggcaggtgatgtacgggaacgaatag

SEQ ID NO: 242164 - DNA, 3237 bp, synthetic construct
  misc_feature 1..3237: note = Description of Artificial Sequence: Synthetic coding sequence
  source 1..3237: mol_type = other DNA
tctgtgaaggtgtccaacagccctgagccccagaaggccgtggagcaggaagatgaactctcagacgtctcgcagggaggctcaaaggcgactaccccagcaagtaccgcaaattctgacgtagctacaattcccacggacactcccctgaaagaggagaacgagggctttgtgaaggttactgatgctccaaataagagtgaaatttccaagcacatagaggtgcaggtggcacaggaaaccagaaatgtctcgaccggcagcgcagaaaatgaggaaaaatctgaggtgcaggccatcatcgaaagtacccctgaactggacatggataaggatctgtctggctacaaaggtagttctacgcctacaaaagggattgagaataaagcgtttgatcgtaacactgagagcctcttcgaggagctaagcagtgcagggagcggtctcataggtgacgtagacgagggcgctgacctcttggggatgggccgagaggtggaaaacctcattttggaaaacacccagttgcttgaaactaaaaacgcccttaacatcgtgaagaacgatctaattgccaaagttgatgagcttacctgcgagaaggatgtcttgcagggcgaactggaagctgtgaagcaggcaaagctgaaactggaagaaaagaaccgtgagcttgaagaggagctcagaaaggccagagccgaagccgaagacgcgcgacagaaagctaaagatgacgacgactcagacatccctactgcccagcgcaaacgatttactagagtggagatggccagagtgcttatggaaagaaatcagtataaagagcgcttgatggaactgcaggaggctgtcaggtggacagagatgattcgggcatctcgagagaaccctgccatgcaggagaaaaagcgttcttccatctggcagtttttctctcggctgttttccagctctagcaatacaaccaagaaacccgagcccccagtgaacctcaaatataacgcacctactagccacgtgaccccgtctgtcaaaaagcgcagctcgactctaagccagctgcccggagacaagagtaaggcctttgactttctgagtgaagagaccgaagcttctctcgcatccagacgcgagcagaaaagagagcagtatagacaagtcaaggcgcacgtgcagaaggaggacggcagagtccaagcctttggctggagtcttccacaaaagtataagcaggtgacaaacggacagggagaaaataaaatgaagaacctgcccgtaccagtttacctcagaccactcgacgagaaggacacttcaatgaagaagctgtggtgtgccgtgggcgtaaacctatcaggcggtaagacccgtgacggcggaagcgtcgtgggagcgtccgtgttttacaaagacgtggcaggcctggatacagaagggtccaaacagaggtccgcgtcacagtcttctttggataagttagatcaggaactgaaggagcagcaaaaagagttaaaaaaccaggaagagctgagttccctcgtctggatttgcaccagcactcacagtgcaaccaaagtacttatcatcgacgcggtgcaacctggtaatatactggattcctttacagtttgcaactcgcatgtgttgtgcatcgcgagcgtgcctggggctagagagacggattaccctgcaggggaagacctgtcagaaagcgggcaggtggacaaagctagtttatgtggctctatgacttccaatagttccgctgagacggacagccttctcgggggtatcactgtcgtagggtgtagcgctgagggggtaacaggtgccgctacctcccccagtacgaacggtgctagtccagtcatggataagccccctgagatggaggccgagaactccgaagtggatgagaatgttcctactgctgaagaagccactgaagcgacagagggcaacgctggaagtgctgaagacaccgttgatattagtcaaacgggagtctataccgaacacgtgttcactgacccgctaggcgtgcagatcccagaggatctgtcacccgtctaccagtcgagcaatgactccgacgcgtacaaggaccagatctcggtgctgccaaacgagcaagacctggttagggaagaggcccaaaaaatgtcctcacttttaccgaccatgtggcttggagcccagaacgggtgtctgtacgtgcatagttccgtggctcagtggagaaagtgcttgcactcgatcaagttaaaggactccatcttgtctatcgtgcatgttaagggcatagtgttagtggcattggccgatgggacactggcgatcttccaccgtggagtcgacggccaatgggacctctccaactaccatctcctagatcttggccgtccacaccattctatccgttgtatgaccgtggtccacgacaaggtctggtgcggttaccgcaataagatctatgtggttcagccaaaagccatgaaaattgagaaaagcttcgacgcacacccacgtaaagaaagtcaagtacgccagcttgcctgggtgggagatggagtatgggtgagtatccggctcgactccacactccggctgtaccacgcccacacgtatcagcatcttcaggacgtggatatcgaaccctacgtgtccaagatgctcgggactggaaagctgggcttctcgttcgtgagaattactgccctcatggtctcttgtaatcgcctatgggtgggcactggtaatggggttattatttctatccccctgactgagactaataagacttccggcgtgcccggaaaccgccctgggtccgtaattcgggtgtacggcgacgagaactccgacaaagtgacccctggaaccttcattccatactgttccatggcgcatgcccagttgtgctttcacgggcaccgagatgcagtgaagttcttcgtggctgttcctggtcaagtgatttccccccagagtagttccagcggtacagatctgaccggagacaaagccggaccttctgcccaagaacctggttcacagacgcccctaaagtctatgctcgtcattagcggtggagagggctacatagatttcaggatgggcgatgaggggggtgaatcagagttgctaggagaagatctgccccttgagccttcggtaaccaaggccgaaaggagccaccttatagtttggcaggtgatgtacggaaatgagtag

SEQ ID NO: 242165 - DNA, 3936 bp, synthetic construct
  misc_feature 1..3936: note = Description of Artificial Sequence: Synthetic coding sequence
  source 1..3936: mol_type = other DNA
atggaactggaagacggggttgtgtaccaggaagaacctggagggtccggggctgtcatgagcgagcgggtatctggcctcgctggctcgatataccgggaattcgagcggcttattggcaggtatgacgaggaagtggtcaaggagttgatgccgcttgtggtcgccgtcctggaaaacttggactctgtgtttgcccaggatcaggagcatcaggttgaactagaactactgcgggacgataacgaacaactgatcacacaatatgaacgcgagaaggcactgaggaagcacgctgaagaaaaattcatcgagttcgaagattctcaggaacaggagaaaaaagacctgcaaacccgggtcgaatctctggagagtcagacgcgccagctggagctgaaagctaagaactacgccgaccagattagccgcctcgaagagcgagaggctgagctcaaaaaggaatacaatgccctgcatcaacgccacactgaaatgattcataactatatggagcatctggaacggacaaaactccatcagctttcgggctctgatcaactggagtccactgcccacagtcggattagaaaagaacgccctatctccctgggcatcttccccttgcctgccggagacggcttactgacacccgacgcccaaaaaggcggtgaaacccccggtagtgagcaatggaagttccaggaactaagccaaccccgaagccataccagcttaaaggatgaactatccgatgtgagtcaaggcggtagcaaggcaactacgcccgcatcaacggctaactccgatgtggctacaattcccaccgacactccactaaaggaggagaatgaaggatttgttaaagtgactgacgcaccaaataagagtgagataagcaagcatatcgaggttcaggtagctcaggaaactcgcaacgtttccactgggagcgcggaaaacgaggagaagtccgaagtgcaggccattattgagtctacacccgaattagacatggataaggacctttcaggttacaaaggaagttctactcctactaaagggattgagaataaagccttcgaccgcaacaccgagagcctctttgaggaactgagctcagccggatccggcctcattggagacgtagatgagggcgcagacctcctcggtatgggtagagaggtggagaatctgattctcgagaatacccaactcctggaaaccaagaatgcactgaatattgttaagaacgacctcatagcgaaggtggacgagctgacatgtgagaaggatgttctgcagggtgaactcgaagccgttaagcaggccaagttaaaactggaggagaagaatcgggaactcgaagaagaattacggaaggcacgtgccgaagctgaggatgctcgtcagaaggcgaaagatgacgacgactcagacatcccaaccgcccagagaaagagatttaccagggtggaaatggctcgagtcctgatggaaaggaaccagtacaaggagagacttatggagctgcaggaggccgtgaggtggacagaaatgatccgcgcttcccgagagaacccggctatgcaagaaaaaaaacgctctagcatctggcagtttgttcccacacgtttctcacggcttttcagctctagctctaacaccacaaaaaagccagaaccccctgtaaacctgaagtataacgcacctaccagccatgtgaccccaagcgttaaaaagagaagcagcactctctcacagctgccaggcgataagagtaaggctttcgactttcttagcgaagagaccgaagctagtctggccagcagaagagaacagaaaagggagcagtataggcaggttaaagctcacgtgcaaaaggaggacggcagagttcaggcctttggctggtccttgccacagaagtacaagcaggttactaacggtcagggcgagaacaaaatgaaaaatttgcccgtgcccgtttacttgcgacccctcgacgagaaggatacctctatgaaactgtggtgtgctgtcggggtcaacctgagcgggggaaaaacacgggatgggggttctgttgtaggtgccagcgtgttctacaaggatgtggccggtctggatactgaaggcagcaagcaacggtccgcctcccaatccagcctggacaagttggaccaggagctgaaagaacaacagaaagagctaaagaaccaggaagagcttagttcgctggtatggatttgcacatcgacccatagcgcgactaaagtcctcatcatcgacgcagtgcaaccaggaaatatcctggactcttttacagtgtgcaactcacatgtgctgtgtatcgcttcagtgccgggtgcacgagagactgactaccctgccggtgaagatctgtcagaaagcggccaggtcgacaaggcgagcttatgcggtagcatgacctccaattcctcagccgagactgattccctgctaggcggtatcaccgttgtggggtgttctgcggaaggcgtgaccggcgctgcgacctccccttcaaccaacggggcatctcctgtgatggataagccacccgagatggaggcggaaaattctgaagtcgacgagaatgtgccaacggctgaagaggcaaccgaggctactgaagggaatgccggtagcgccgaagatacagtagatattagccagaccggggtctacacggagcatgtctttaccgatccccttggggttcagatacctgaagacctctcacctgtgtaccagtcatccaatgattccgatgcatacaaggaccaaatatccgtgttaccgaatgagcaagatctggttagggaggaggcccagaaaatgtcaagcctgctgcctacgatgtggttgggggctcagaacggctgtctctatgtgcactcgtctgtagcccagtggagaaaatgtctacacagcattaagctcaaagactcaatcctgagcattgtgcatgttaagggaattgtactcgtagcattggccgacgggacactggcgatctttcaccgcggagtcgatgggcaatgggaccttagcaattaccatttgctggacctgggcagacctcatcatagtattcgttgcatgaccgttgtccacgacaaggtgtggtgcgggtaccgcaataagatttatgttgtccagcccaaagcgatgaaaatcgagaaaagtttcgatgcccaccctaggaaagagagccaagtccgccagctagcctgggtgggggatggagtttgggtgtctattaggttggactctacactccgtttatatcacgcccacacctaccaacacctgcaagatgtcgacattgaaccttacgtatccaagatgttgggtaccggtaaattaggattctcttttgtgagaattaccgctctgatggtttcttgtaatcgactgtgggtggggacaggaaatggagtgatcatttctattcccctgaccgagaccaacaagacaagcggagtcccgggtaacagacccggttccgtgattcgggtgtacggcgacgagaattccgacaaagtgacccccggtacctttattccgtactgcagtatggcccacgcccagctgtgttttcatggacaccgggatgcagtgaaattcttcgtggccgtgcccggacaggtgatcagtccccaatctagttcgtcaggaacagatctaaccggcgacaaggccggaccttccgcacaagagcctgggtcacagacccctttgaagagtatgctggtgatctcgggcggtgaggggtatattgatttcagaatgggcgacgaaggaggcgagtcagagctcctgggagaggatttacctctggaaccgtcagtcaccaaagccgaaagaagtcacctgatcgtttggcaggtaatgtacggaaacgagtag

SEQ ID NO: 242166 - DNA, 3534 bp, synthetic construct
  misc_feature 1..3534: note = Description of Artificial Sequence: Synthetic coding sequence
  source 1..3534: mol_type = other DNA
atgagcccaggctgcatgcttctgttcgtgtttggatttgtaggaggagcagtagtgatcaactcagcaatcctggtgtctctctctgtgctcctactagtgcattttagtatatcaacaggtgtcccagcactgactcagaacctgccacgcatcttgaggaaggagcgtccaattagtcttggcatcttccctctccccgctggtgatgggttgctgacaccagatgcccagaaggggggtgagactcctgggtcggagcaatggaagtttcaggagttgtcacagccaaggtcacatacaagtttgaaggatgagctgtcagatgtatcccaaggagggagcaaggccactaccccggcaagtaccgcgaacagcgatgtcgccacaatcccaacagatacaccacttaaagaggagaacgaagggttcgttaaagtaactgacgccccaaacaagtccgaaataagcaagcatatcgaagtacaggtcgcccaggagacccgcaacgtcagcaccgggtcagccgagaatgaggagaagagcgaggttcaggcaattattgaatccaccccggagctggacatggataaggatctatctggatacaagggctcgagcaccccgaccaaggggatagagaataaggctttcgacagaaacaccgagtcacttttcgaggagctgagttcagctggatctggcctgatcggggacgtggatgaaggagccgatttactgggcatgggaagggaagtggagaacttgatcctcgagaacacccagttgcttgaaaccaaaaatgcactgaatattgtgaagaacgacttgatcgccaaggtggatgaactcacttgcgagaaggacgtactgcagggcgagttggaagccgtgaagcaggctaagcttaaacttgaagaaaagaaccgagaattggaagaagagctgcgaaaagcacgcgcagaggccgaggatgctcgtcaaaaggcaaaggacgatgatgactccgacataccgacagcccaacggaagcggttcacgcgtgtggaaatggcacgagttctgatggaacgcaaccaatataaagaaagactgatggaactccaagaggcagtccgctggaccgagatgatccgcgcttcacgagagaatccggcaatgcaggagaagaagcgaagcagcatctggcaattctttagcaggctgttctcctcctcctccaatacgacaaagaagccagagcccccagtgaatctgaagtacaatgcaccgacatcccacgtgacaccatcggtcaaaaagagaagcagcaccctcagccagctcccaggcgataaatccaaggctttcgacttcctgagtgaggaaacggaggcatcgctcgccagccgcagagagcaaaagcgggagcagtaccgacaggtgaaggcacacgtccaaaaagaagacgggagggtgcaggctttcggctggtctctgccccagaagtataaacaagtgactaacgggcaaggcgagaacaagatgaaaaatctgcccgtgcctgtgtacctccgcccactcgacgagaaagatacctcaatgaagttatggtgtgctgttggggtgaatctgagtggcggtaagacccgcgacgggggaagcgtagtaggggctagtgtattctataaggatgttgcaggattggataccgaggggtccaaacaaagaagtgctagccagagcagcctggacaagcttgatcaggagttgaaggaacagcagaaagaactgaaaaaccaagaagagctgagttccctggtctggatatgtacatccacccactcggctacgaaagtgcttatcatcgacgccgtgcaacctggaaacatattagattcatttactgtatgtaattcccacgttctctgtattgcgtccgttccaggtgccagggagactgattacccagccggagaggacctgagtgagagtgggcaggttgataaagccagcttatgtggaagcatgacttcgaattcaagcgccgaaactgactcattgctgggtggcataactgtcgtggggtgtagcgcggagggagtcaccggggcagccaccagcccaagtaccaacggtgcatcgcccgtgatggataaaccgcctgagatggaagccgagaatagcgaagttgatgagaatgtaccaactgctgaggaagcaactgaagcaaccgaaggaaacgccggaagcgccgaggacacggtcgatatcagccaaaccggcgtgtataccgaacatgtttttacagatccgctgggagtccagattcccgaagatttgtctcctgtataccagtctagcaatgattcagacgcttataaagaccagatttctgtgttgccaaacgagcaggacctggtgcgggaagaagctcagaaaatgtctagccttctcccaaccatgtggctgggagctcagaatggctgtttatacgtgcactctagcgtggcccagtggcgcaaatgtctgcatagtattaagctgaaagatagcatactgtccattgttcatgtgaagggtattgttctggtggcgctggctgatggaaccttggccatcttccacaggggggttgacgggcaatgggacctgtctaactaccacctgctggacctgggacggccacaccatagcatccgctgtatgactgtggtgcatgataaggtgtggtgcggatatcgaaataagatatacgtcgtgcagccaaaggcgatgaaaatagaaaagtctttcgacgctcacccgaggaaagagtcccaggttagacagctggcctgggtgggtgacggcgtgtgggtatccattcgcctggatagtacgctccggctgtatcacgcacacacctatcaacatttgcaagatgtggacatcgagccgtacgtttctaagatgttaggcaccggcaaactgggatttagcttcgtccgaatcactgcactgatggtcagttgtaaccgtttgtgggtggggacggggaatggcgtgattatcagcattcctctgactgagaccgttatccttcatcagggcagattgcttggccttcgagcaaataaaacttccggagtgcctggtaaccgccctggcagtgtcatccgcgtctatggtgacgagaatagcgacaaagtcacacccggaacttttattccttactgcagtatggcgcatgcccagctttgctttcacggacaccgtgatgcagtcaaatttttcgtggccgtgcccggtcaggtgataagccctcagtcatctagctccggcacggacttaacaggcgacaaagccggaccttcagcacaggagccagggtctcagacaccactgaagtcgatgctagtcatctccggaggggagggctatattgatttccgcatgggagatgagggaggggagagcgaactcctcggtgaggatctccccctggagccttctgtgactaaggccgagaggagccacctcattgtgtggcaagtgatgtacggtaatgagtag

SEQ ID NO: 242167 - DNA, 2760 bp, synthetic construct
  misc_feature 1..2760: note = Description of Artificial Sequence: Synthetic coding sequence
  source 1..2760: mol_type = other DNA
atggtgatgcgatggggggaacgcaacgatgtgatagcttgggaacttctgcaggatggggtggaaaacgccttgaacatcgtgaaaaatgacctcatcgccaaggtagatgagctgacttgcgagaaggatgtgctccagggcgaactggaggccgttaagcaggctaaactgaaattggaagagaagaaccgcgagcttgaggaggagctgaggaaggctagagcagaagctgaggacgcgaggcaaaaggctaaagatgacgacgattccgacatcccaacggctcagagaaaaaggtttacccgggttgagatggcccgagtgctgatggagagaaaccagtacaaggaacgcctcatggagttgcaggaggccgtccgctggaccgagatgatccgggctagccgcgaaaacccagccatgcaagagaagaagaggtcctcaatatggcaattcttttcaaggctgttcagcagttcctccaatacaaccaaaaagcccgaacccccagtcaatttaaaatacaatgctcccacgtcgcatgtcactccgtcagtgaaaaaaaggagctccaccctgagccagttgcccggagataaatcaaaagcatttgatttcttgtcagaggaaactgaggcttctttggcaagtagacgcgaacagaagagagagcaatatagacaagtaaaggcacacgtacagaaggaggacggtagagtccaagcgttcggttggtctctcccacagaagtacaagcaagtgacaaacggccagggcgagaacaaaatgaaaaaccttccggttcccgtgtacctgagaccgttagatgaaaaggacactagtatgaaattgtggtgcgctgtaggcgtcaatttgtcgggaggcaaaacacgggatggagggagcgttgtaggggcaagcgtgttctataaggacgtcgcaggcttagacaccgagggatccaagcagaggtcggcgtcccagtcatccctcgacaaactggatcaggagctgaaagaacagcagaaggaattaaagaatcaggaggaactcagcagtctagtgtggatttgtacaagcacgcactcagcaaccaaggtgcttatcatcgatgctgttcagcccggaaatatactggattcatttacagtttgcaattcccacgtcctctgcatcgcttccgtccccggagcgcgagaaacggattaccctgcgggtgaggacctgtcagagtccggccaggttgataaagcttctctgtgcggctctatgacatccaacagttccgctgaaaccgatagcctactgggcggaatcactgtcgttggatgctctgctgagggagttaccggcgctgccacctcaccctccacaaacggcgcttctcccgtgatggacaagccacccgaaatggaggcagaaaattccgaggtggacgagaatgtgcccactgccgaagaagccacagaggcaacagaggggaacgctgggtcagccgaagatactgtcgatatttctcagaccggagtctatactgagcatgttttcaccgatcccttaggggtccagatccctgaggacttgagtcccgtgtaccagtcatccaacgatagcgacgcgtacaaggaccagatttcagtcttgccgaacgagcaggatcttgtcagggaggaggcccagaagatgtccagccttctgcccacaatgtggctcggggctcagaatggctgcttgtacgtccattccagcgtcgcacaatggcgaaagtgcctgcacagcatcaaacttaaggacagcattttgagcattgtccatgtgaaaggcatcgtgttggtcgccctagccgacggcaccctcgcgattttccacagaggtgtggatgggcagtgggatctgtcaaattatcacctcctggatctcgggaggccacaccactcgatcagatgcatgaccgttgttcacgataaggtctggtgcgggtatcggaataagatttacgtcgtccagcccaaggccatgaagatcgagaagtctttcgatgcccatcccaggaaggagtcccaagttcgccaactggcatgggtcggagacggtgtgtgggtatcaatccgtttggactctactcttcgcctttaccatgcccatacctaccagcacctccaagacgtcgacatcgagccatatgtttcgaagatgcttgggaccgggaaactcgggttttccttcgtgagaatcacagcgttgatggttagctgtaaccgactctgggtaggcacagggaacggggtgatcattagcattcccctgaccgaaaccaataagaccagtggcgtacccggaaataggcctgggtcagtcatccgagtttatggtgacgaaaactccgacaaagtaaccccagggacattcattccctattgtagcatggcccacgcccagctttgcttccacgggcaccgggacgccgtgaagttcttcgttgctgtgccaggacaggtgatttctcctcagtcctcaagcagtggtacggacctgacgggggataaggccggtccatcagcgcaagagcctgggagccagaccccacttaagagcatgctcgtcataagcggcggagagggatatatcgatttccgaatgggtgacgagggtggggagtctgagctcctcggggaggacctgccacttgaaccatccgttacaaaagctgaacgaagtcatttgattgtttggcaagtcatgtacgggaatgaatag

SEQ ID NO: 242168 - DNA, 825 bp, synthetic construct
  misc_feature 1..825: note = Description of Artificial Sequence: Synthetic coding sequence
  source 1..825: mol_type = other DNA
atggaactcgaagatggagtggtgtatcaggaggagccaggcggatccggcgctgtgatgtcggaacgagtgagcggtcttgccggtagcatctaccgtgagttcgagcggttaattggcaggtacgatgaagaagtggtgaaagaattgatgcctttagtagtggctgtgttagagaatctggacagcgtgttcgcccaagaccaggaacaccaggtcgaacttgagctcctccgggatgataatgaacagctcataacacagtacgagcgggaaaaggctctaagaaaacatgcagaggagaagttcattgagttcgaggatagtcaggagcaggagaagaaagatctacaaactcgggtggaaagcttggagtcccagacaaggcagctcgaactgaaggccaagaattatgctgaccagagcgctatgagccctggctgtatgcttctgttcgttttcggcttcgttggcggagctgtggttatcaactctgcaattttggtgtctttatctgtactcctgctggtgcacttctccattagcactggcgtccccgctttaacccaaaatctgccccgaattctccgcaaagagcgtcctatcagtctaggaattttcccactgccagcaggcgacggcctgctgacacctgacgcccagaaaggcggtgagacacccggatctgagcagtggaaattccaagaactgtcacagcctcggtcccacacaagcctgaaagtatccaactcgccagagcctcagaaagccgtcgagcaagaagtccgaatggtgctgttgaacattctgcagaaagtttattag

SEQ ID NO: 242169 - DNA, 1053 bp, synthetic construct
  misc_feature 1..1053: note = Description of Artificial Sequence: Synthetic coding sequence
  source 1..1053: mol_type = other DNA
atgaagccattagttctcttagtcgcacttctgctctggccctctagtgtgcccgcatatccctccattaccgtaactcccgatgaagagcagaatctcaatcactacattcaagtgctcgaaaaccttgtgaggtccgtcccgagcggggaacctggaagggagaaaaaaagcaactctccgaagcacgtgtactctattgccagcaagggctctaagttcaaagagttagtgacccatggggatgccagtacagagaacgatgttttgacaaatcccatctctgaggaaacaaccaccttccccaccggtggttttactcccgagataggcaaaaagaagcatactgaaagcaccccattctggagtattaaacccaacaatgtgagtattgttctgcacgctgaggagccatatatcgaaaacgaggagcctgaacctgagcccgaacctgccgcaaaacaaactgaggccccaaggatgcttcccgtggtgaccgaaagtagcacctctccttacgttacctcatataagagcccagttaccacactggacaagtctaccggaataggaatttccactgaatctgaggatgtgccccaactttctggcgagaccgctatcgaaaagccagaggaatttggaaaacaccctgaaagctggaacaatgatgatatcctcaaaaaaatcctggacattaacagtcaggtacagcaggcgctgctgagtgataccagcaatcccgcttatagagaagacatcgaagcaagcaaggatcatctcaagcgcagcctcgcccttgcggctgctgctgagcataagttgaagaccatgtataagtcgcagctactccccgttggacggacatcgaataaaatcgacgacatcgagaccgttattaacatgctgtgcaattctcgttcgaagttgtatgaatacttggacatcaaatgcgtcccccctgaaatgcgggagaaggcggcaacagtgtttaacacccttaagaatatgtgccgctcacgtcgtgtgactgccctgctcaaggtctactag

SEQ ID NO: 242170 - DNA, 711 bp, synthetic construct
  misc_feature 1..711: note = Description of Artificial Sequence: Synthetic coding sequence
  source 1..711: mol_type = other DNA
atggccagctctgtggacgaggaggccctacaccaactgtatctttgggtggataacatccctttaagccggcctaaacgaaacctgagcagagacttctcagacggagtgctggttgcggaagttattaagttttattttcctaagatggtcgagatgcataactatgtgccggctaactcgctacagcagaagttatctaattgggggcacctgaatagaaaggtgcttaagcggttgaacttcagtgtgccagatgacgttatgagaaagattgcccagtgcgccccaggcgtggtagagctagtactgattccactgagacagcgcttggaagagaggcagagaaggcggaaacagggagcaggcagccttcaagagcttgccccacaagatggtagcggctacatggacgtcggagtgtcacagaaggccaggggcgagggagtaccagacccacaggggggagggcagttgtcatgggatagaccaccagcacctcgcccacctgcatacaatcgcgctttgcaaggggacccttctttcgtactccagattgccgaaaaggagcaggagctgctcgctagccaggaaacggtgcaggtgctgcaaatgaaggtccgcagactggagcacctgctgcagttgaaaaatgtgagaatcgaagatctcagcaggcgtctccaacaagctgaacggaagcagcgatag

SEQ ID NO: 242171 - DNA, 351 bp, synthetic construct
  misc_feature 1..351: note = Description of Artificial Sequence: Synthetic coding sequence
  source 1..351: mol_type = other DNA
atgtgcgatcagacaaagcattctaagtgttgtccagcaaagggaaaccagtgctgcccacctcagcaaaatcagtgttgtcaatctaaaggcaatcagtgctgccctcctaagcagaatcagtgctgccaacctaagggaagtcagtgttgtccccctaagcataaccactgctgtcagccgaagcctccttgttgcattcaagcacggtgttgcggcctggagaccaaaccagaggtctcacctcttaacatggagagtgagcccaattcaccacaaacgcaggataagggctgccagactcaacagcagccccacagtccacagaacgaatctagaccatccaaatag

SEQ ID NO: 242172 - DNA, 294 bp, synthetic construct
  misc_feature 1..294: note = Description of Artificial Sequence: Synthetic coding sequence
  source 1..294: mol_type = other DNA
atggataaacagtcaagtgctgggggagtgaaacggtccgtgccctgcgactcaaacgaggcaaatgagatgatgcctgaaacgcccactggggattccgacccgcagcctgctcccaagaagatgaagacatctgagagctccacaatcctcgtggtacgataccgcaggaacttcaaaagaacgagccctgaagaactcttaaacgatcacgcccgagagaatcgtattaatccccttcagatggaggaggaggaattcatggaaatcatggtagagattcccgctaagtag

SEQ ID NO: 242173 - DNA, 2019 bp, synthetic construct
  misc_feature 1..2019: note = Description of Artificial Sequence: Synthetic coding sequence
  source 1..2019: mol_type = other DNA
atgcggagtattcggtcctttgctaatgatgaccgtcatgtcatggtcaagcattccacaatttatccttctccagaggaattggaagcagtgcagaacatggtgagtacagtcgagtgtgctctgaagcacgtctctgattggctagacgaaaccaataagggtactaagactgagggggaaactgaggtgaagaaagatgaagctggggaaaattatagcaaagaccagggcggaagaaccctgtgtggtgtcatgaggatcggattagtcgcgaagggactgttgatcaaagacgatatggacctggagctcgttctcatgtgcaaggacaaaccaaccgaaactctgctaaatacggtgaaagacaacttgcctattcaaattcagaagttgaccgaagaaaagtaccaggtcgagcaatgcgtaaacgaggccagtattatcatcagaaacaccaaagaacctacactcaccctaaaagtgatactgacctccccactaatccgagacgagctagagaagaaagacggagaaaacgtgtccatgaaggacccacctgatttactcgacagacaaaaatgcttgaacgctctagcctctttgcggcatgctaaatggttccaggctagggccaacggcttaaaatcttgcgtcattgtgctgaggattttacgcgatctttgcaacagagtgcccacatgggcgcctcttaaaggatggccacttgaactgatctgcgagaaatctattggaacatgtaaccggcctttaggcgcaggcgaagctctcaggagagttatggaatgccttgccagcggtatcttgctgccagggggacctggccttcacgacccgtgtgaacgcgacccaaccgacgccctaagctacatgactattcagcagaaggaagacattactcactctgcacagcacgccctgcggctgtccgcctttggccagatctataaagtgctagaaatggaccccctaccaagcagtaaacctttccagaaatactcatggtctgtgaccgacaaggaaggtgcgggttcaagcgctctgaaaagaccttttgaggatgggctcggggacgataaagatcctaacaagaaaatgaagaggaacctgcgcaaaattttagatagcaaggccattgacttgatgaacgccctcatgcggctgaatcagatccgcccaggcctgcaatataaattgctttcccagtccgggccagtccacgccccagtgttcactatgagcgtggacgtggacgggaccacgtatgaggcttcgggtccttcaaagaaaacagccaaactacacgtcgccgtgaaggtactgcaggcaatgggatatcctactggatttgatgctgatatcgagtgcatgtctagtgatgagaaatctgacaacgaaagcaagaatgaaacagtgagctcaaattccagtaataatactggcaacagcaccacagagacctccagtacactggaggtcagaacccaggggccaatactgactgcgagtggaaagaatccagtgatggagttgaacgaaaaacgcaggggtctgaaatacgagctaatatccgaaaccgggggatctcacgacaagcggttcgttatggaggttgaggttgacggccagaagttccggggagctggaccgaacaaaaaggtggcaaaggcctctgccgcactggcagccttagaaaagctcttcagtggacccaatgctgcaaataacaagaaaaagaagattataccccaagctaaaggggtggtcaacacagctgtgagtgcagccgtgcaagcagtcaggggacggggtagaggtaccctgactagaggagcctttgttggcgctaccgccgctcctggctatatcgcccctgggtatgggactccatacgggtattcaacagccgctcccgcttacggcttaccaaaacgcatggttttactgcccgtaatgaagtttcctacttatcccgtgccccactactctttcttttag

SEQ ID NO: 242174 - DNA, 1977 bp, synthetic construct
  misc_feature 1..1977: note = Description of Artificial Sequence: Synthetic coding sequence
  source 1..1977: mol_type = other DNA
atggtgaagcattccacaatctacccaagcccagaagagctggaggcagtgcagaatatggtgagcacagtggagtgtgctctaaagcacgtgtcagattggttggatgaaacaaacaaggggaccaaaaccgagggcgaaaccgaggtgaagaaagatgaggcaggtgagaattacagcaaagatcagggaggccgaacactgtgcggcgtaatgcgaatcggcctagtggcaaaggggttgttgatcaaagacgatatggacctggaacttgttctgatgtgcaaagacaaaccgacagagacactactgaacacagtgaaggacaatctccccattcagattcagaaacttaccgaggaaaagtaccaggtggagcaatgtgtgaacgaagcctccattatcatccgcaatacgaaggaacccaccctgactctgaaagtaatcctgacctccccgttgatcagggatgaactcgagaaaaaagatggtgagaatgttagcatgaaagaccctccagatttgctagaccgccagaagtgcctgaatgccctggcaagcctcagacacgctaaatggttccaggcccgagcaaacggattaaaatcctgcgtgattgtgctgaggatccttagagacctctgcaaccgggttccgacttgggccccactcaagggctggcctctggagctgatctgcgaaaagtctattggcacttgtaaccgccctctcggcgctggcgaggcccttaggagagtcatggaatgcctcgcgagtggtatcctcctccctggcggacctggactccacgatccttgtgagcgagatcccactgacgctctatcatacatgactatccaacagaaagaggacatcacacactcagctcagcacgcactgcgcttgtcagctttcgggcagatttacaaggttcttgagatggatcccctcccatccagcaagccattccagaagtactcttggagcgttactgataaggagggcgctggttccagtgctctgaagaggccgttcgaggacggtctcggggacgacaaagatccgaataagaagatgaagaggaatctgcgcaagattctcgacagcaaagctatcgacctgatgaatgcgctaatgcgattgaatcagatccgccctggactgcagtacaagctgctgagccagtccggcccagtccatgcccctgtgttcaccatgagcgtggatgttgatggaacaacatatgaagcttcaggaccgtcaaaaaaaacagccaagctacatgtggcggtcaaggtgctgcaggcaatgggctacccgactggcttcgacgccgatatcgagtgtatgtcaagtgacgaaaaatcagacaacgagtcgaagaatgaaacagtgagctctaatagttctaacaacacgggtaatagtacgactgagacatctagcaccctggaggtgcggactcaaggtcccatcttaacagccagcgggaagaaccccgtcatggagttgaatgagaagcgtcggggtttgaagtacgagttaattagcgagacgggcggaagccatgacaaaaggtttgtcatggaagtggaggtggacggacaaaagtttcgcggtgcagggccaaacaagaaagtggcaaaggcctccgccgcactggctgcgctggagaaactgttttccggcccaaatgccgcaaataacaaaaaaaaaaaaatcatccctcaggccaaaggagttgtgaatacggcagtgagcgcggctgtgcaagcagtgaggggacggggacgcggtacactaacgcgcggtgctttcgtgggagccacagcagcccctggttacatagctccgggttacggcaccccctatggatatagtactgccgctcctgcttacggtcttccaaaacgcatggtcctgttgcccgtaatgaaatttcctacatatcctgttcctcactatagcttcttttag

SEQ ID NO: 242175 - DNA, 285 bp, synthetic construct
  misc_feature 1..285: note = Description of Artificial Sequence: Synthetic coding sequence
  source 1..285: mol_type = other DNA
atgcgcagcatccgaagcttcgccaacgatgaccgccatgttatggtgaagcactccaccatctacccctccccagaagagctggaagccgtccagaatatggtttccaccgtggagtgcgcactgaagcatgtgtccgattggttggacgaaactaataaaggcacaaagactgagggcgaaacggaggtgaaaaaagacgaggctggggagaactattccaaatggagcgacatagtctggtgtaacgaagactggccgggttgtaagcgcctcgctgactag

SEQ ID NO: 242176 - DNA, 2019 bp, synthetic construct
  misc_feature 1..2019: note = Description of Artificial Sequence: Synthetic coding sequence
  source 1..2019: mol_type = other DNA
atgagatccataagaagcttcgcaaacgacgacaggcacgtcatggttaaacattcaacgatttatccttcaccagaggagctggaggccgttcagaatatggtctctacagtggaatgcgctctgaaacatgtgtctgattggctagacgaaacaaacaaaggtacgaagaccgaaggcgagacagaggtgaagaaagacgaagcaggcgagaactactctaaggaccaggggggaaggaccctgtgcggggtcatgaggatcgggctggtcgcgaagggccttctgatcaaagacgacatggacctagaactagtgttaatgtgcaaggacaaacctaccgaaactctcctgaataccgttaaggacaacctcccgattcaaattcaaaagctgactgaagaaaaatatcaagtagaacagtgtgtgaatgaagcctcgattatcatccgaaacacaaaagaacccacattaacattaaaggtgattctcacaagtcctctaattagggacgaattggagaaaaaggacggggagaatgtgtctatgaaggatcctccggacctcctagatagacaaaaatgcctgaacgctctggctagtctgcgccacgcgaaatggtttcaggccagggcaaacggcctcaagtcatgtgtcatcgtcctgcgcatcttgagagatttgtgtaaccgtgtgcccacgtgggcccctcttaaagggtggcccctcgagctgatttgtgagaagagtatcggcacttgtaataggccactgggcgcaggcgaggccctccgccgtgtcatggaatgcctcgcctccggcattctgttaccgggagggcctggtctgcacgatccatgcgaacgggaccccaccgacgccctctcctatatgacaatccagcagaaggaggatataacacacagcgcccaacacgctctgaggttaagtgccttcggccagatatataaagttctcgagatggaccccctgcccagcagtaagccatttcaaaaatacagctggagtgtgactgacaaggagggagcaggctcttctgcactgaagaggcctttcgaggacggcctgggagatgataaggatccaaacaagaagatgaaaagaaatctgagaaaaattctcgattcgaaagccatcgatctaatgaatgcgttgatgagactgaatcagatccgtccgggtctccagtataaactactgtctcaaagcggacctgtccacgctccagtctttacaatgtcagttgacgtagatggaacgacttacgaagcttctggtccttccaaaaaaactgccaaacttcatgtggcagtgaaagtcctgcaggccatgggttacccaactggctttgatgctgatatcgagtgcatgtccagcgacgagaagtctgacaacgaatcgaagaatgagactgtttcttcgaactcttctaataacacaggtaacagtaccactgagacgagcagtaccctggaagtgagaacacagggaccaattctcactgcaagcggcaaaaatccggtcatggagctgaatgagaagcgcagaggactcaagtatgagttaatcagcgaaacaggcggaagccacgacaagcgctttgtaatggaagtggaggtcgatggtcagaaatttagaggggctgggcctaacaaaaaagtagccaaagccagtgccgctctggccgcactggagaaattatttagcgggccaaatgccgctaacaacaagaagaaaaagatcatacctcaggccaaaggtgttgtgaacacagccgtttccgcggctgtacaggcagtgcggggtagggggagggggactttgacccgcggtgcattcgtgggcgcaacagccgcacccggatacatagcgccaggctacgggaccccatacggctacagtaccgccgcacctgcatatgggctgccaaaaagaatggtgctccttccagttatgaaatttccaacttatcctgtgcctcactattcctttttctag

SEQ ID NO: 242177 - DNA, 225 bp, synthetic construct
  misc_feature 1..225: note = Description of Artificial Sequence: Synthetic coding sequence
  source 1..225: mol_type = other DNA
atgcggtccatcagaagctttgctaacgatgatcgtcacgtcatggttaagcatagtaccatctacccatcaccagaggagctggaggccgtgcagaacatggtgtctaccgtggagtgtgctctcaaacacgtctccgattggctggatgagacaaacaaaggaacaaagacggaaggggaaaccgaggtcaagaaggacgaggccggtgaaaactattcctag

SEQ ID NO: 242178 - DNA, 1776 bp, synthetic construct
  misc_feature 1..1776: note = Description of Artificial Sequence: Synthetic coding sequence
  source 1..1776: mol_type = other DNA
atgtccctcctaacaaactatgagggccttcgccaccagatcgaacgtctggtgcgcgaaaatgaagagctaaagaaactcgtgcgacttatcagggagaaccatgagctgaaaagcgcaatcaagactcaggccggtggtctgggcatctcggggttcacatcgggccttggggaagccacggccggactttcatcgagacagaacaatggagtcttcttgcccccttccccagcagtggctaacgaacgcgtgctggaagaagtggggatcatggccctagcacccctggccgaaatgcttacatctttgcaaccttctgcaacccccggaagcctgatgtcgccccttacaggtacgctgagcacactgctatctggcccagcccctacatcccagagcagccctttgacttcttttcttactagccctattgcagggccactcactggaactttggcgtcctccctgggcctgccgtcgactggcactctgacccccagttccctcgtggccggacctgtcgcaatgtcccagagtagcccactcatcgcacccgttatgggcaccgtcgcagtgagcctctccagcccactgctgagtagtacagcgacgccacctggcgtcagtcagaatttactcgctaatccgatgagcaatctggtactgccagaggctcccagattaaggctggccgagccactccggggagggccaaccggaccccagtcacctgcctgcgtggtgccaactgccaccactaaggtgcccctgagtaccgagccaccccaatctacccaggatccggagcctttatcaatggctttcgctggagcaccactgcagacttctactcccatcggagccatgggtacgcctgcgcctaaaactgcattttcctttaatactagcgacacgcaggctcaaccttccgctgcacaggagcaggtggtgccagcgagcgtgccaacttccccaacaacctctccaacagtgactgtcttggcctcagcgcctgcactggcccctcaggtggctacttcctatacacccagttctaccacacatatcgcccagggagctccgcatccaccctctcgtatgcacaattcaccgacacaaaatctgcccgtcccccattgtcctccgcataacgctcacagcccaccacgcactagttcaagccctgcttccgtaaacgattcccgcggtccccgaacaacggagccttcaactaagtctatgatggaggtggagcgtaaactggcgcaccggaagactagcaagtttccggaaaaccccagggaatccaaacagcttgcttgggagcggctggtcggggaaatcgcattccaactcgaccgaagaatccttagtagtatcttccccgagagggtccggctgtacggcttcactgtgtcaaatattccggagaagatcatccaggcttcccttaatccgagtgaccacaaattagatgagaagctgtgtcaaagattgactcagcgctatgtcagtgtgatgaataggctccagtcactgggctataacggcagggtgcatccggctcttactgaacagttagtgaatgcctacggcatattgcgagagcgacccgaactagccgcatcagaggggggtccctacaccgtggacttcctccaacgggtagtggtggaaacagtgcaccccggaatgctggccgatgccctgctgctgttgtcctgcctctcacagctggcccatgatgatggcaaacccatgttcatttggtag

SEQ ID NO: 242179 - DNA, 1326 bp, synthetic construct
  misc_feature 1..1326: note = Description of Artificial Sequence: Synthetic coding sequence
  source 1..1326: mol_type = other DNA
atgtccctgttaacaaattacgagggcctgaggcatcagatcgagagacttgtgagagaaaacgaggagttaaagaagctcgtgcgtttgatcagagagaaccacgagctgaagtctgcaatcaaaacacaggctggtgggttaggcataagtgggttcacctccggtctcggcgaagctactgcgggactgagcagtcgccagaataatggcgtttttctgccccctagtccagccgtcgccaatgagcgcgtgctggaggaggtaggaataatggccctcgccccattagcagaaatgctgaccagcctgcaacccagtgcaaccccagggtcattaatgagtcccttgactggcaccctttcaaccctcctttctgggccagccccaaccagccagtcgagtcctctcacttcttttctcacctctcccatcgccggacctctcacgggtacgcttgcatccagcctgggcctgccaagcaccggaaccctcactccaagctccctcgtggctggcccagtcgcgatgtcacagtccagtcctctgatcgccccagtaatgggcacggtggccgtctctttatctagcccattgttgtccagtacggctacgccgcctggagtgagccaaaacttgctggcaaaccccatgagcaatctggttttacctgaggccccaagactccggctcgcagaacctttgagggggggaccaacgggaccccagtcccctgcttgcgtggtgcctaccgcgacaaccaaggtcccactgtcaaccgagccccctcaatccacccaggatccagagcctctctctatggctttcgctggagctcccctacagactagcacacctatcggcgcaatgggcacaccggctcctaaaacagccttctccttcaacactagcgatacgcaagctcaaccaagcgccgcacaggagcaggtcgtaccagcgagtgttccaacgagccccacaacgtctcctactgtgacagttttggcctccgcgccagcactggctcctcaggttgcgacctcctacacaccttccagcacaacacacatcgcacagggagcacctcaccccccatcgcgtatgcacaactcccccacacagaatcttccagtgccccattgccctccacacaacgctcattcacctcctagaacgtcctcaagccctgccagcgtgaacgactcgagaggcccaagaacgacagagccttccactaaatcaatgatggaggtggagcgcaagctggctcaccgaaaaactagcaaattccccgagaatcctcgcggattccctgagcctcagtag

SEQ ID NO: 242180 - DNA, 573 bp, synthetic construct
  misc_feature 1..573: note = Description of Artificial Sequence: Synthetic coding sequence
  source 1..573: mol_type = other DNA
atgagttcttccgccttaacatgcggctccacactggaaaaatcaggcgacacatgggaaatgaaggctctggacagtagtaggttggtcccgtggcccccacgaggattgggtagttcaacacagcatcctaacaaaccacattgtgctttagccagctgccaggggcctggagttctgcccggagccgcatcggccctgcccgagctgacatttcagggcgacgtatgccagagtgaaacctgccagcggtatcttcaagccgctatttccctcgacatcgctgtgtctcagataaacctgctcggtagacctagttctcccccagcactcctgattcaacaggggagctgcgaacaggttattcataactctactccccagttcctgggcatggaagatggagacaatgaacgtaccacgggatggctctggagactgtgcgaagacattgatgccgaaccgtcctccactggctgctcccgctccaaccaattgacttttacagaggggtgttttgtgcggtccctcagtactgtgtattctaacacacacattcacactcacttatag

SEQ ID NO: 242181 - DNA, 1791 bp, synthetic construct
  misc_feature 1..1791: note = Description of Artificial Sequence: Synthetic coding sequence
  source 1..1791: mol_type = other DNA
atgggctttattatccacattcaacaggtcaagaaacagcgcaagaagctcgatcaaggactgatcttgaagaaggagaagtaccggaaagagaagaagtgcgcatcactgagctttgaggtgtcaagcgacggtggcacggaaccctctgccctggtggacgataatggaagcgaggaggatttctcatatgaagacctgtgccaggcgtcaccgagatatctgcagcccggaggagaacagttagcaatcaacgagctgatttccgatggtaacgtggtctgcgccgaagctctctgggatcacgtgacaatggacgaccaggaactaggctttaaagccggagacgtaatccaggtgctagaagcgagcaataaggattggtggtgggggcgttccgaggacaaggaagcctggtttcccgctagttttgtgcgtctgcgggttaatcaggaagaactctccgaaaatagctcttccacccctagtgaagagcaggatgaagaggcaagtcaaagccgccatcggcattgcgaaaataaacagcaaatgagaaccaacgtgattagggaaataatggacactgagagggtgtacatcaagcatctcagggatatatgcgagggttatatcagacagtgtcggaagcataccggcatgtttaccgtggcccaacttgctactatatttggaaacatcgaagacatctacaaatttcaaagaaagttcctgaaagatttggaaaagcagtacaataaagaagaacctcacttgtcggagatcggctcatgttttctacagaaccaggaagggttcgctatctattcagagtactgtaacaaccaccctggcgcttgcctcgagctggccaatctcatgaagcaaggaaagtatcgccacttctttgaagcgtgccgcctcttacaacagatgatcgatattgctattgacggatttttgctgactcctgtgcagaaaatttgtaaatatcccctgcagttggcagaattgcttaagtatactactcaagagcatggcgactattctaatatcaaggcggcatacgaagctatgaaaaatgtggcttgcctcatcaacgaaaggaagcgcaagcttgagtctatcgacaagattgcacgctggcaggtaagtatagtgggctgggaggggctggatattctggatagatcaagtgaattgattcattccggcgagctaaccaagattacaaaacaggggaagtctcagcagaggaccttcttcctgttcgatcaccaactggtgagctgcaagaaagacctcctgcgaagggacatgttatactataagggaaggctcgacatggatgagatggagctcgtggatctgggggacggacgggacaaagactgtaacctgagcgtgaagaacgcatttaagcttgttagcagaactacagacgaggtgtatctgttctgcgcgaaaaagcaggaggacaaggcgagatggctacaggcctgcgctgacgagcggagacgtgtccaagaagacaaggagatggggatggaaatttctgagaaccaaaagaaactggcgatgctgaacgcccagaaagcaggccatggtaagagcaagggttataacaggtgcccagtggcccctccacaccagggtttacacccgatccatcagcgtcatatcaccatgcccacttcggtgcctcagcagcaggtgtttggcctggccgaacccaagcggaagtcctccttgttttggcatactttcaaccgactgacccctttccgcaaatag

SEQ ID NO: 242182 - DNA, 1959 bp, synthetic construct
  misc_feature 1..1959: note = Description of Artificial Sequence: Synthetic coding sequence
  source 1..1959: mol_type = other DNA
atgacttcagcatcacccgaagaccagaatgcacccgtaggttgtcccaaaggggctcgcagaaggagacctatctctgtgatcgggggtgtgtcactgtacggcacaaaccagactgaggaactcgataacctgctcacccaacctgcgagccgtccacccatgccagcccaccaggtaccaccctacaaggcggtgtcagccaggttcagaccctttaccttttcgcagtcgacccccatcggactagaccgagtggggagaaggaggcagatgcgggcttccaacgttagctctgatggagggacagagcctagtgccctcgtcgatgacaacggcagcgaggaggacttctcctatgaggacttgtgtcaagcttcccctagatacttgcagcctggcggagagcagctggccatcaacgagctgatctccgacggcaacgtcgtatgcgcagaggccttgtgggaccatgtgacaatggacgatcaagagctgggatttaaagcaggggacgttatacaggtcctggaggcttccaacaaagactggtggtgggggagatctgaggataaagaagcttggtttcccgcttccttcgtgcggctcagagtgaaccaggaggagctaagcgagaattcatcaagcaccccgtctgaggaacaggacgaggaggccagccagtctcggcaccgacactgcgaaaataagcagcaaatgagaactaatgtcatcagagagatcatggatacggagcgagtctatataaagcacttaagagacatttgtgaaggctacatccggcagtgtcgcaagcatactggcatgttcactgttgcccagctggctacaatcttcgggaacattgaggatatttacaagttccaaagaaagttcctgaaagacctggaaaagcagtacaacaaagaggagccacacctttccgagataggaagttgctttttacagaatcaagagggattcgcgatttatagtgaatactgtaacaaccacccaggagcctgtctcgagctggctaacctcatgaaacaaggcaaatatagacactttttcgaggcgtgtcgtctactgcagcaaatgattgacatcgctattgacggttttctgttaacgcccgttcagaagatctgtaagtatccattacaactcgctgagcttttgaagtatactacacaggagcacggagattattcaaacattaaggcagcctacgaggccatgaagaatgttgcatgtctgatcaacgagagaaaacgaaagctggagtcgattgacaaaatagctaggtggcaagttagcatcgtgggctgggagggcctggatatcctggatcgcagtagcgagcttattcacagcggcgaactgactaaaatcacgaaacaaggcaagtcccagcagcgaacctttttcctgttcgaccatcagctggtatcctgtaaaaaggaccttctgcgcagggacatgttatattataagggccgactggatatggacgagatggaacttgtggatctgggcgacggcagggacaaagattgcaatttgagtgtgaagaatgccttcaagttagtgtcaagaactacagacgaggtgtatcttttttgtgcaaagaaacaggaagacaaggctaggtggcttcaggcttgtgccgatgaacggaggcgcgtacaggaggataaggagatggggatggagatctccgaaaaccaaaaaaaactggctatgctcaatgcccagaaagctggacacggtaagagtaaaggctacaaccggtgcccagtggctcctccccatcagggactgcaccctatccaccagcgacatatcactatgccaaccagtgttccccagcaacaggtgtttgggctcgctgagcccaagcggaaaagcagcctgttttggcatacctttaatcgtcttaccccctttcgcaaatag

SEQ ID NO: 242183 - DNA, 3834 bp, synthetic construct
  misc_feature 1..3834: note = Description of Artificial Sequence: Synthetic coding sequence
  source 1..3834: mol_type = other DNA
atgacacaggccgcagtgagaccctgggctccctgtttggagaacatgacgacagccccaaacggactcggccctggccctgctgctccatgcgccggtagcgacctaaaggacgccaagatggtgactagcctcgcttgtggtaatggagtgtgcggttgctcgcctggcggagatactgacactcaggaagccaagctttcaccggctaaactggtacgtctgttctcgacatcgcggaagaggactggcgctcacccggaacggcctcacagtatggtgctcgtgggcaacagctcaacctggaacaccctagcctctttccgcaaaatgggatcttttaaaaagctcaaaagcagcgtgctaaaggggatccaatctagggaaggatcgaatgcgtgttccaaaggtgaagcctccgaacacgggctcggcaaatcaattccaaatggagccgtgccgggagcgcaagctagtaggggctctccactcgccccagggcctgcctgtggcgctctgcggcctgccgaatggggtacattggacggatccgacttagaagatactgacgacgcttttcaacggagcacacatcgatctaggtctctcagacgggcttacgggcttggcaggatctgcttactggacgctccccaaaatcatgccacccccacaatcgccaccggtcaggtacctgccgtgtgcgaaatcctggtccgggatccagagaacaacagcatgggataccgacggtcaaagtccactgacaacctggccttcctgaaaaaaagcagctttaaacgcaaaagtacttcaaatctggctgacctgagaaccgcccatgatgcccgtgtgcctcaacgaaccctgagtagctcttccaccgactcccagaagctcggaagcggtcgaaccaaacgatggcggagcccaattagagcaaaagacttcgatagagtttttaagctagtatcaaatgttacagaggctgcctggcgaagggaatccccgagatcaggagcacccagtcctggggaagctagtctcagactacaggcccactccagattgcatgatgattattcccggagagtgtcccggtcaacagaacaagattcaaggaggggtggggcagtcatgcatggcaccaccgcaacgtgcactgttgcccctggttttggttccgctactagcaaaggtccccacctagacgccgacactgctgtgttccctctcgagactaagtctagctgggctgtggaatccgacagctcatgcacgtgtagctccctgccgtctccgatagtccaggatgtgctgtccaaggattcctgtgaccctaacgcagggtcacagcttaccttcgacccagagcagccacctacccccctgcgccctaccacccccaaaccacaatcaccacagtctccacagagccctggcgcaggaagcgcaagttgtcactccaaccactctgctctgtccgccaacagtgaggaatccgagggacgagctgaggagcccgctcagagggagcccggacccgtgagtctgcaggatccactcgaagcaacgcacggagacgaaggtagcaaggacctgctcgtgaatataggcgtggctgccggaccggaggagaaagaaaaagaagaggtcgtgccagacggcccatggcgccgatcatcttcacaggacgaagagcgcactgaagcacagagaacccccaagagacgatggggaagcggaagacgacctcggcctaggccgtttagcgactatgggcagctagcctcacggagtctctccattcctgaagacagtgtggctgcagatccacagaaggaggaccgcgtagacgaagacccgcaagcatcgatgactagcgcctcgccagaagaccaaaatgctccagtggggtgtcccaaaggagcacgcaggaggcggcctatatctgtgatcggaggcgtgagcctgtacggaacaaatcagacagaagaattggataaccttctaactcagcctgcgtcgcggcctccaatgcccgcacatcaggtaccaccctacaaggcggtatctgccagattccgcccatttaccttcagccagagtacccccatcgggctggatcgcgttggccgaaggcgacagatgcgtgcctccaatgtcagtagcgacggcggtactgagccgtctgccctggtggacgacaatggaagtgaggaagatttcagctacgaggacctgtgtcaagctagccccaggtacctccagccaggaggggaacaactggctatcaatgagctgatctcagatggcaacgtggtttgtgcagaggctctctgggatcacgtgaccatggacgaccaggaactcggctttaaggccggtgacgtaatacaggtgctagaagcctctaataaggactggtggtggggccgaagcgaggacaaggaggcctggtttccggcttcctttgtgagactgagagtgaaccaggaggagctgtccgagaactcgtcttcgacaccatcagaagagcaggatgaggaggcctctcagagtagacacagacattgcgagaataaacagcagatgagaacaaacgtgattcgggaaatcatggatacagagcgggtgtatatcaagcatctgcgcgacatctgcgagggctacattagacaatgccggaaacacacaggcatgttcacagtcgctcagctcgctaccattttcggcaatattgaggacatctacaagttccagcgaaagtttttaaaagacctcgaaaagcaatacaacaaagaggagccgcacctctcagagattggctcctgctttctgcagaatcaagagggtttcgccatatactccgagtactgtaacaatcaccctggggcttgtctggagctggctaacctgatgaagcaggggaagtaccggcatttcttcgaagcatgtagactgctacaacagatgattgatatcgccatagacggatttctgctcacccctgtccagaaaatctgcaaatatcccctgcagctggcagaactcctgaagtacacaactcaagaacacggggattactctaatatcaaagccgcttacgaggctatgaagaacgtggcatgcttaatcaacgaacgcaagaggaaacttgaatcaatcgacaaaatagctcggtggcaggtcagcatcgtcggatgggagggactggacatcctcgaccgctcaagcgaactgatacattccggagaactcaccaagataaccaagcaggggaaatcacagcaacgaacctttttcctttttgaccatcagctcgtctcgtgcaagaaagacctgctccgcagggatatgctttattataagggtcggctggacatggacgagatggaactggtcgatctaggagatggtcgggataaggactgtaatctgtccgtgaagaatgcatttaagctggtctcgcgcaccaccgatgaagtttatcttttctgtgctaaaaagcaggaggataaggcccgttggctgcaggcttgtgcagacgaacggcgacgggtccaggaagacaaagaaatgggaatggagatctctgaaaaccaaaaaaaattggccatgctaaatgcccagaaggccggtcacggcaagtccaagggctacaacaggtgtcccgttgcacctccacatcagggcctgcatccgatacaccagcggcacatcacaatgcccactagtgtccctcagcagcaggtgtttggattagccgaaccaaagcgtaagtcctctctgttctggcacactttcaatagactcactccctttcgtaaatag

SEQ ID NO: 242184 - DNA, 3948 bp, synthetic construct
  misc_feature 1..3948: note = Description of Artificial Sequence: Synthetic coding sequence
  source 1..3948: mol_type = other DNA
tgacccgtcgctactcaagaacccgatgtccagggacgctgcgaatgtcaggatgggattccaggcgacgaaggacttgagttgcgctctgcggactctgccgtaccagtcgctatgacacaggcagctgtccgaccctgggcaccttgtcttgaaaatatgaccaccgcccctaatggtctgggcccaggccctgctgctccctgcgccggatccgacctgaaagatgccaagatggtcacatcgttagcttgtggcaatggagtgtgcggctgctctccaggaggggatacagacacccaggaggccaagctctctccggctaagcttgtgaggctcttctcaaccagcaggaaaagaactggcgcacaccccgaaaggccccatagtatggtgttggttggtaactcatccacttggaacacgctggcgagctttcgaaagatgggcagcttcaagaaactgaagtccagcgttctcaagggcatccagtctagagaagggagtaacgcctgtagtaaaggcgaggcttccgagcacggcctgggaaaatctattccaaacggggcagtgcccggtgctcaagcttccaggggttccccactggctccaggccctgcgtgcggtgccttacggcctgccgaatggggtaccctggatggcagcgatctcgaggacacggatgacgcctttcaaaggtctacccaccgctcgcggtcgctccgtcgcgcttacggcctgggcaggatctgtctgctcgatgccccacagaaccatgcaacccccaccatagctacagggcaagtgccagccgtctgtgaaattctggtaagagacccagaaaataatagcatgggttacagacgttccaaaagtacggataatctagcatttctaaaaaagtcctctttcaagcggaagtccaccagtaatctggccgatctccggaccgcacacgacgcacgtgtcccgcagagaacgctttcgtcaagtagtactgattcgcagaaactgggttcggggagaactaaaaggtggaggtcccctataagggcaaaggactttgacagggtatttaagctggttagtaatgtcacagaagccgcatggaggcgggaaagtccacgaagcggggcacctagcccaggagaagcttctcttcgcttgcaggcccacagccgtttgcatgatgattactcaaggagagtcagccgatccaccgagcaggatagccgtagggggggtgccgtaatgcacgggaccaccgcaacatgcacagtggcccctggattcggctcagccaccagtaaggggcctcacctcgacgccgataccgcagtgttcccacttgagacgaaaagttcgtgggccgtcgagagtgatagtagttgcacatgtagttcactgccatcccctattgttcaggacgtgctttccaaagattcttgtgaccccaacgccggttcgcagttgaccttcgaccccgagcagccaccgactcctctgaggccaaccacaccaaaacctcagtctccccaaagccctcagtcacccggtgccggaagcgcgtcttgtcatagcaatcacagtgcactatcagctaacagcgaagagagcgagggaagggccgaagagcctgcacagcgtgagccaggcccagtctctctacaagaccccctggaagctacgcatggggacgaaggcagcaaggacttgctggtgaatattggtgttgccgctggacccgaagagaaggaaaaggaggaagtggtgcccgacgggccttggcgacggagctcttctcaagatgaggagcgcactgaagcccagcggacgcctaagcgcaggtggggctccggaagaagaccacgcccacgccctttcagtgattacggccagctcgcgtctagatcgcttagcatacctgaagatagcgtggcagcagatcctcagaaagaagacagagtggatgaagatcctcaggcgtcgatgacctccgcctctcccgaggatcaaaacgctccagtcggctgtcccaagggcgctaggaggcgccgacctatatctgtcattggaggggtttctctctatggaacaaatcagaccgaggagctggacaatctgcttacacagcctgcgtctcggcctcctatgcctgcccaccaggtgcccccatataaggccgtaagcgcacgattcaggcccttcacattcagtcagtccacccccattgggcttgaccgagtggggagacgccgacagatgagagcatccaatgtcagctctgacgggggaactgagccctctgccctggtggacgataatgggtctgaagaagatttctcttatgaagacctgtgtcaggctagtccacggtatctccagccgggaggggagcagctggccataaatgaattgatctcagatgggaatgtcgtctgcgctgaagccctgtgggaccatgttacgatggatgaccaagagttagggttcaaggcaggagatgtaatccaggtcttagaagccagcaacaaggattggtggtgggggcgttcagaggacaaggaggcgtggttccccgcttccttcgtcaggctgcgggtgaaccaggaggagctttcagagaatagcagctctactccctcggaagaacaagatgaggaagcatcccagagtcgacacagacactgcgagaacaaacaacaaatgcgtacaaatgttattcgcgaaatcatggacactgagcgagtgtatattaaacatttgcgagatatctgtgagggatatatcagacagtgtagaaagcataccggaatgttcacggtggcccaactggcgacaattttcggcaacattgaggatatatataaatttcagcggaaatttttgaaagatctagagaaacagtataacaaggaagagccccacttgtctgaaatcggcagctgcttcctgcagaatcaggaagggttcgccatttacagcgaatattgcaataaccatcccggtgcatgtctagaactggcgaacctgatgaaacagggcaagtacaggcactttttcgaggcctgccgcctgctccagcagatgatcgatatcgccatagatggatttctgctcaccccggtgcagaaaatctgtaaatatcctctgcagctcgccgagctgctgaagtatacaacacaagaacacggggattacagcaatattaaggccgcttatgaggctatgaagaatgtggcatgcctgatcaatgagcggaagcgtaagctggagagcatcgataaaatcgctcggtggcaggtctcaattgttggatgggaggggctggacatcctggatagatcctccgagcttattcactctggagagctaactaaaattacaaagcaagggaagagtcagcagcgaacattctttctgtttgaccaccagctcgtctcgtgcaaaaaggatctattaaggagagatatgctttattacaaggggcgactggacatggacgagatggagctggtggatctgggggatggcagggataaggattgcaacttaagcgtcaagaacgctttcaagctcgttagccgcactaccgatgaggtgtacctattttgcgctaagaaacaggaagataaggccaggtggttgcaggcctgcgcagacgagcgacgcagagttcaggaggataaggagatgggcatggagatctccgaaaaccaaaaaaaactggctatgctcaatgctcagaaggccggacatggcaagtctaagggttacaacaggtgcccagtggcccctccccaccagggactgcacccgatccaccaaagacacattactatgcccacttcagtccctcaacagcaagtctttggtctggcagagcctaaaagaaagtctagtcttttctggcacacctttaatcggctgaccccgttccgtaagtag

SEQ ID NO: 242185 - DNA, 1851 bp, synthetic construct
  misc_feature 1..1851: note = Description of Artificial Sequence: Synthetic coding sequence
  source 1..1851: mol_type = other DNA
atgccagcccatcaggtacctccttataaagcggtctcagccagattcagaccatttaccttttcccaatctacaccaattggcctcgatcgcgtaggaagacgccgtcaaatgcgcgcttccaacgtctcttccgacgggggtacagagcctagcgctctcgtcgacgataatggctctgaggaagacttctcttacgaggacctatgtcaggccagtccacgttatcttcagccaggcggtgagcagttggctatcaatgagcttatttcagatggtaacgttgtgtgcgcagaagctctctgggaccatgtcaccatggatgatcaggaactgggattcaaggcaggagacgtgatccaagttctcgaagctagtaacaaagattggtggtggggtcggagcgaggacaaagaggcatggtttccggcttctttcgtgagactgcgagtgaatcaggaggagttatctgagaactcatcatctaccccctccgaagagcaggatgaggaagcctcccaatccagacacaggcactgtgagaataaacaacagatgcgaaccaacgttataagggagatcatggacaccgagcgtgtgtacattaagcatctgcgggacatttgtgaaggatacatccggcagtgtcggaagcacactgggatgttcactgtggcgcaacttgctactatctttggcaacatcgaagatatctataaattccagcgaaaattcctgaaggatctcgaaaagcaatacaataaggaagaaccgcatctgtccgagataggctcctgcttcctccagaaccaggagggcttcgccatttattcggagtattgcaacaaccatccaggggcttgcctcgaactggccaacctgatgaagcaggggaaatacaggcatttcttcgaagcttgtaggcttcttcagcagatgatagatatcgctattgacggtttccttctcactcccgttcagaaaatctgtaagtatccattgcagcttgctgagctgcttaaatacacaactcaggagcatggagattattccaatatcaaagccgcttacgaagcaatgaagaacgtggcctgcctgatcaacgagagaaaaaggaaactggagtccattgataagatcgcgaggtggcaagtctctatagtgggctgggaggggctcgacattctagaccgctcaagcgagctcatccacagcggagagcttacaaagatcacaaaacagggtaaatcacagcaacgcactttcttcctcttcgaccatcaattggtgtcttgcaagaaggatctgcttaggcgggacatgctgtactataaaggtagactcgacatggatgaaatggagctggtagatctaggagatggaagagacaaggactgcaacctctcagtcaagaacgcttttaaacttgtttctagaacaacagacgaggtatacttgttctgtgccaaaaaacaggaagataaagcaaggtggttgcaggcctgcgccgacgaaagacgaagagtccaggaggataaggagatgggcatggaaatttcggagaaccagaagaaattggccatgcttaacgcacaaaaagccggtcatggaaagtcgaaggttaggctgcagcaggttccctgtggccctactgctcctggacctgcccctcatcctcccgctccgcaccactatgcccacaagcgtccaccagcagccggactctggcccggagggacacaggaagaggtgctcgcgttgcttgcacacctgcagcaggcacatcccctaccagaaatgaagaccggagggtgtgcctccatggagttgggggtgaagcgtcggaattag

SEQ ID NO: 242186 - DNA, 1710 bp, synthetic construct
  misc_feature 1..1710: note = Description of Artificial Sequence: Synthetic coding sequence
  source 1..1710: mol_type = other DNA
atggatgctggtagctcccggtccttagagaatgccgtaaaccgcatttaccatgatcaactggttccaaagatcaacactagcaagaaaatgtcaacgctcgcacacccccctaacatcctcgaaatgagccaggagatcaagaagaactgcggcggaaaacaggtggaaatcactctggagcggactaagatgacaaaaggcatcaaggagaaacagtccaacgacctcgaaaaagcagcctttaagcggaaggcagaaggagaggagaaacctacacgtaaaaagcaagctaagatcaccgagctggataaccagcttatcacaatgccgctgcctcacattcccttgaagaatataatggatgttgagatgaaactggtttacattgacgaaatgggtgtcaggtatgaatttgtagagtctttcatgtctactggctcacaaccaacttgccaggctgccgagattgtggacccattgagcgtccacaacttttcatttctcccacaaatcgacaagtggctgcaggtggcccttaaagacgctagctcatgctaccggcagaagaagtatgccctcgcagcgggtcaatttagaaccgcactggaactctgttctaaaggagccgtcctgggcgagccttttgatgcgccagccgaggatattgcctccgttgcaagttttatcgaaactaagctggtgacctgttacttgaggatgcgtaagcccgatctggccttgaaccacgctcaccgcagtattgttctgaatcccgcatactttcggaatcatctaaggcaagcgaccgtgttccgctgcttagagaggtatagtgaggccgcacgtagcgctatgatagctgattacatgttttggctgggcggtggacgcgaagagagcatctctaagctgattaagctttactggcaggctatgattgaagaggctattaccagggcagaatcctttagtgtgatgtacaccccatttgcaaccaagatacgggctgacaaaatcgagaaggtaaaggatgccttcaccaagacacatcccgcatacgcagaatatatgtacacagacttgcaagcacttcacatgctgcctcagactgtagattggtcatccttcccaccgcagcagtacctgctaaccctggggttcaagaacaaggatgatgggaaattcctggagaagatatcatcgcggaaattgcctatcttcactgaacataagaccccctttggcctgaccagggaagatacggtcagacagatggagactatggggaagcgtattcttccaattctggattttattcgatcgacacagttgaatggatcatttccagcaagttcaggagtgatggagaagcttcaatatgcctcactgctgtcccagttgcagagggtgaaggagcagagtcaggtcatcaaccaagctatggcggaacttgcaactataccctacctgcaagatatcagccaacaagaggctgaactgctacagtcgttaatggctgacgccatggatacccttgagggacgcaggaataataatgagcgtgtatggaatatgatacagaaggttggtcagatcgaagattttttatatcagttggaggactccttcttgaaaactaagaaacttagaactgctaggaggcagaagaccaagatgaaacgcttacagactgtgcagcagcggtag

SEQ ID NO: 242187 - DNA, 1086 bp, synthetic construct
  misc_feature 1..1086: note = Description of Artificial Sequence: Synthetic coding sequence
  source 1..1086: mol_type = other DNA
atggctacgctagccaggctgcaggccagatcgtcgacagtgggaaaccagtactactttagaaattctgtggtggatccgtttcggaagaaagaaaatgatgctgcagtcaagatccagtcttggttccgcggatgccaggtcagggcctacatacgacacctgaaccgtattgtgacaataatacaaaaatggtggagatcctttctcggaaggaagcaatatcagctaaccgtgcaggtggcatattataccatgatgatgaatctgtataacgcgatggccgttcgcatccaacgaagatggaggggctaccgggtaaggaaatacctcttcaactattactatcttaaggagtacctcaaagtggtgagcgaaacaaatgacgccataaggaaggcactggaggagtttgccgagatgaaggaacgggaggagaaaaaggctaacctcgagcgcgaagaaaaaaaacgcgattatcaggcccgtaaaatgcactacttgctgagtactaaacagattccaggcatctacaattctccgtttcggaaagaacctgatccttgggaacttcaattacaaaaggcaaagccattgacgcaccggagaccaaaggtcaaacaaaaggattccacaagcctcaccgactggctcgcctgtacttcagcacggtcatttccccgtagcgagatcctaccaccaattaatcggaagcagtgccagggccctttccgcgacattacggaagtgctggagcagaggtacagaccgcttgagcccaccctccgagtagcagaacccatagacgaactcaagctcgcacgggaggagttgcggagagaggaatggctccaaaatgtgaatgacaatatgtttttgccattctctagttaccataagaacgagaagtatatccccagcatgcatctgagttcaaagtatgggcctatctcatacaaggaacagtttcggagcgagaaccccaagaagtggatctgcgataaggattttcaaaccgtcctcccaagctttgaactcttcagcaaatatggtaaattatacagtaaggccggtcaaatcgtgtag

SEQ ID NO: 242188 - DNA, 1617 bp, synthetic construct
  misc_feature 1..1617: note = Description of Artificial Sequence: Synthetic coding sequence
  source 1..1617: mol_type = other DNA
atggccgagaacctgaagcgcctggtaagtaatgagaccctcagaacattacaggaaaagctggatttttggttgaaggaatataataccaacacttgtgaccagaatttaaatcactgcctagagcttatcgagcaggtggccaaagtgcaggggcagttgttcggaatcctcacagctgcagcacaggaggggggacgaaacgatggtgtggaaacaatcaagtcccgactgctcccatggttggaggcgagttttacagcagctagtcttggcaagtccgtggatagtaaagttccatccctgcaggacacatttgatagagaacgtcacaaggatccctcaccccgtgaccgcgacatgcagcaattggatagcaaccttaactcaacccgatcccagtgtaaccaggtgcaggacgatctcgtcgagacagaaaagaatctggaggagtccaagaataggtcagcaatcagccttctggcggcagaggaggaaatcaatcagctgaagaagcagctcaaaagcctacaggcacaagaggacgctcggcatcgcaacactgaccagagatcttccgagaatcggcgaagcgagccttggagtttggaggaaagaaaacgcgagcaatggaattcactcaagcaaaacgccgatcaacaggacactgaggcgatgtcggactataagaagcagttgcggaatctgaaggaggaaattgccgttctgagcgcggagaaatcagctctgcaaggacgctccagccgctctagatccccgtcacctgcaccacggagcaggtcgtgctcacggtcacgctcagccagcccaagtaccgccgtgaaagtgcgcagaccgtctcctaaccgttctaaactgagcaatgtcgcaaggaaggctgccttgctgagtcgattttctgactcatattctcaggcacgtttagacgctcagtgtctgctccggagatgtatcgataaagctgagaccgttcagcggattatttatattgctacagtggaagccttccacgtggcaaagatggctttccgtcacttcaagatccacgtgcgaaagtctcttacaccgtcatatgtgggctcgaacgattttgaaaacgccgtactcgactacgtcatctgtcatctcgacctgtatgactctcagtcttcagtgaatgatgttataagggcgatgaatgtgaacccgaaaatatccttccccccagtcgtggatttttgcctgttgtcggacttcatacaggaaatctgttgcattgccttcgccatgcaagcccttgagccccctcttgacattgcttacggcgcagatggtgaggtttttaatgattgtaagtatcggaggagttatgacagtgatttcactgcacctcttgtcctgtatcacgtttggcctgcgctgatggaaaatgattgtgtgatcatgaaaggagaagcagtgaccagacggggagccttttggaactctgtgcgcagcgtgtccaggtgtagatcccggtcactgagccctatttgtcctaggtcacagattggcctgaatactatgagccgtagccgttcaccctccccaatccgctgtggtctgccccgattctag

SEQ ID NO: 242189 - DNA, 504 bp, synthetic construct
  misc_feature 1..504: note = Description of Artificial Sequence: Synthetic coding sequence
  source 1..504: mol_type = other DNA
atgattatcacgacttggatcgtgtacatattagcaaggaagggcgtcggcctcccattcctgcctatcacctcttccgacattgacgtggtcgagagcgaagccgtttccgtcctccaccactggctgaaaaagactgaggaagaagcatcacggggaatcaaggagaaattaagcatcaaccatccgtcacaaggcgtgcgagagaaaatgagcaccgactcccctccaacccacggtcaggacatacatgttacaagagatgttgtgaagcaccatctttctaagagtgacttacttgccaaccagtcccaggaagtgctcgaggagaggacccgaatccagttcatccggtggtctcacaccagaatcttccaggtgccctccgaaatgacagaagatatcatgcgcgaccgaatcgagcaggtgagacgctccatctctcgattgaccgacgtgtccgcgcaggacttctcaatgaggccgtcttcaagtgactgttag

SEQ ID NO: 242190 - DNA, 504 bp, synthetic construct
  misc_feature 1..504: note = Description of Artificial Sequence: Synthetic coding sequence
  source 1..504: mol_type = other DNA
atgatcatcacaacttggattgtgtacattttagcgagaaaaggcgttggacttcctttcctaccaatcacaagctctgatattgacgtggtggaatcagaagcagtgtcagttctgcaccattggctgaagaagactgaagaggaggcatccagaggaattaaggagaaacttagcataaaccatccgtcccagggcgtgcgagagaagatgtcgaccgactcacctccgacacatgggcaggacattcatgtgaccagagacgtggtaaagcaccatctgagtaaatcagatcttctggccaaccagagtcaagaagtcctggaggagcggaccagaattcaatttattaggtggagccatacaagaattttccaggttccgagcgagatgaccgaggatattatgcgggatagaatcgagcaggtgcgtcgatcgatctcaagactgaccgacgtcagcgcccaggatttctctatgcgcccatccagctcagactgctag

SEQ ID NO: 242191 - DNA, 1563 bp, synthetic construct
  misc_feature 1..1563: note = Description of Artificial Sequence: Synthetic coding sequence
  source 1..1563: mol_type = other DNA
atgggcaagcctagcagcatggacacaaaatttaaagacgatctcttcagaaagtatgttcagtttcacgagtctaaagtggataccaccacgagcagacagcgaccaggatccgacgagtgtcttcgagtggcagcctccactttactgtcccttcataaggtggaccctttttatcggttccgcttaattcaattctacgaggtggtggagagcagtcttaggtctctgagctccagttccctgcgcgctctgcacggtgccttctcaatgttagaaacggtaggcatcaatctgttcttgtacccctggaaaaaggaatttaggagcattaaaacatatactggaccattcgtgtactatgtaaagagcacattgcttgaggaagatattcgagcgatcttgagctgtatgggctacaccccagaactcggaactgcctacaagctacgagagctcgtggaaactttgcaggtgaagatggtgagcttcgaactgtttttggccaaggtcgaatgtgaacaaatgctggagatacattcacaggtaaaggacaaaggatattccgagctagatatcgttagcgagcgaaagtcgtccgctgaagacgtgcgtgggtgcagcgacgctttgaggagacgtgccgaaggcagggagcacttgacagcaagcatgtcccgggtggctctccagaaaagcgcttcggaacgagctgccaaggattactacaaacctcgggttacaaagcccagccggtcagtagacgcctacgacagctattgggaatctagaaagccgccactcaaggcgtcattgagcctcaggaaggaacctgtggctaccgacgtgggcgatgaccttaaggacgagattattcggccaagtcccagcttgctcaccatggcatcatccccccacggctctcccgatgttctgcctcctgctagcccatcgaatggcccagctttgcttagaggtacctactttagcacgcaggatgatgtcgatctgtatactgactccgagcccagagcaacctaccggagacaggatgccctgagacctgacgtctggttgctccggaacgacgcccattcactataccacaaaagaagtcctccggctaaagaaagcgctttgagcaaatgtcaatcttgcggactctcctgcagtagcagcctgtgccagaggtgcgactctttgttgacatgcccccctgccagtaaaccctcagctttccccagcaaggcaagcacacacgatagtttagcccatggcgcaagcttaagagagaaatacccgggtcagactcaggggttggatcgcctgccccaccttcactcaaaaagtaagccctcaaccacccctacttcccgatgtgggttttgcaaccgcccaggtgctaccaacacctgtactcagtgttctaaggttagctgcgacgcctgtctgagtgcctaccattacgacccctgctacaagaaaagcgagctgcataaattcatgccaaacaatcagctgaattataagtccactcaacttagtcacttggtgtaccgctag

SEQ ID NO: 242192 - DNA, 1563 bp, synthetic construct
  misc_feature 1..1563: note = Description of Artificial Sequence: Synthetic coding sequence
  source 1..1563: mol_type = other DNA
atgggcaagccctccagtatggacactaagttcaaggatgacttgtttcggaaatacgtgcagtttcacgagtctaaagttgacaccacaactagtcgccagcgcccaggttctgatgagtgcttacgggttgcagctagcaccttgctgagcttgcacaaagtggatcctttctataggttccggctgatccagttttacgaggtggtggaatcttctttgcggtccctatcgtcatcttcactccgggctctgcacggcgcttttagtatgttggagaccgtgggcatcaacctcttcctgtacccctggaagaaagagtttaggtctataaaaacctatacggggccttttgtgtactatgtgaagtccactttgcttgaggaagatattagggcaatcctttcctgtatggggtacacccccgaactgggaacagcttacaaacttcgcgaacttgttgagacactgcaagtcaaaatggtttcatttgagctgttcttagccaaggtggagtgcgagcagatgcttgagatccactcccaggtgaaagacaagggatatagcgagctcgatattgtgtccgaacgcaagagcagtgcagaagacgttagaggctgcagtgacgctctgcgaagacgggctgagggcagggagcacctcaccgcctcgatgagccgcgtcgcactgcaaaagagcgcctcggaacgggcagccaaagattactacaagcccagagtgactaagcctagccgcagcgtagatgcctacgattcttactgggagagccgaaagcccccactcaaggcatcactgtccctccgcaaagaaccagtggcaaccgatgtcggcgatgatctaaaggatgagattattcgcccaagtcccagcctcctcacgatggccagcagtcctcatgggtctcctgatgtgctgccccctgcttcacctagtaatggtcccgcacttctgcgcggtacctacttttcgacccaggacgatgtggacctttatacagacagtgaaccacgcgctacctataggagacaggatgcacttcgccctgatgtctggcttctgcgcaacgacgcccatagtctctaccataagcgctccccacctgctaaagaaagcgcactctctaagtgccagtcctgtggactaagttgctcctcctcactgtgtcagagatgtgattcactcttgacgtgtccacccgctagtaaaccctctgccttcccctcaaaggcttccactcatgactctctggcacatggagccagcttgcgggaaaagtatccgggtcagactcagggtctggatagactcccccatctgcacagtaaatcaaaacccagtacgacccccacgtcaagatgcggcttttgcaaccggccaggcgcaaccaatacttgcacacagtgctctaaagtatcctgtgacgcgtgcctgagcgcctatcactacgatccctgctacaagaagtccgagcttcacaaatttatgcccaataatcaactcaattacaagtccacccaactctctcacctcgtttatcgatag

SEQ ID NO: 242193 - DNA, 1152 bp, synthetic construct
  misc_feature 1..1152: note = Description of Artificial Sequence: Synthetic coding sequence
  source 1..1152: mol_type = other DNA
atgggttacacacccgaactgggtactgcctataaactgcgggaattggtggaaaccctgcaggttaagatggtatccttcgaactgtttctggctaaagtcgagtgtgagcagatgttggagatacatagccaggtaaaggataagggttattcagaattggacatcgtttcagaacgcaagagcagcgccgaggatgtgcggggatgctcagacgccctgaggcgacgagctgaggggagggagcatttaaccgcttctatgagtcgggtggcgctgcagaagtcggcttctgagcgggcagcaaaagactattacaagcccagagtgaccaaaccctctcggagtgtcgatgcctacgactcctactgggaatcacgcaaaccgccactcaaggctagtctttccctgcggaaggagccagtggccacggatgtgggtgacgacctaaaagatgagatcatccggccatccccgtctctcttgaccatggcctcctcaccgcacggctcccctgatgtgctgccccctgctagcccatcgaatggacctgccctgctcagagggacctacttttcgactcaggacgacgttgatctatatactgatagcgagcctcgcgcaacctatagaagacaagatgctctgcgtccagatgtttggttgcttcggaatgatgcacattccctttaccacaagcggtcaccacctgcgaaagagagcgcgctatctaagtgtcagagttgcggtttaagttgctcttcatctctgtgccagaggtgcgatagtctcttgacttgtcctccagctagcaagcctagcgcgttcccgtctaaggcctctactcatgacagcctggctcacggggcatctctccgggaaaaataccccggacagacccagggacttgaccggctgccccacctccattccaagtccaaacccagcactactccgacatccaggtgcggtttctgcaatcggcctggggcaacaaatacctgtacccagtgcagcaaggtgtcttgtgacgcctgcctttctgcatatcattatgatccctgctataagaagagtgaactgcacaagtttatgccaaacaatcagttgaactataaatccacacagctttcccatctcgtatatcgatag

SEQ ID NO: 242194 - DNA, 2409 bp, synthetic construct
  misc_feature 1..2409: note = Description of Artificial Sequence: Synthetic coding sequence
  source 1..2409: mol_type = other DNA
atgctaggagcgagagcttggctgggacgcgtgctgttacttcctcgcgcaggtgcaggcctggcagcaagccggcgttgtcctggtgtctggcctcgcacttggccacatcgttcaccatcccgcggatcatcttctagagataaggaccgaagtgcgaccgtgtcctcttcagtgccgatgccagctgggggaaaggggagccacccctcatccacaccccagagggtgcccaatcgcctgatccacgaaaaatcaccgtatctgctccagcacgcgtacaacccggttgattggtacccctggggacaggaagccttcgacaaagctcgtaaggagaacaaacccatattccttagcgtgggctatagcacttgtcattggtgtcatatgatggaagaagagtcctttcagaacgaggagataggaagactcctctctgaggatttcgtctccgtcaaggtggatcgagaggaacgccctgacgtcgacaaagtgtatatgacattcgtgcaagccacgagcagtggcggaggttggcccatgaatgtttggctgactcctaatctgcagccatttgttggcggaacatacttccctccagaggacggtctgacccgcgtcggatttagaactgttctgttgcgaatccgcgagcagtggaaacagaataaaaacacgctgctggagaacagccaacgggttacaaccgctcttctggcaagatccgaaatatccgtgggagaccggcaactcccaccatccgccgcaacagttaacaatagatgtttccagcagctcgatgaaggatacgatgaagagtacggcggattcgctgaggcacccaagttccccacccctgtgatcctatcttttctcttttcttactggctgagtcaccggcttactcaggatgggtcccgcgcacagcagatggctctgcacacactgaagatgatggcgaacgggggaataagagatcatgtgggacagggattccaccgttactcaaccgaccggcaatggcacgtccctcactttgagaagatgctctatgatcaggcccaactcgccgttgcttattcccaggcattccagctgagcggggatgaattttactctgacgtcgcaaagggcatccttcagtacgtcgctaggtcgctctcccaccgctccgggggtttctactctgccgaggatgcagattcacctccagaaaggggccagagacccaaagagggggcttattacgtttggactgtcaaagaagtccagcagctgctcccagagcctgtgctgggggcaactgaaccattgacttccggccaactcctcatgaagcactatggactaacagaagcaggtaacatttcgccttcgcaagaccctaaaggagagctccaggggcagaacgtgctgacagttcgatattcgcttgagttaactgctgccaggttcggtcttgacgtggaggcagtccggactcttctgaatagcggactggagaagctttttcaggccagaaagcacaggccaaaaccccatctagacagcaagatgttagccgcttggaacggactgatggtgagcggttatgcagtgaccggtgcagttcttgggcaggatcgcctcatcaactatgctacaaacggcgctaagttcctgaagcgtcatatgttcgatgtcgcctcgggacgactcatgagaacttgttataccggcccaggcggaactgtggaacacagcaaccctccatgttggggatttctggaagattatgcgttcgtggtgcgtgggctgctcgacctctacgaggccagccaggagagcgcttggctcgagtgggcgctgcgactgcaggatacccaagataagctattctgggattcccaaggcggtggctacttctgttcagaggcagagctgggcgctgggcttccccttcggctgaaagatgatcaggacggggctgaaccatccgctaactccgtctcggctcataatctgttgcgcctccatgggtttacaggccacaaggactggatggacaaatgcgtgtgcctgttaaccgcgttctccgagcgtatgagaagagtgcctgtagctctgcccgaaatggtgagagccctgagtgcacagcagcaaaccttaaagcaaatagtgatatgtggcgacaggcaagccaaagacactaaggcactggttcagtgcgttcactctgtgtacatcccgaataaggtgctaatccttgcagatggagatccttcctcatttctctctcgacagctgccttttctctctactttaaggcgattagaggatcaggccacagcctacgtctgcgagaatcaggcatgttcagtacctatcaccgacccgtgtgaactcagaaagctcctgcacccctag

SEQ ID NO: 242195 - DNA, 2361 bp, synthetic construct
  misc_feature 1..2361: note = Description of Artificial Sequence: Synthetic coding sequence
  source 1..2361: mol_type = other DNA
atgctgggcgcaagagcctggctgggtagagtgctgctgctgccgagggctggagcaggtctggctgcctcgagaaggggctcatcgtccagggataaagacaggtccgcaaccgtgagcagttctgtacctatgcctgcaggcggaaaggggtctcaccctagctcaaccccccagcgagttcctaatcgactgattcacgagaagagcccatatctgcttcagcacgcctataaccccgtagactggtacccctgggggcaggaagcctttgacaaggctagaaaggaaaacaagcccatctttcttagtgtcggctatagcacatgccattggtgccatatgatggaagaggaaagttttcagaatgaggagattgggagacttctgagcgaagattttgtgagcgtgaaagttgacagagaggagaggcccgacgtggacaaggtgtacatgacctttgttcaagccacctcttccggcggagggtggccaatgaatgtgtggctaacacccaatctgcaaccatttgtggggggtacatattttccgcctgaagacggactgaccagggtcgggttccgcacggttctgttaaggattcgcgaacagtggaagcagaacaagaacaccctgctggagaactcacaaagggtgactacagccctcttggcgaggagtgaaatcagcgtaggtgacaggcagctgccaccctccgccgctaccgtcaacaaccgctgcttccaacaacttgatgaagggtacgacgaggagtatggcggattcgccgaagcacccaagttccccacgcccgtcattctttcctttctgttcagctactggctgagtcacagacttactcaggacggaagcagggcccagcagatggcattacatactcttaagatgatggcaaacggaggaattcgggaccatgttggccaagggtttcacagatacagtactgataggcagtggcacgtaccccatttcgagaaaatgctttatgatcaggcacagcttgccgtggcctacagccaagccttccagttaagcggagacgaattttattccgatgtggccaagggcatcttgcagtacgtggccaggagcttatctcacagaagtggtgggttctatagcgccgaggacgccgatagccctcccgaacgtggacaacgccctaaggaaggagcctactatgtttggaccgtgaaggaagtccagcaactgcttccagaacctgtactgggggcaactgaacctctgacctcaggtcagcttctgatgaaacattatggattaaccgaagctgggaacatcagcccttctcaagaccccaagggggaactacaaggccagaatgtgctcaccgtgcgctatagtcttgaacttaccgcagcaagatttggacttgatgtggaagcagtgcgcaccttactgaactccggcttggagaaattgttccaggccaggaaacacagaccaaaacctcatctcgacagtaaaatgctagccgcttggaacggcctgatggttagcggctacgccgtcacaggcgctgtattaggccaagatcggctcataaattatgccactaatggtgccaaatttctgaagcggcatatgttcgacgttgcctctggcagactgatgcgaacttgctataccgggcctggtggaactgtggaacattccaaccctccctgttggggcttcctcgaggactatgcctttgttgtgcgcggactcctagacttgtacgaggcctctcaggagtcagcatggttggagtgggcgttgcgtctgcaggatacacaggataagctcttttgggatagccaggggggaggctacttttgcagcgaagcagagctgggcgctggcctgccactcaggcttaaggacgatcaggatggagctgagccttcggctaatagtgtgagcgctcacaacctgctgagactgcacggattcactggacataaagactggatggacaagtgtgtgtgcctgttaacggctttttccgagaggatgagaagagtccccgtggcactgcccgagatggtgagggccctgtcagcccagcagcaaaccctcaagcagattgttatctgtggggaccgacaagccaaggataccaaggcgctggttcagtgcgtgcattcggtttatattcctaacaaggtgctcattctcgccgacggagatcccagctcattcctgagtagacagctgccctttttgagcaccttgaggagacttgaagaccaagccacagcctacgtgtgtgagaaccaggcctgctccgtccccatcaccgacccgtgcgaactccgtaaactcctgcatccctag

SEQ ID NO: 242196 - DNA, 2229 bp, synthetic construct
  misc_feature 1..2229: note = Description of Artificial Sequence: Synthetic coding sequence
  source 1..2229: mol_type = other DNA
atgcccgcagggggaaagggttcccacccaagttccaccccgcaacgagtgcccaatcgactcattcatgaaaaaagtccctatttactgcagcacgcatataaccctgttgattggtacccctgggggcaggaagctttcgataaagcaagaaaagagaataagcccatcttcctgtctgtgggttattccacctgccattggtgtcatatgatggaggaagaatcctttcaaaatgaagaaatcggccgtctgctcagtgaggatttcgtgagcgtcaaggttgatcgggaggagcgcccagacgtggacaaggtgtacatgacctttgtacaggctacctcatccggcggaggttggcccatgaatgtgtggttgacccccaacctccagccctttgtcgggggaacctattttccacccgaagacgggttgacccgagtcggatttaggacagtcctcctgaggatccgcgaacagtggaaacaaaacaaaaacacactgttggaaaactcccagagggtaaccactgctctcctggccagaagtgagatatcagtaggagacaggcagttacccccttccgctgccaccgttaataataggtgctttcaacagctggacgagggttacgatgaggagtacggcggatttgcagaggctccaaaatttcccacccctgtgatcttatccttcctgttctcctactggctgagtcaccgtctgactcaggatggcagcagggctcagcaaatggccctccataccttgaaaatgatggcaaatgggggtatcagggaccacgtcggccaaggctttcaccgatactcaacggacagacagtggcatgtaccgcatttcgagaaaatgctgtatgatcaggcccagttagctgtcgcatacagccaagcttttcaactctctggcgacgagttttacagtgatgtagcaaaagggatcctgcagtatgtggcgaggagtctgtcgcaccgcagcggtggtttctattctgccgaggatgccgattctccaccagaacgcggtcaacggccaaaagagggcgcttattacgtctggaccgttaaggaagttcagcagttgttacctgagcccgtgctgggcgctaccgaacccctgacttcaggtcagctactcatgaagcactacggactaactgaggccggtaatattagcccaagtcaggatcctaagggtgagctgcaagggcagaacgttctgacagtgagatattctctcgagctgacagcagctcggttcggcctggatgtggaagccgttcgaacacttctaaatagcggactcgagaagctttttcaagctcgcaagcaccggcctaaaccccacctggacagtaagatgctcgctgcctggaacggcctaatggtgagtggttatgcggttacaggcgctgtcctcggccaagacaggctcataaactacgcgaccaacggagcaaagttcctcaaacgccatatgttcgatgtagcctcaggcagacttatgaggacctgttataccggcccaggtggaacagtggaacactcgaacccgccatgttggggctttctggaagattatgcgtttgtcgtcagaggcttgctcgatttatatgaggcttcccaggagagcgcctggttggaatgggcccttaggctgcaggatacgcaggataagcttttttgggacagtcagggaggcggatatttctgctctgaggctgaactcggagccggactgcccttaaggctaaaagatgaccaggacggcgctgagccaagcgctaattccgtgagcgcccataatcttctgaggttgcacggatttacaggacataaggattggatggataaatgtgtgtgtcttctcactgcattcagcgaacgaatgcgtagggtgcctgtcgctcttcctgagatggtgcgcgctttgtcagctcagcagcagacccttaagcagatcgtcatttgtggcgaccgccaggcaaaagataccaaggccctggtccagtgtgttcactcggtgtatatcccaaacaaggtgctcatcctggccgatggcgacccttcttcattcctatcacgccaactgccttttctgtccactctaagacggcttgaagatcaggcaactgcttatgtgtgcgagaaccaagcctgcagtgtgcccatcaccgacccatgcgaactgcgcaaactgctgcatccctag

SEQ ID NO: 242197 - DNA, 228 bp, synthetic construct
  misc_feature 1..228: note = Description of Artificial Sequence: Synthetic coding sequence
  source 1..228: mol_type = other DNA
ggacagggccaccagggccctggccaatgcgtccacagcgtgtatattcctaataaggtgctcattctcgccgatggcgacccatcctcattcctgtcacgacagcttcctttcctttctaccctgcgccgtttggaagaccaagcaacagcctacgtgtgtgagaaccaagcctgctccgtacctattaccgacccctgcgagctgcgaaagctgctgcacccatag

SEQ ID NO: 242198 - DNA, 132 bp, synthetic construct
  misc_feature 1..132: note = Description of Artificial Sequence: Synthetic coding sequence
  source 1..132: mol_type = other DNA
atgctgggagccagagcctggctcggccgagtgctgctgctgcccagggctggggctgggctagcagccagccgtagaagcgcgtgttccccaacgagccgcttgaactccctgcggtcgctcatcccttag

SEQ ID NO: 242199 - DNA, 918 bp, synthetic construct
  misc_feature 1..918: note = Description of Artificial Sequence: Synthetic coding sequence
  source 1..918: mol_type = other DNA
atggcagcagctggccaggagaagggctacctgacacagaccgccgcagctttagataagtctccaagcctctctccgcagctagcagccccaatccgcggacgccctaagaaatgccttgtatacccacacgcccctaaatcctcaagactgtccagaagcgtcttgcgatggctgcagggcctggacctgagctttttccctcgcaatataaacagagacttttccaacggcttcctcatagccgaaattttctgtatctactatccgtgggaactcgaactgtcaagcttcgaaaacgggactagtctcaaagtgaagctagataactgggcacagctagagaagttcttggcacggaagaaatttaagctgcccaaagagctcatccacggcactatacattgcaaagccggtgttcccgaaattttaattgaggaagtttacaccctgctcactcatcgcgaaatcaagagcattcaggatgacttcgtgaatttcaccgactactcttatcagatgaggctgcctctcgtatctaggagtacggtgtctaagtcaattaaggacaacatacgcctgtctgagttgttgtcgaatccaaatatgctgaccaatgagctgaaagccgagtttctgatcctgctacatatgctacaacggaagctggggagaaagcttaatcccgaatggtttgacgtcaagcctactgtgggggaggttacgctgaaccacctaccagcccaggcctctgggcgtaggtacaatttaaaagtaaagaggggtcgtgttgtgccagtcctgcccaacattggatccggaggcagctcccaccgagaaattcatgtgaaacaggccggtcagcattcctattattcggctatgaagccaattagaaatatggataagaaaccctag

SEQ ID NO: 242200 - DNA, 2682 bp, synthetic construct
  misc_feature 1..2682: note = Description of Artificial Sequence: Synthetic coding sequence
  source 1..2682: mol_type = other DNA
atgtcttccaaaaaaaatcgaaagcggctgaaccagtcagctgaaaacggaagctccctgccttctgctgcgagttcctgtgcagaagcccgagctccctccgccggaagcgacttcgcggctacgagtggaacgctgacagtcaccaatctactggaaaaagtggacgataaaattccaaagaccttccaaaattctctgattcacctgggactgaacacaatgaaatccgcaaatatttgcataggacggcctgtactgctcacttcgctgaatggcaaacaggaagtctacaccgcatggcccatggccggatttccaggagggaaggttggtctctcagagatggctcagaaaaatgtaggcgtcagacccggtgatgccatccaggtccagcctctggtgggcgcagtcctccaggccgaggaaatggatgtggccctatccgacaaagatatggaaattaatgaagaggagctcacggggtgcattctcagaaagctggacggtaagatcgtcctgccgggaaatttcctctactgtaccttctacggcagaccctataagctgcaggtgctcagagttaagggcgcagacggcatgatcctaggaggcccacagagtgacagtgataccgatgcccagcgcatggcattcgagcagtcctcaatggagacttctagccttgaactcagtctgcagctgtcgcagctggatctagaagacacccaaattccaacctcgaggagtacaccttacaagccgatagacgatagaattactaacaaagcctcagacgtcctgcttgatgtcacacagagccctggagacggatctggtctgatgctggaggaagtgaccggcttgaaatgcaattttgagtcagctagagagggaaacgagcagctcaccgaggaggaacgtttactgaagttctcaatcggggcaaaatgcaacactgataccttttatttcatttctagcaccacaagggtgaattttacagagatcgataaaaacagcaaagaacaagacaatcagttcaaggtgacctacgacatgattggcggtctgtcctcccaactgaaggccatccgggagatcatcgaactaccactcaaacagccagaattgttcaagtcgtatgggatacccgctccaagaggggtcctactctacgggcctccaggtacgggaaagacaatgatcgccagagccgtagctaacgaagtgggcgcttatgtgtccgtaatcaacggacccgagatcatttccaagttttacggggaaaccgaagcaaaactgaggcagattttcgctgaggccaccctgcgacacccctctattatattcatagacgagctggacgcactgtgcccaaaaagggaaggggctcagaatgaagtcgagaagcgtgtagtggcctccctgctgacgttgatggatggcattgggtccgaggtgtcagagggccaggtcctggtgctcggagccactaatagacctcatgccctggacgcagctcttagacgcccaggcaggttcgacaaagagattgaaatcggagtgccgaatgcccaggacagactggacattctccaaaaactgctgcggcgtgtgccacacctgttgacagaagccgaactgctacagctggccaactcagctcatggatatgtgggagcggatctcaaggttctgtgcaacgaggccggactatgcgctctgcgccgaatactcaagaagcagcctaacctgcctgatgtgaaggtggcaggacttgtaaagatcacactgaaagacttcctgcaggctatgaacgacatccgaccctctgccatgagggagatcgccattgacgtccctaatgtatcgtggagtgacatcggaggcttggaatcaatcaaactgaagctggagcaggccgtggaatggcctctgaagcacccagaatcatttatccggatgggaatccagccgcctaaaggagtcctgctgtacggcccacctggatgttctaagactatgatcgctaaggctctggccaatgagagcggcctcaatttcctagcaattaaaggtccggaattgatgaacaagtacgtgggcgagtccgagcgtgctgttcgggagactttcagaaaagcccgtgcggtggccccatcaataatcttctttgatgagttggatgcccttgccgtggaaaggggctcaagccttggggcaggaaatgtggccgatagagtccttgcccagttattaacagagatggatggcattgaacagctgaaggatgtgaccatcctcgcggctaccaatcggcctgaccggattgacaaggcgctgatgcgccctgggcgtatcgataggattatctacgtccctctccccgacgcagctacaaggcgggaaatttttaaactgcagtttcacagcatgccagttagtaacgaagtggatctggacgaacttatcctccagaccgatgcctattctggcgcagagatcgtggctgtttgccgcgaggctgcccttctggcactcgaggaagatatccaggctaatttgatcatgaagcgccactttacgcaggctttaagcacggtgacacccaggatccccgagagcctcaggagattttatgaggactaccaagagaaaagtggcctgcatactctttag

SEQ ID NO: 242201 - DNA, 750 bp, synthetic construct
  misc_feature 1..750: note = Description of Artificial Sequence: Synthetic coding sequence
  source 1..750: mol_type = other DNA
atgcagctggataaatttatctaccacttggcgcctgtcgagaaatctcacggtcgcctgcagaaccggacctcccgctcgcagaagaagaagtctaagagccctgagaggtcgaagtattgcataaacgccaagaactacgagcagcccaccatcagtagtaagtcccacagcccttccccttatacgaagagaagaatgtgcgaactgagtgaagacacgcggcgtagactcgcacacttgaacctgggaccctatgagttcaaaaaagagacagataagcccccattcgtcattcgccacgtggaccctccatctccacgggcagacactcttttgggaagcagtgggagagattgtgaaagggacgggtggtcccgtgtccacaatgatcactcccacttaggctgctgtcgaccaaaagattacaaggttataaggacaccccacgggcgagattttgatgattctctggagaagtgcgaggagtatcttagccctcgaagctgttctaagcctagacattctgcccgaacactgctggtgcactcggcaccatcaactatgcctaagcattcaccaagccctgttctcaatagagcatccctgagggaaaggtttcatagcgactggtgttctccaagtaactgcgatgaaatccacgacagggacgagcgcgacctcgaaaaggatgatgaactggagctgaagcggtctctcttgtgccgcgactccgcctacgatagctag

SEQ ID NO: 242202 - DNA, 1419 bp, synthetic construct
  misc_feature 1..1419: note = Description of Artificial Sequence: Synthetic coding sequence
  source 1..1419: mol_type = other DNA
atgcctaaagtcaaggccctccagtgtgcactggcgctcgagatttcaagcgtgacctgccctggagtggtcctgaaggacaaggaggatatctatctaagtatctgtgtgttcggccagtacaaaaaaacccaatgcgtgcctgcgacatttcccctagtgttcaatgcgaggatggttttcgaaaaggtgttccccgatgccgtagatcctggggacgtagtgacccagctcgaatatgatactgctgtgttcgaattgatccagctggtgccgccagtgggtgagaccttatcaacctatgatgaaaatacgcgggatttcatgttcccaggccctaaccaaatgtccggccatcatgatagcaaccgacaggtaaccatgagacgaatatctggacttagaggaaacgcccctcgtcttgagttcagcaccacctccgtcatcacagagtgccttatcagcagtaggaagtgtcatactcaggataagttcatctaccaccttgctccagtcgagaaatcacatgggagactccagaatagaactagtaggtcccaaaaaaaaaaatcaaagagccctgagcgctctaagtattgcattaatgccaagaactacgagcagcccactattagtagcaaatctcattctccgtctccctatactaagagacgcatgtgcgagctcagcgaggacaccagaagaagactcgcacacctcaacctgggcccttatgaatttaagaaggagaccgacaagccgcctttcgtgattaggcatgtcgacccacccagcccacgtgcggatacgctacttgggtccagtggtcgtgattgtgagcgggacggatggagcagggtgcataacgatcatagtcaccttggttgctgtcgaccaaaagattataaagttataaggacacctcatggacgcgatttcgacgactctctcgagaaatgcgaggaatatctgagcccccgttcgtgctcaaagcccagacactccgcaagaacacttttagtgcatagcgccccatccaccatgccaaaacattcaccttcgccagtgcttaaccgggcaagcctcagagagaggtttcattccgactggtgcagcccgtccaattgtgacgaaatccacgaccgggacgagcgtgatttggaaaaggatgacgagcttgagttgaaacgttccctgctttgtagggatagtgcctacgatagcgatccagagtacagtagttgtcagcagcctagaggtactttccacttggacgacggggaatattggagtaatagggcagcctcatataagggtaaatcgcaccgcccaatcttcgagaacagcatggacaaaatgtaccggaacctgtacaaaaaggcatgctcaagcgcatcccacacacaggaatcattctag

SEQ ID NO: 242203 - DNA, 1467 bp, synthetic construct
  misc_feature 1..1467: note = Description of Artificial Sequence: Synthetic coding sequence
  source 1..1467: mol_type = other DNA
atgcctaaagtcaaagccctgcagtgcgctctggcactggaaatcagttccgtgacctgtccaggagttgtcctcaaggacaaggaagatatctatctatctatctgcgtgttcggacagtacaagaagacacagtgtgtgcccgcaacattccccctagtgttcaatgctcgaatggtgtttgaaaaggtctttccggacgccgtggatcctggggacgtagtgacccagttggaatacgacactgccgtctttgagctgatacagctggttccacctgtgggcgagaccctttcaacgtacgatgagaatacaagggattttatgtttccgggtcctaaccaaatgagtggccaccatgatagcaacaggcaggtcaccatgcgaaggatatcggggctgcggggaaatgcaccaaggcttgaatttagcactacatccgtgattactgaatgcctaattagtagtagaaagtgtcacacccaggataaattcatataccatcttgcccctgtcgagaaatctcatggtaggctgcagaataggacgtccaggagccagaaaaagaaatctaagtcaccagagagaagcaaatactgcatcaacgccaaaaattatgaacaacctaccatatcttcgaaatctcactccccgagtccttataccaagcgtagaatgtgtgaactgtcagaggatacccggaggcgtctggcccacttaaacctgggtccttacgaatttaagaaggaaaccgataaaccccctttcgtgataagacacgtcgaccctccatcacccagggcggacactctgttgggaagttccggccgtgactgcgagagagatggctggtcccgtgtgcacaatgatcactcacatctggggtgttgccgaccaaaagactacaaggtgattcgcactccacacggacgggactttgacgactccttggagaaatgtgaggagtacctctctcctagaagctgcagcaagcccaggcattccgcacggactctcctagtgcacagcgcaccttctacgatgcccaagcatagtccatctccagttctgaacagagcctcactcagggaaagattccactccgattggtgctcacctagcaactgtgacgagattcacgatagagtgaagaatgtcttaaaaagccaccaggcacatcagagacacctgtacgatgagagggaccttgaaaaagacgatgagctggagttgaagagatctctcttgtgtcgagactctgcatacgactctgacccagaatactcttcctgtcagcagccacggggtactttccacctcgatgacggagaatactggagcaatcgggctgcttcctataagggcaagtcccatagaccaatcttcgaaaacagcatggataaaatgtatagaaacctgtacaagaaggcatgttctagcgcttcccatacccaggagagtttctag

SEQ ID NO: 242204 - DNA, 1251 bp, synthetic construct
  misc_feature 1..1251: note = Description of Artificial Sequence: Synthetic coding sequence
  source 1..1251: mol_type = other DNA
atggtctttgaaaaagttttccccgatgctgtggatccaggagacgtcgtgacacagcttgaactcggcgaaaccttatcaacttatgatgagaacacgagggatttcatgttccccggtccgaaccagatgagtgggcatcacgatagcaaccggcaagtgacaatgcgcaggatatctggccttcggggaaatgcccctcgcctggagttttccaccacctccgtgattaccgaatgtctcatcagctcccgaaagtgtcatacacaggacaaatttatctatcacctcgctccggtagaaaagagccacggcagactacagaaccgaacatcaaggtctcagaagaaaaaatctaagagtcctgaacgttcaaagtactgtatcaatgctaaaaactatgaacagcccactatctccagcaagtcccattctccatctccctatacgaaacggaggatgtgtgagctgagcgaagatacgagacggagactggcacacctgaacctaggtccttatgaatttaaaaaagagacagataaacccccatttgtgatcagacatgtcgacccgcctagccccagggcggacacgttgctcggaagctctggtcgcgattgcgagcgtgacgggtggagtcgcgtgcacaatgatcactcgcaccttggctgttgtagaccaaaagattacaaggtgatccgcacaccgcacggccgtgattttgatgactccctcgagaaatgcgaagagtacctctcaccccgaagctgtagcaaaccacgtcacagcgcacggacgttactggtgcactccgcaccatcaacaatgcccaagcattccccaagcccagtgctgaaccgtgctagcctgcgtgagcgtttccacagcgactggtgctctccttccaattgcgatgaaatccacgacagggttaaaaatgtgcttaagagtcaccaggcccaccaaagacacctgtatgacgagcgcgacctcgagaaggacgatgagctggagcttaagcgaagccttctgtgtcgtgacagcgcctacgactctgatcccgaatacagttcgtgtcaacaacctagaggcacatttcatctggacgacggggagtactggtccaatagggcagcctcatacaaaggaaagtcccatagaccaattttcgagaattccatggataaaatgtatcggaatttgtacaagaaagcctgcagctctgcgagtcacacgcaggaatcattttag

SEQ ID NO: 242205 - DNA, 1377 bp, synthetic construct
  misc_feature 1..1377: note = Description of Artificial Sequence: Synthetic coding sequence
  source 1..1377: mol_type = other DNA
atggatgggagcaggagagtgcgggcaacaagcgttctgcccaggtatggccctccttgtctctttaaaggccacctcagcacaaaaagtaacgctttctgtacagatagcagctccctgcggttgtccacgcttcagctggttaagaaccacatggccgtccattataacaagatcctttctgctaaggccgctgtggactgtagcgtgcccgttagtgtctccacttcaatcaagtatgcagatcagcagagacgggaaaaactaaagaaagagctcgcacaatgtgagaaagagttcaagctgaccaaaactgcaatgcgcgctaactataagaataatagcaaatccctcttcaacaccctccaaaagccatcaggtgaaccccagatcgaggatgatatgctgaaggaggagatgaatggattttccagtttcgcaagaagccttgtgccaagttccgagcgcctgcatctctctctgcacaagagcagcaaagtcatcacgaatgggcctgaaaagaatagttcatcctcgcccagctcagtcgattatgctgcctctggtccacgaaagttgtcgagcggggctctctatggaaggcggcctcgcagcacctttcctaactcccatagattccagttggtaattagcaaggccccaagcggagacctgcttgataagcacagtgagctgttttccaataagcagctcccattcacacccagaactttgaaaactgaagccaaaagtttcctctcccagtataggtactacactccagctaaacggaaaaaagactttaccgaccaacgaatcgaagctgagactcagactgaattgtcgttcaagtccgagctgggaactgccgaaaccaaaaacatgacggattctgagatgaacataaaacaggcctctaattgtgtcacatacgacgctaaggagaagatcgcaccattacccctcgagggacacgactctacctgggatgagataaaagacgacgccctccagcattcaagcccgagggccatgtgtcagtattctctaaaaccgccttctacccgaaaaatctatagcgatgaagaggagttactgtatctgtcttttatcgaggatgtgaccgacgagatcttgaagctcggtctgttcagcaatagattcctggaaaggttatttgaacggcatattaagcagaacaaacacctggaggaggaaaagatgaggcacctacttcacgtcctgaaagtggatctggggtgcacaagcgaggaaaacagcttctcgagcgtgaaaggagacaataaccacgacatggaacttagtacactcaaaattatggagatgtcaattgaggactgcccgcttgacgtttag

SEQ ID NO: 242206 - DNA, 1704 bp, synthetic construct
  misc_feature 1..1704: note = Description of Artificial Sequence: Synthetic coding sequence
  source 1..1704: mol_type = other DNA
atggatggaagtcggagggtcagggccactagcgtcctccctcgctatggaccaccatgccttttcaagggacatctgagcacgaagtccaatgctgccgtcgactgcagtgtacctgtcagcgtgtctacaagcataaagtatgctgatcaacagagaagagaaaaactgaagaaagaactcgcccagtgtgagaaggaattcaaattgactaagacggccatgcgagcgaactataaaaacaactccaagagcttgtttaatacactgcagaagccgagcggggagccccaaatagaagacgacatgctgaaggaagagatgaatgggttctcctcatttgcgagaagcctggtaccttcttctgaacggttgcatctctcactccacaaaagctcaaaagtgatcaccaacgggcctgaaaagaacagctcatcatcaccatcatccgtcgactacgctgcttctgggcctaggaagctctcttccggggctctctacggcaggcgtcctagaagtactttccccaatagtcatcggttccagctcgttatcagtaaggccccatccggcgacttactcgacaaacacagcgagcttttttccaataagcaattgccattcacaccaagaactttgaaaacagaggccaaatcttttctgtcacagtaccgctactacacaccagctaagagaaagaaagactttaccgaccagcggatcgaggctgagacacagacagagctttcctttaagtcagagctgggcactgcagagactaagaacatgaccgatagtgagatgaatatcaagcaggcttcaaattgcgtcacctacgatgccaaagaaaaaatcgcacccctgcctcttgagggccatgatagtacctgggacgaaattaaggacgatgccttgcagcactcttcaccccgtgccatgtgtcagtacagcctaaaacccccaagtaccaggaagatctatagtgacgaagaagaattgctttatctctcattcattgaggacgtgacggatgagattctgaagctgggactgttctctaaccgattcttagagagactctttgaacggcacataaaacagaataaacatctggaggaggaaaaaatgcggcacttgttgcacgtgctgaaggttgatctgggatgtaccagcgaagagaattctgtcaagcagaatgacgtggatatgctcaacgtctttgacttcgaaaaggctgggaactctgaaccaaacgagcttaagaacgagagcgaggtcaccattcagcaagaacgacagcagtatcagaaggcccttgatatgctgctctctgcccctaaagatgaaaacgagatttttccatccccaaccgaattttttatgccaatctacaagagcaagcatagcgaaggtgtgatcatccagcaggtgaacgatgagacaaatctggagacttcaactctggatgagaatcacccatccatcagtgactctctgacagacagagagacatcagtcaacgtgatcgagggagatagcgatcctgaaaaggttgagatctccaacggcctgtgcggtctcaatacttctccatctcaatccgtgcagttttcatccgtcaagggggataacaaccatgatatggaacttagcaccctgaaaattatggaaatgagcatcgaggattgcccgctggacgtgtag

SEQ ID NO: 242207 - DNA, 1800 bp, synthetic construct
  misc_feature 1..1800: note = Description of Artificial Sequence: Synthetic coding sequence
  source 1..1800: mol_type = other DNA
atggatgggtccagacgagttcgggcaacttctgtgctgccccgatacgggcctccctgcctatttaagggacacctatccactaagagtaatgccttttgcactgattcaagtagtctccgactaagtacactgcagttagttaagaaccatatggctgtccattataataaaatcctctctgccaaggcggctgtcgattgctctgtgccggtgtcggtgagcactagtataaagtacgccgatcagcagcggcgagaaaagctcaaaaaagagcttgcacagtgtgaaaaagaattcaaacttaccaagaccgcaatgcgcgcaaactacaaaaataattccaaatctctgtttaataccttgcagaaaccctcaggagagccgcagattgaagacgacatgttgaaggaagagatgaacggcttctccagcttcgctagaagtttggttcctagctcagagcgcctgcacctgtcactccacaaaagttcaaaagtaattacaaatggtccggagaagaatagctcatcctctccgtctagcgtcgactatgccgcaagcggccctcggaaattgagctcaggcgctctgtacggcagacggcctaggtctacattccctaactcacacaggtttcagttagtcatatccaaggctccttcaggagacctgcttgataagcactccgagctgttcagcaacaagcaactgcctttcacgcccaggacacttaagacggaggctaagtctttcttatctcagtacagatattataccccagcaaaaagaaaaaaggatttcacagatcagcgaatagaagccgagactcagacggagctttctttcaaaagcgaattgggtacagcggaaacaaagaacatgaccgattccgaaatgaatatcaagcaggccagcaattgtgtgacttatgatgctaaagagaaaatagcgcctttgcccctcgagggacacgacagtacttgggatgagattaaggacgatgccctccaacattccagtccacgtgcaatgtgccaatatagcttgaagccacctagtacaaggaagatctattctgatgaggaggaactcttatatctaagcttcatcgaggacgtgactgatgagatcttgaaactgggcctgttttctaaccgttttctcgagcgcctgttcgagcgtcacattaagcagaacaagcatcttgaagaggagaaaatgagacatttgcttcacgtcctgaaagtagacttggggtgcacaagcgaagaaaattctgttaaacagaatgatgtagacatgttgaacgtcttcgatttcgaaaaagccggaaacagcgagccaaatgagctcaagaatgagtccgaagtcactattcagcaagaaagacaacaataccagaaagcgctggacatgctcctgtctgccccaaaagacgagaatgagatcttccccagtcctacggaattttttatgcccatctacaagagcaaacatagtgagggcgtaattattcaacaggttaacgacgaaactaacttggaaacgagtaccctggacgagaaccatccatctattagcgactccctcactgaccgcgagacatcggtgaacgtgatagagggcgatagtgaccccgaaaaggttgagatctctaatggcttgtgcgggctgaatactagtccaagccagagcgtgcaattctcaagtgtgaaaggcgataacaaccatgacatggaactcagtacactgaagattatggagatgtcgatcgaggattgccccttggacgtgtag

SEQ ID NO: 242208 - DNA, 1704 bp, synthetic construct
  misc_feature 1..1704: note = Description of Artificial Sequence: Synthetic coding sequence
  source 1..1704: mol_type = other DNA
atggacgggtcacgacgggtgcgcgctacctccgtcctgccgcgatatggcccaccttgtctattcaagggacatctgtcaactaagtcaaatgccgcagtagattgcagcgtgcctgtctcagtgtcaacttcgatcaagtatgccgaccagcaacggagagagaagctgaagaaggaactggcgcagtgtgaaaaggagtttaaactgaccaaaactgctatgcgcgcaaactataagaacaattccaagtcacttttcaatacactccagaagccgtcaggagagccgcagatcgaagacgacatgttgaaggaagagatgaacggcttttcttcattcgccagatccctggtcccctcctctgaaaggttgcatctttccctgcataagtcttctaaggttattacaaacggcccagagaaaaactcctcaagcagcccgtctagtgttgactatgcggcatctggcccacgaaaattgagtagcggcgctctttatggccgtcggccacgcagcaccttcccaaactcccaccgcttccaactggtgatctccaaggcaccttctggcgacctgctagataaacacagcgagctgtttagcaataagcagttgccctttacacctagaactttgaagactgaggcaaagagctttctatcacaatataggtactacaccccggctaagcggaagaaggatttcactgatcaaagaatagaggcagaaacccagaccgaactttcattcaagagcgaactgggtactgctgaaaccaagaacatgacagattcagaaatgaatataaagcaagccagcaactgcgtcacctacgacgctaaagaaaaaatcgctccactgccgctggaaggacacgacagtacatgggatgagataaaggatgacgctcttcagcattcatcaccaagagccatgtgccagtatagtttaaagcctccttccacgcgtaagatctatagcgatgaggaagagctgctttacctttcttttatcgaggatgtgacggatgaaatactgaagttaggcctctttagtaacagattcctggagagactttttgagcgccacattaaacagaacaagcacctggaagaagaaaaaatgcgccatctcttgcacgtgctgaaagtagacctcgggtgcacttctgaggaaaactccgtgaaacagaatgacgtggatatgttgaatgtttttgactttgagaaagcaggtaacagcgagccaaatgagttgaaaaacgagtcagaggtgaccatacaacaggagcgccagcaataccagaaggcactggatatgctccttagcgctcctaaggacgaaaacgaaatcttcccttctccaacagagttctttatgcctatctacaaaagcaaacattccgagggcgttattattcaacaagtcaacgatgaaactaatttagaaacttctactctggatgaaaaccacccttctatcagcgacagccttactgacagagagacaagtgtgaatgtgattgagggtgactcggaccctgagaaggtagaaataagcaatggattgtgtggcctgaacactagtccaagccagtccgtgcaattcagctctgtgaagggtgataataaccacgacatggaactcagtaccctcaagatcatggaaatgtctatcgaggactgccccctggacgtctag

SEQ ID NO: 242209 - DNA, 318 bp, synthetic construct
  misc_feature 1..318: note = Description of Artificial Sequence: Synthetic coding sequence
  source 1..318: mol_type = other DNA
atggcccctgctggaatgtcaggggcacaggacaactcatgtctgtaccaggaaatcgcgccttcttttcagagattgccttgtcccagaacatcttctcgtcacttctccgaggctatgacctgcccttgcggctggaggccattcaaagggggtcctggaggtctgaaggggcctgtttggcctgccaaagaggaaaactcctgtagtcatgggagaatacaaagggttcagaggcgacgggtcccatcagcaagcccactcatccagaaaatcaatcgaaggtcggtgctcttccatccttactgttggagctag

SEQ ID NO: 242210 - DNA, 1638 bp, synthetic construct
  misc_feature 1..1638: note = Description of Artificial Sequence: Synthetic coding sequence
  source 1..1638: mol_type = other DNA
atgtctaggaagcagaatcaaaaggactcatcgggcttcattttcgaccttcagtcaaacaccgtgcttgctcagggcggagcttttgagaacatgaaagaaaaaatcaatgccgttcgcgctattgtgccaaacaagtcgaataatgaaatcattctcgtgcttcaacattttgacaactgcgtggataaaactgttcaggccttcatggaaggctctgcaagcgaggtgctgaaagaatggactgtgactggaaagaaaaagaataagaagaagaaaaataaaccaaagccagccgcagaaccgtctaatggcatccccgattcaagcaaatcagtttctattcaggaagaacaatctgctccatccagcgaaaaaggcggaatgaacggataccatgtgaacggggctatcaacgacaccgagtcagtggattcattgtccgaggggctcgaaacactgagcattgacgccagagaactcgaggaccccgagtccgctatgctggatacgctggataggacgggctctatgcttcaaaatggagtgtccgacttcgagaccaagagtctgaccatgcattccattcacaactcacagcagccaaggaacgctgccaagtctttatcacggccaaccacggagacgcagttctcaaatatgggaatggaggatgttcctctagctacctcgaaaaagttgagtagcaatattgagaagtcggtgaaagatcttcagaggtgtacggtctctctggcacgctaccgcgtggtcgtgaaggaggagatggatgcatcaatcaaaaaaatgaaacaagcttttgcagagctggagagttgcctgatggaccgggaggtcgcacttctagccgagatggacaaagtgaaggcggaagcgatggagatccttctctctagacagaagaaagctgaattgctgaagaagatgactcacgtcgcagtgcagatgtccgaacagcagctcgttgaactgagagcggacatcaaacactttgtcagcgaacggaaatacgacgaggacctgggtcgggtggcaaggtttacgtgcgatgtcgagacgcttaaaaagagtatcgatagcttcggccaggtctcccacccaaagaattcctattccaccaggtcgcggtgctctagtgtcacctctgtgtccctcagcagtccaagtgacgcctccgctgcctcatcaagcacttgcgcgagccctccatccttgacatctgcgaacaagaaaaactttgcccctggcgaaactccagcggcaattgctaactcttccgggcagccatatcaacccttacgggaggtgctgccagggaatcgtcggggaggacagggttatagacctcagggccagaaatcaaatgaccctatgaatcagggcaggcatgacagcatgggaaggtacagaaattcatcgtggtatagctctggatctcgttaccagtccgcacccagccaggcgcctggcaataccatcgaaagaggtcagactcattcagctgggaccaatgggactggggtcagcatggaaccatcaccacctactccctcttttaaaaaaggtcttcctcagcggaagcccagaacctcccaaacagaagcggttaattcttag

SEQ ID NO: 242211 - DNA, 1638 bp, synthetic construct
  misc_feature 1..1638: note = Description of Artificial Sequence: Synthetic coding sequence
  source 1..1638: mol_type = other DNA
gtctctaaaaaaaagaagaagaaggacagtagcggctttatctttgatctccaaagtaatactgtcctggctcagggtggtgcgttcgagaacatgaaagagaaaatcaacgcggtgcgagctattgtacccaacaagagcaataacgagattatcctcgttctccagcattttgataactgtgtggataaaaccgttcaggcattcatggaaggatctgcatccgaggtgcttaaggagtggaccgtgacaggcaaaaaaaagaataagaagaagaagaataagcctaagcctgccgcagaacctagtaatggaattcctgacagtagcaagagtgtaagcattcaggaagagcagtcggccccaagtagcgaaaagggcggtatgaacggataccatgtgaacggggcaattaacgatacggaaagcgtggattccctcagtgaaggccttgagacgctgagcatcgacgccagagagttagaggatccggaatccgccatgctcgacactctggatagaaccggatcaatgctccagaacggggtgtccgactttgagacaaaaagccttacaatgcactcaattcataattctcaacagccccgaaacgctgcgaaatcactgagtaggcctaccactgagactcagttctccaacatgggcatggaagacgtgcctctggctaccagcaagaaactctcctccaatatagaaaaaagtgtcaaggatctacagcgctgcacagtctccctggccagatatcgggtcgtcgtgaaagaggaaatggatgcttccattaaaaaaatgaagcaggcttttgctgagctggagtcctgccttatggaccgggaggtggccttgctagcggaaatggacaaagtcaaggctgaggccatggaaattctcctcagtagacagaagaaggccgagctgctgaaaaaaatgacacacgtcgccgtgcagatgagcgaacagcagctggtggagctgagagcagacataaagcactttgtgtccgaacggaagtacgacgaagacctgggtcgggtggccaggttcacctgcgatgtcgaaactcttaaaaagtctatcgactctttcggacaggtgtctcatccaaaaaattcttactcaacgcgatctaggtgctcttctgtgactagtgtctcactctcttcaccatctgacgccagcgcggcaagctcttccacatgtgcttctcccccttccctaacctctgcgaataaaaagaatttcgctccaggagagaccccagcagccattgctaattcctccgggcaaccttatcagcccctgcgggaggttctgccgggtaacaggcgagggggacagggttacaggcctcaaggtcaaaaatccaacgatccaatgaaccagggaaggcatgattccatgggcaggtaccggaattcttcctggtatagttcaggctctaggtaccagagtgcaccaagtcaggctccaggtaatactatcgagcgcggacaaacacattcggccggtacaaacgggaccggcgtgagtatggaaccctcccccccaacgccttccttcaaaaaaggcttaccccagaggaagcctcggacctcccagactgaggccgtcaactcatag

SEQ ID NO: 242212 - DNA, 27 bp, synthetic construct
  misc_feature 1..27: note = Description of Artificial Sequence: Synthetic coding sequence
  source 1..27: mol_type = other DNA
atgagtagaaagcagaatcaaaaatag

SEQ ID NO: 242213 - DNA, 27 bp, synthetic construct
  misc_feature 1..27: note = Description of Artificial Sequence: Synthetic coding sequence
  source 1..27: mol_type = other DNA
atgtcacgtaaacagaaccagaagtag

SEQ ID NO: 242214 - DNA, 204 bp, synthetic construct
  misc_feature 1..204: note = Description of Artificial Sequence: Synthetic coding sequence
  source 1..204: mol_type = other DNA
atgagccggaagcaaaatcaaaaagactcctccggctttatctttgacctgcagtccaacacagttctcgcccagggcggagcctttgaaaatatgaaagaaaagattaatgcagtccgcgctattgtgcccaacaagtcgaataacgagattatactcgtgcttcagcattttgataattgtgtagacaaaacagtgcagtag

SEQ ID NO: 242215 - DNA, 102 bp, synthetic construct
  misc_feature 1..102: note = Description of Artificial Sequence: Synthetic coding sequence
  source 1..102: mol_type = other DNA
atgtcaaggaaacagaatcagaaagacagttccggattcattttcgatctgcagagcaacactgtgctcgctcagggcggagctttcgaaaacatgaaatag

SEQ ID NO: 242216 - DNA, 18 bp, synthetic construct
  misc_feature 1..18: note = Description of Artificial Sequence: Synthetic coding sequence
  source 1..18: mol_type = other DNA
atgagccgaaagcagtag

SEQ ID NO: 242217 - DNA, 111 bp, synthetic construct
  misc_feature 1..111: note = Description of Artificial Sequence: Synthetic coding sequence
  source 1..111: mol_type = other DNA
atgagtagaaaacagaaccagaaagactcctccggctttatctttgaccttcagtcaaacacggtgctggctcagggaggggcattcgaaaatatgaaagagaaagtttag

SEQ ID NO: 242218 - DNA, 201 bp, synthetic construct
  misc_feature 1..201: note = Description of Artificial Sequence: Synthetic coding sequence
  source 1..201: mol_type = other DNA
atgtctaggaagcaaaatcaaaaagattcaagtggttttatctttgacctgcagagcaacactgtgctggcccagggaggggcttttgagaatatgaaggagaaaatcaacgccgtgcgcgcaatcgttcctaacaaatcgaacaacgagataatcctggttctccagcacttcgataactgcgtagacaagaccgtttag

SEQ ID NO: 242219 - DNA, 105 bp, synthetic construct
  misc_feature 1..105: note = Description of Artificial Sequence: Synthetic coding sequence
  source 1..105: mol_type = other DNA
atgagcagaaagcagaatcagaaagactcttctggttttatattcgacctccagtctaacactgtactggctcaaggcggtgccttcgaaaatatgaaagagtag

SEQ ID NO: 242220 - DNA, 297 bp, synthetic construct
  misc_feature 1..297: note = Description of Artificial Sequence: Synthetic coding sequence
  source 1..297: mol_type = other DNA
atgtccagaaaacagaaccaaaaggacagctcagggttcattttcgacctacagtcaaacaccgtgctcgcacaagggggagcctttgagaatatgaaggaaaagattaacgctgtgcgggcaatcgtccctaacaagagtaataacgaaatcatattagttttgcagcactttgacaattgcgtggataagaccgtacaagccttcatggagggttccgcctccgaggtgttgaaagagtggacagtgaccggaaagaagaagaacaagaagaaaaaaaacaaacctaaaccatag

SEQ ID NO: 242221 - DNA, 225 bp, synthetic construct
  misc_feature 1..225: note = Description of Artificial Sequence: Synthetic coding sequence
  source 1..225: mol_type = other DNA
atgtctcggaagcagaaccagaaggatagtagtggctttatatttgatctgcagtccaatactgtgctggcccagggcggagcttttgaaaacatgaaggaaaaaataaacgccgtgagggccatcgtgcccaataaaagcaataacgagattattttagtattgcagcattttgacaattgtgttgacaaaaccgttcaggctttcatggaaggctctgcctag

SEQ ID NO: 242222 - DNA, 33 bp, synthetic construct
  misc_feature 1..33: note = Description of Artificial Sequence: Synthetic coding sequence
  source 1..33: mol_type = other DNA
atgagtcgtaaacagaaccagaaggattcctag

SEQ ID NO: 242223 - DNA, 1638 bp, synthetic construct
  misc_feature 1..1638: note = Description of Artificial Sequence: Synthetic coding sequence
  source 1..1638: mol_type = other DNA
atgtccaggaaacagaaccagaaagacagcagcggattcatcttcgatctacagtctaatacagtattggcgcaggggggtgcatttgaaaatatgaaagaaaagattaatgccgtaagagccattgtccctaataagtcaaataacgagatcattttagtgttgcaacacttcgacaactgtgtggacaagacggtgcaggcattcatggaaggctccgcctccgaagtgctgaaggagtggactgtaactggtaaaaagaagaataagaaaaaaaaaaacaaaccaaagcctgcagccgagccttcaaatggcattcccgatagctccaaaagtgtctccattcaggaagaacagagtgccccatcttccgaaaaaggaggtatgaacggctatcacgtcaacggggctattaacgacaccgaatcagtcgatagtttgagcgaaggcttagagacactgagtattgacgccagggagttggaggatcccgagtccgcaatgcttgacacccttgatcgaaccggatcaatgcttcagaatggcgtctcagactttgaaactaaatccctgactatgcatagtatccacaattcacaacagccacgaaatgctgccaagagcctttcgcgacccactaccgagacccaattcagtaacatgggaatggaagatgtaccgctggccacctccaaaaaattgagcagcaatatcgagaagagtgttaaagacctgcagagatgcaccgttagcctggccagatacagagtggttgttaaggaggagatggacgcctcaattaagaaaatgaaacaggcgttcgcagagctggaaagctgtctgatggacagggaagtcgctcttctcgcagagatggacaaggttaaggccgaggcaatggagattctcttgagtcgccagaagaaggcggaactactaaagaaaatgacacacgtggcggttcaaatgtcagagcagcagctggttgagctgagagccgatatcaagcacttcgtgagtgaacggaaatacgatgaggacctggggcgtgtcgcccgtttcacttgtgatgttgaaaccctgaagaagagcatcgattcatttgggcaggtgtcccacccgaaaaatagctactcaacccggtctcggtgtagctcagtgactagtgtgtccctgagtagtccatctgatgcctctgcagctagcagctcgacatgcgctagcccacctagcctgacgtcggctaacaagaagaactttgcacccggagaaacaccagctgcaatcgccaactctagtgggcagccctaccagccgttgcgtgaagttctcccaggcaaccggagaggcggtcaaggctaccgacctcagggacagaaaagtaatgatcccatgaaccaggggaggcatgactccatgggccgataccgcaattcgtcctggtatagctccggctcaagataccagtcagctccttcccaggcaccgggaaatacaatagaaagaggccagacgcacagcgctggaaccaacggtactggcgtcagcatggagccttcccctcctactccatcattcaagaagggcctgccccagcgtaagccacggacaagtcagacagaggcggtgaatagttag

SEQ ID NO: 242224 - DNA, 1638 bp, synthetic construct
  misc_feature 1..1638: note = Description of Artificial Sequence: Synthetic coding sequence
  source 1..1638: mol_type = other DNA
atgtcccggaagcagaatcagaaggattcatctgggtttatattcgacctacagtctaatacagtgttggcccagggcggagccttcgagaacatgaaagagaaaatcaatgcagtcagggcgatcgttcctaacaagagtaacaatgagataatcctggtactacagcactttgataattgtgtggacaagacggtgcaggccttcatggaaggctccgcctccgaagttctcaaggaatggaccgttacgggaaagaagaaaaataaaaaaaaaaaaaataaacccaaacccgcagccgaaccctctaatggcattccagactcgtctaaatcggttagcatccaggaggaacagtcagccccttccagtgagaagggcggtatgaacgggtatcatgttaatggtgccatcaacgacaccgagagcgtggacagcctgtccgagggtctcgaaacactgtccatcgacgcacgtgaactcgaagatcccgaatccgcaatgctagacactctagaccgcaccggctcaatgctccaaaatggcgtgagtgactttgaaactaaatctcttaccatgcattccattcacaacagccagcaaccacgcaatgccgctaagtcactgtctcgccctaccacagagactcaattctccaacatgggaatggaggacgtgccattagcgacatccaagaagctgtcctctaacatcgaaaaatcagttaaggacttgcaaagatgtaccgtgtcactagcgaggtaccgcgttgtcgtaaaggaggaaatggatgcttctattaagaagatgaagcaggcatttgcagaacttgagtcgtgcctgatggaccgagaggtcgcacttcttgccgagatggataaggtgaaggccgaagccatggagatacttttgtcgagacagaagaaggccgagctgctgaagaagatgacccacgtggctgtgcaaatgtccgaacagcaattggtggagttgcgtgcggatattaaacatttcgtctccgagcggaagtatgatgaggatctgggaagagtggccagattcacgtgcgatgtcgagacactgaagaagtctatagatagctttgggcaggttagccaccccaagaattcttattcaacgcgtagtaggtgctcctcagtcacaagcgtctccttgagtagcccatcagacgcctccgctgctagttcctccacctgtgcgtctcccccatcgttgacatccgccaataaaaaaaactttgcgcctggggaaactccagccgctatcgcaaacagttcaggccagccttatcagcctctaagagaagtcttgcccggtaaccgcagaggcggacaggggtacagaccccagggacaaaaaagcaacgatccaatgaatcagggcagacatgatagtatggggagatacagaaatagctcctggtatagtagtggctccagatatcaatctgcccctagccaggctcccggaaacacaatcgaaaggggccagacccactccgctggtaccaacggaaccggggtcagtatggagccatcccccccaacaccctcctttaagaaaggtcttccacagcggaaaccaagaacttctcagactgaggccgtgaactcatag

SEQ ID NO: 242225 - DNA, 1677 bp, synthetic construct
  misc_feature 1..1677: note = Description of Artificial Sequence: Synthetic coding sequence
  source 1..1677: mol_type = other DNA
atggctgagcttaacacgcacgttaacgttaaagagaagatctacgccgtgcgatctgtcgtacccaataagtccaataacgagatcgtactggtcctgcaacagttcgacttcaatgtggacaaagctgtgcaggctttcgtggacgggtccgccatacaagtgttgaaggagtggaacatgacaggaaaaaagaagaacaataagcgaaagagatcaaagtcaaagcaacaccagggtaacaaggacgctaaagataaagtggaaaggcctgaagccggacccctgcagcctcagcccccacagatccaaaatggccctatgaacgggtgcgagaaagatagcagctctaccgattccgccaatgagaaaccagccctgatacccagagagaagaaaatctccatactcgaagaaccttctaaggctttgagaggagtgacagaaggtaaccggctcttacagcagaaacttagcttagacggaaatcctaagcctatacatgggactactgagaggtctgacgggcttcagtggtccgcggagcaaccatgtaacccaagtaagcccaaggcaaaaacttctccagtaaaaagcaatacccctgcggcacatcttgagatcaaacccgatgaattagccaagaagcgaggccctaatattgaaaagagcgtgaaggacctgcagcgctgtacagtcagcttaaccagatatagggtaatgatcaaggaggaggtagactcatccgtgaagaagatcaaggcagcctttgcagaacttcacaactgcattatagacaaggaggtgtctctgatggccgagatggataaagtcaaagaagaagccatggaaatcctcactgctcggcagaagaaagccgaagaactgaaaaggttgaccgacctggcctctcagatggcggaaatgcagctcgccgagctcagagccgagataaaacatttcgtgagcgaacgcaaatacgacgaggaattgggcaaagccgctcgattcagctgcgatatcgagcagctgaaggcgcagattatgctctgcggggagataactcatccaaaaaacaattatagttcccgcaccccctgtagctctcttctgccactgctcaatgcgcacgccgcaactagcggaaagcagagcaacttttctcgaaagagtagtacccacaacaagccttcagaaggcaaagccgctaacccaaaaatggtgtcttccctgccatcaactgccgatccgagtcaccagactatgcccgcaaacaaacagaacggttcgtcaaatcaaagacgcaggtttaatccgcagtaccacaacaatagactcaatggccctgcaaagagccaggggagtggtaacgaagcagagccattgggaaagggaaactcacgacatgagcatcgccgtcagcctcacaatggattcaggcctaaaaataaaggaggagccaagaatcaagaggcatctctgggcatgaaaacacctgaagctcccgcacacagtgaaaaaccaaggaggagacagcacgctgcggacactagcgaagcccgtcccttccggggttccgtggggcgagttagccaatgcaatttatgcccaacacggattgaggtgagcaccgatgccgcagtcttgtcagtgcccgctgttacactagtggcctag

SEQ ID NO: 242226 - DNA, 1470 bp, synthetic construct
  misc_feature 1..1470: note = Description of Artificial Sequence: Synthetic coding sequence
  source 1..1470: mol_type = other DNA
atggccgagctgaatacacacgtcaacgtaaaagaaaagatctatgcggtcaggtctgtcgtacctaacaaaagcaacaatgagatcgtacttgtgctccagcagttcgacttcaacgtagataaggccgtccaggcattcgtggatggttccgctatccaggtactgaaggagtggaacatgacaggcaaaaaaaagaataataaacgtaaacgcagtaaatctaaacaacaccagggcaataaagatgctaaggacaaggtggagcgcccagaggcgggaccgctgcaacctcagccccctcagatccagaatgggcctatgaatgggtgcgagaaggactcatcaagtaccgacagcgccaatgagaaacccgctctgataccgagagaaaaaaagatctctattttggaggagccaagtaaggccttgcgcggagtcacaggacccaatattgagaagtccgtgaaagacttacagcgttgtacagtgtctctgacccggtatcgggtgatgattaaggaagaggtggactctagcgttaagaagattaaagccgcttttgcagaactgcacaactgtataatcgacaaagaagtgagcctgatggcagagatggataaggttaaggaggaggcaatggaaattcttacagccaggcaaaagaaagctgaagaactcaaaaggcttacagacttagcgtcccagatggccgaaatgcagttggctgagttaagggctgagatcaagcacttcgtgtcggagcgaaagtatgacgaggaactggggaaagcggcacgcttctcttgcgatatcgaacagctcaaggcccagattatgttatgcggagagatcacacaccctaagaataactactctagcagaaccccgtgcagcagtctgctacccctactcaacgcccacgctgccacatctggtaaacagagcaatttttctcgtaagtccagcacccacaataaaccatcagaaggtaaagccgctaatcccaagatggtgtctagtctacccagtactgctgacccgagtcaccagacgatgcctgccaacaaacagaatggtagttcaaatcagcgcagaagattcaacccacaatatcataacaatagattgaacggaccggcaaagtcccagggatcaggcaacgaagccgaaccattggggaagggtaactcaaggcacgaacacaggagacagccacacaacggattcaggccgaagaacaaagggggtgccaagaatcaggaggcatctcttggcatgaagacaccagaggccccagcgcacagcgaaaaaccccgtaggagacaacacgctgccgatacgagcgaggctaggccgtttagaggatccgtaggccgtgtgtcacagtgcaacctgtgcccaacgcgaattgaggtcagcaccgacgcagcagtgctgtctgtccctgcagtgaccctggtggcctag

SEQ ID NO: 242227 - DNA, 1677 bp, synthetic construct
  misc_feature 1..1677: note = Description of Artificial Sequence: Synthetic coding sequence
  source 1..1677: mol_type = other DNA
atggcagagttgaatacccacgtaaatgtgaaagagaagatttatgcggtgaggagtgtggtgcctaataagtccaataatgagattgtactcgtgctgcaacagttcgacttcaatgttgataaggccgttcaagccttcgtggatggttccgccattcaagtccttaaggagtggaatatgacaggcaaaaagaagaataacaagcggaagagatccaagagtaagcagcaccaggggaataaggacgctaaggataaagtagaaaggcctgaggcgggtcctctgcagcctcagccgccacagatccagaacgggcctatgaatggctgcgagaaggactccagtagtaccgattccgctaacgagaaaccagccctcattcccagggagaaaaaaatcagtatcctcgaagagccctctaaggcacttcgcggtgtgactgagggaaatcgtctgcttcaacagaaactttcactggacggtaaccctaagccaatccatggaacaacggagcggagcgacggtctgcagtggtccgcggagcagccctgcaatccatccaaaccaaaagcgaaaacctcccccgtaaaatcaaacacaccggcagcccatctcgaaatcaaacctgatgagctggcaaagaagagaggtcctaacatcgagaaatcggtcaaggacttacagcgatgcactgtcagcctgactagatatagagtgatgataaaggaggaggtcgattcatccgtgaaaaaaataaaagcagccttcgctgaactgcataattgcattattgacaaggaagtatccctgatggcagaaatggataaagttaaagaggaagccatggagatcttgaccgccaggcaaaaaaaagccgaggagctgaaacggctcacagacctcgctagtcaaatggcagagatgcagctagccgagctgagggccgagatcaagcacttcgtgagcgagagaaaatacgatgaagaattaggcaaggctgcgagattcagctgtgacattgagcagctgaaagcacagattatgctgtgcggcgagatcactcacccaaagaataattacagctctagaaccccatgctcctcactgctcccactactgaacgcgcatgcagcaacctccggtaagcagtccaacttctctagaaaatcaagcactcataataagccctccgaggggaaagccgctaaccccaaaatggtgagctcactccccagcactgctgacccctcccatcagacaatgccagctaacaaacaaaacggctcatccaaccagcgacgccgattcaacccccaataccacaataaccggttaaacggcccagcaaagtctcagggctcgggtaacgaagcagaacctctgggcaagggcaattccagacatgagcaccgacggcaaccgcacaatggattcaggcccaagaataaggggggtgccaaaaaccaggaagcctcattgggaatgaaaacacccgaagcccctgcacactctgagaagccacggcgtcggcagcatgccgcagatacgtctgaagctaggcccttccgaggttctgtcggaagggtcagccaatgtaacctgtgccccacacggattgaggttagtaccgacgccgctgttttaagtgtcccagccgtgacactggtggcctag

SEQ ID NO: 242228 - DNA, 1701 bp, synthetic construct
  misc_feature 1..1701: note = Description of Artificial Sequence: Synthetic coding sequence
  source 1..1701: mol_type = other DNA
atggcctacagcaccaggtctaaaatggccgagctcaatacacacgttaacgtgaaggagaaaatttatgctgtgcgctccgtggttcccaataagtcaaataatgaaatcgtcttagtccttcagcagtttgactttaacgtggacaaggccgtgcaggcctttgtggatggttctgcaatccaggtccttaaagagtggaatatgacgggcaagaagaagaacaataagagaaaaagaagtaaatccaagcaacatcaaggaaataaagacgctaaggacaaggtggagaggccggaggcagggccactgcaaccccaaccgccacagatacagaatggcccaatgaacggttgtgagaaagacagctcctccacagactctgcaaacgaaaagccagccctaattcctagggaaaaaaagatcagcatacttgaggagccttccaaagcactccggggagtgacagaagggaaccgcctccttcagcagaaactgagcctggatggaaaccccaaacccattcatgggacaaccgagcggagcgatgggctgcagtggagtgccgagcagccatgcaacccatctaaaccaaaagctaagacatcccctgtgaagtctaacactccagccgctcacctggaaattaagcccgatgaattagcaaagaagcgcggacccaatatagagaagtctgtgaaggacctgcagcgatgtaccgtgtccctgacaaggtacagagtgatgattaaagaggaggtcgattcatccgtcaaaaaaattaaggccgcatttgcggaactgcacaattgcatcatcgacaaagaggtgtcattaatggccgagatggataaggtgaaagaggaagcaatggaaatcctaaccgcacggcagaagaaggccgaggaactcaagagactgacagatctagccagtcagatggcggagatgcaactagccgaactacgcgctgagattaaacatttcgtcagcgagcgaaaatatgacgaggagcttgggaaggcggcaaggttctcttgcgatatagaacaacttaaagcacaaataatgctttgcggagagataacccaccctaagaacaactatagctcacggacaccgtgtagcagcctgttgcctctgctgaatgctcatgcagccaccagcggaaagcagagtaacttctcccgaaagtcctcgacccacaataagcccagcgaaggcaaggcagcaaacccgaagatggtttcatctctccctagcaccgcagacccttcccaccagactatgcccgctaacaaacaaaatgggtcaagtaatcaaagaaggcgcttcaaccctcagtaccacaacaacaggctgaatggcccagcaaagtcccagggctctggaaacgaggccgagccgttgggcaaaggaaactccaggcatgaacacagacggcagccccataacgggtttaggcctaaaaacaagggaggcgcaaagaatcaagaggcaagcctaggcatgaagacacctgaggctccggcacactctgagaagccacggagacgccaacacgctgccgataccagtgaggcgagaccttttcggggatccgtgggtagggttagtcagtgtaacctctgccccactcgtattgaggtctccactgacgcagctgtgctgtcagtcccagccgtgaccttggtggcatag

SEQ ID NO: 242229 - DNA, 801 bp, synthetic construct
  misc_feature 1..801: note = Description of Artificial Sequence: Synthetic coding sequence
  source 1..801: mol_type = other DNA
atggctgagctgaacactcacgtcaacgttaaggaaaaaatatatgccgtgcggagtgtcgtgccgaataagagcaacaacgaaatagtgcttgtcctgcaacaattcgacttcaacgtcgacaaggccgtccaagcctttgtcgacgggtctgcaattcaagtgttaaaggagtggaacatgacgggcaagaaaaagaacaataaaagaaaaaggagtaagagtaaacagcaccaagggaataaagacgctaaggataaagtcgagcggccagaggctgggcctttgcagccacaaccaccacaaatccagaacggccctatgaatgggtgtgagaaggactcaagttcaacagacagcgccaatgagaaacctgcattgatccctcgcgagaagaagattagcatcctggaagagccgtccaaagcactccggggtgtgactggtcccaacatcgaaaaaagcgtgaaggacttgcagagatgcacggtgagcctgacgcgctaccgcgtgatgattaaggaagaggtggactcaagtgtcaaaaaaattaaggcagcctttgccgagctccataattgtattattgataaagaggtctcccttatggcggagatggataaagtgaaagaggaggccatggaaatcctgaccgctcgacagaagaaggctgaggagctcaaacggctgacagacttggcttctcagatggcagaaatgcagctcgctgaactgcgggctgaaatcaagcactttgtcagcgaacggaagtatgatgaggagctgggcaaagctgcctag

SEQ ID NO: 242230 - DNA, 1677 bp, synthetic construct
  misc_feature 1..1677: note = Description of Artificial Sequence: Synthetic coding sequence
  source 1..1677: mol_type = other DNA
atggctgaactgaatacacacgtgaatgttaaagagaagatctatgcggtgcgtagtgtggtcccaaacaagagcaacaacgaaattgttttggtactgcaacagttcgattttaacgtggacaaggctgttcaggcttttgtggatgggagcgccatccaagtactaaaggagtggaacatgactggtaagaaaaaaaacaacaaacgtaaaagatcgaaaagtaaacagcatcagggaaataaggacgccaaggataaggttgagaggccagaggctggtccccttcagcctcaaccgccacagatccaaaacggtcccatgaatggttgtgaaaaagattcgtcttccacagactctgctaatgaaaaacccgcactgatcccaagagagaagaaaatctccatccttgaggagccttccaaagcactccgcggtgtcactgaggggaatcgcctgctgcagcagaaactatcactagacggtaaccccaaaccaatccatggtacaaccgagaggtctgatggtctgcagtggagtgcagagcaaccttgcaacccaagtaagcccaaggcaaagacaagccctgtaaagagtaacacaccagcagcccatttagagatcaaaccagacgagctggccaagaaacggggaccaaacatcgagaaatctgtgaaagacctgcagcgctgcaccgtgtccctgactagatacagggtgatgataaaggaagaagtcgattctagtgtaaaaaaaattaaagccgcttttgccgagctgcacaattgtataatcgataaggaagtctcccttatggcagagatggataaggtcaaggaggaggctatggagatcctcactgcccgacagaaaaaggcagaggaactaaagagattgacagacttggcaagccagatggcagagatgcaactggcagagctccgtgcggaaataaagcactttgtctcagaaaggaagtatgatgaggaattgggtaaggccgctaggttcagctgcgacatcgaacagttgaaggctcaaatcatgctgtgcggcgagataacacaccccaagaataactattctagccgcacaccttgcagtagtctgctgcccctgctgaatgctcatgctgctacaagcggcaaacaatccaacttctcacggaagagctcaacccacaataagccttcagagggcaaggccgctaatcccaaaatggttagctctctgccgtccacggccgacccgtcacaccagaccatgcccgcaaacaagcagaacggcagttcgaatcagcgacgaaggttcaaccctcaataccacaacaacaggcttaacggccctgcaaaatcacaggggagcggcaatgaggccgaacctctgggaaagggaaactctcgccatgagcacaggagacagccgcacaacggatttcggccaaagaacaagggcggtgctaaaaaccaggaagccagcctcggaatgaaaacccccgaggctcctgcgcattctgaaaaacccagaaggcgtcagcacgccgcagacacttctgaagctagacccttccggggatcagtcggacgggtgagtcaatgtaacctgtgtccaacccggattgaggtctccaccgatgccgctgtgctttccgtgccagccgtcaccctggtggcttag

SEQ ID NO: 242231 - DNA, 1767 bp, synthetic construct
  misc_feature 1..1767: note = Description of Artificial Sequence: Synthetic coding sequence
  source 1..1767: mol_type = other DNA
atggatcccttttgccactcctctagcgaaacacggctgctgagcggaactttgctgtggataccacgtgcctacagcacacgaagcaaaatggctgagttgaatactcatgtaaacgtcaaagaaaagatctatgcagtgcggtctgtggttccaaacaagtccaacaacgagatcgtgctggtgttgcagcaatttgacttcaacgtcgataaagccgtccaggcattcgtagatgggtcagccattcaggtgctcaaagagtggaacatgaccgggaagaagaaaaacaacaagcgcaagcggtctaaatctaaacagcaccaggggaataaggacgctaaagacaaggtggaacggccagaggccggacctcttcaaccgcaaccccctcagattcagaacggaccaatgaacggctgtgagaaggactctagtagtaccgattccgccaacgaaaagcctgccctgattccacgcgagaagaagatctctatcttggaggaacctagcaaggcattgagaggcgtgaccgaagggaatcggttgcttcagcaaaagctgagcctggacgggaaccctaagcctattcatggtacaaccgagagaagtgacggtctccaatggtccgcggaacagccctgtaacccgtctaagccgaaagccaagactagccctgtaaagagtaacactccggcagcccatctcgagattaagcccgacgagctcgccaagaagcggggacccaacatagagaagtctgtcaaagatctccagcggtgcaccgtcagtcttacccggtacagggttatgatcaaagaagaggtggactcttccgtaaagaagatcaaggcagcttttgccgaactgcacaattgtatcatagataaggaagtgtctctcatggccgaaatggacaaagtgaaggaagaggctatggagatcttgaccgcacggcaaaagaaggcagaggaactcaaacggctgacagacctcgcatctcagatggctgagatgcaactcgctgaacttagggccgaaatcaaacatttcgttagtgaacgcaaatacgacgaagagctcggaaaagccgctcgtttcagctgtgatattgaacagctgaaagcacagattatgctttgtggtgaaatcactcatcccaaaaacaattactcatcgcgtacaccttgttccagcctgctacccctcctgaacgcacacgccgcaaccagtggaaagcagtctaacttctctagaaagagcagtactcataacaaacctagcgagggcaaggcagcaaaccccaaaatggtttcttctttacccagcacagcagacccctcacaccaaactatgcctgcgaataaacaaaacggttcatcaaaccaacgccgacggtttaacccccaataccataataatagactcaatgggcctgccaaatcgcagggatccggcaacgaggctgagcccttggggaagggcaactcccgccacgaacacagacgacagccacacaacggtttcaggcctaagaacaagggtggagctaagaatcaggaggccagccttggtatgaagacgcctgaggcccctgcacattccgagaaacccaggcgcaggcagcatgccgcagacactagcgaagcaagaccctttagaggcagtgtggggcgagtcagccagtgtaacctctgccccacgcggatagaagtaagtacagacgcagcagtactcagcgttccagcagtgacccttgtagcctag

SEQ ID NO: 242232 - DNA, 1677 bp, synthetic construct
  misc_feature 1..1677: note = Description of Artificial Sequence: Synthetic coding sequence
  source 1..1677: mol_type = other DNA
atggccgagctgaacacccacgtgaatgtgaaggaaaagatttatgcagtcagaagtgttgttcccaataagagtaacaatgaaatcgtcttagtcctgcaacaatttgacttcaatgttgataaggcagtccaggctttcgtggacggaagcgcgattcaggtcttgaaagaatggaatatgacgggaaagaaaaagaacaacaagcggaaacgttcaaagtccaaacagcatcaaggaaataaggacgcaaaggacaaagtggagagacccgaggcaggccctctgcagccacagcccccacagattcagaacggtcccatgaatggatgtgaaaaagattcctcttctaccgattcagcaaatgagaagcccgcactgatccctagagaaaaaaaaattagtatactggaggaaccctcgaaggctctgaggggcgttactgagggcaatagactgttgcagcagaagctaagtctagacggtaatcccaagcccattcatggtacaaccgagcgttccgatggccttcagtggagcgccgagcagccctgcaatccaagcaaacccaaagccaagacctcacctgtgaagtctaatacaccggcagctcacctcgaaattaagccggacgaattagccaaaaagaggggcccaaacatagaaaaaagtgtgaaagacctccagaggtgtactgtgagcctgacacgttacagagtgatgatcaaagaggaggtcgattctagtgttaagaagatcaaggctgcgttcgccgagcttcacaattgcatcattgacaaggaggtgtctttaatggccgagatggacaaagtcaaagaggaggcaatggaaatactgactgcgaggcaaaagaaagctgaagaactcaagaggctaaccgacttagccagccagatggccgagatgcagctggctgagttgagggccgaaatcaagcattttgtgtcagagcgaaagtacgacgaagagctcggcaaggccgctaggttttcctgcgatatcgaacagctcaaagcacagataatgctgtgtggtgagatcacgcaccccaaaaataactacagctcccggaccccttgtagctctctgctccctttgctcaacgcccacgcagcaactagtggaaagcaatccaacttttctagaaagagctccacccacaacaaaccatccgagggtaaagccgcaaaccccaagatggtgtcctccctacccagtacagctgacccgtcccatcagactatgcctgccaataaacagaatggatcctccaaccaacgcagacgcttcaacccacagtaccacaataaccggctgaatgggcctgccaaatcacaggggagcggaaatgaagccgagcctctgggcaaaggaaacagtaggcacgaacaccgaaggcagcctcataacggctttaggccaaaaaacaaagggggtgcaaagaaccaggaagctagccttggcatgaaaaccccggaggcccctgcccactccgagaagccacggcgacggcagcacgccgcagatacctcagaggctagacctttcagaggatccgtgggaagggtctcacagtgtaatctttgccccacgagaatagaggttagcacggatgcagccgtactgagtgtccccgcagtaactttagttgcctag

SEQ ID NO: 242233 - DNA, 465 bp, synthetic construct
  misc_feature 1..465: note = Description of Artificial Sequence: Synthetic coding sequence
  source 1..465: mol_type = other DNA
atggccgagctgaatactcacgttaatgtgaaggagaaaatttacgctgttaggtccgtcgtgcccaataagtccaataatgagatcgttctcgtgcttcaacaattcgacttcaacgtagacaaagccgtccaggcgtttgtggatgggtctgctattcaagtcctcaaggaatggaacatgacaggtaagaagaagaataacaagaggaaaagatctaagagtaagcagcaccagggaaacaaggatgccaaagataaagtggaacgtcccgaggccggaccgctgcaaccgcagccccctcagatccagaatggaccgatgaatgggtgtgagaaggattcgtcgtcaactgattcggcgaatgaaaagcccgctctcatacctagagaaaaaaagattagtatccttgaagaaccctctaaggccctcagaggtgtgactgaggggaaccggctgttgtag

SEQ ID NO: 242234 - DNA, 423 bp, synthetic construct
  misc_feature 1..423: note = Description of Artificial Sequence: Synthetic coding sequence
  source 1..423: mol_type = other DNA
atggcagagttgaatacgcatgtcaacgttaaagaaaaaatctacgctgttcgctccgtggtaccaaacaagagcaataacgaaatagtccttgtgctccagcagttcgattttaacgtggataaagctgtgcaggcatttgtggacggatccgcaatccaagttcttaaggagtggaacatgacgggcaaaaagaaaaacaacaagcgtaaacgaagtaaaagtaaacagcatcagggcaataaggacgcgaaggacaaagtcgaaagaccggaggctggaccccttcagcctcagccaccccaaatccagaatggaccaatgaatggctgcgaaaaggacagctcaagtaccgactccgcgaacgagaaaccggctctgatcccaagagagaaaaagatttcaattctggaggagccgtag

SEQ ID NO: 242235 - DNA, 42 bp, synthetic construct
  misc_feature 1..42: note = Description of Artificial Sequence: Synthetic coding sequence
  source 1..42: mol_type = other DNA
atggcggagctcaatacccatgtgaatgttaaagagaaatag

SEQ ID NO: 242236 - DNA, 285 bp, synthetic construct
  misc_feature 1..285: note = Description of Artificial Sequence: Synthetic coding sequence
  source 1..285: mol_type = other DNA
atggctgagctaaacacacatgtgaacgtgaaagaaaagatctacgccgtcagaagtgtcgtcccaaataagtccaataacgaaatcgtgctcgtgctgcaacagtttgatttcaatgtggacaaggcagtacaagccttcgtagatggcagtgctatccaggtcctgaaagaatggaatatgaccggcaaaaaaaaaaataacaagaggaagaggagcaagagtaaacaacaccagggaaacaaggatgcaaaggataaagttgagcgcccagaagccggttag

SEQ ID NO: 242237 - DNA, 348 bp, synthetic construct
  misc_feature 1..348: note = Description of Artificial Sequence: Synthetic coding sequence
  source 1..348: mol_type = other DNA
atggccgaactgaacacacacgtgaacgtcaaggaaaaaatttacgcagtgcggtcagtcgtccctaataagagcaacaatgaaattgtgttggtgttacagcagtttgacttcaacgtggataaggccgtacaggctttcgtggatggatccgccatccaggtattgaaggagtggaacatgactggcaaaaagaaaaacaataaacgtaagcgcagcaagagcaaacagcaccagggtaataaggatgctaaggataaggtggaacgaccggaagcaggcccacttcaacctcagcctccacagatccagaatgggcctatgaacgggtgtgaaaaggattcctag

SEQ ID NO: 242238 - DNA, 72 bp, synthetic construct
  misc_feature 1..72: note = Description of Artificial Sequence: Synthetic coding sequence
  source 1..72: mol_type = other DNA
atggcagagcttaacacccacgtgaatgttaaggagaagatctatgcagtcaggtctgtagtgcccaattag

SEQ ID NO: 242239 - DNA, 522 bp, synthetic construct
  misc_feature 1..522: note = Description of Artificial Sequence: Synthetic coding sequence
  source 1..522: mol_type = other DNA
atggccgagctaaacacccatgtgaacgtcaaggaaaaaatctacgccgtgcggtctgtcgtgcccaacaagtccaataatgagatagtgcttgttctccagcaatttgactttaatgtggataaggccgtgcaggccttcgtagacggctcagctatacaagtactgaaagagtggaacatgacaggaaagaaaaaaaataacaagcggaaaagaagcaaaagcaaacaacatcaaggcaacaaggatgctaaagataaagtcgaacgtccggaggcagggccactgcagccacagccaccacagatccaaaacggccctatgaatggatgtgaaaaggattcttcgagcaccgactccgctaatgaaaaaccggctctgatcccgagagagaaaaagatctcaattctggaggagccctcgaaagcccttaggggggtcacggggcctaacatcgagaaatccgtcaaggacctccaacgctgcaccgtgtccctaactcgctatcgcgtgatgatttag

SEQ ID NO: 242240 - DNA, 1677 bp, synthetic construct
  misc_feature 1..1677: note = Description of Artificial Sequence: Synthetic coding sequence
  source 1..1677: mol_type = other DNA
atggcagaactgaacacgcacgttaatgtaaaagaaaagatctacgccgtccgttcagtggtgccgaataagtccaacaacgaaattgttttggttttgcaacagtttgactttaacgtggacaaagccgtccaggccttcgtagatgggtcagcaatccaggtcttgaaggaatggaatatgacagggaaaaagaaaaataacaagcgaaagaggtctaagtccaagcagcaccagggcaataaggacgcaaaggacaaggtggaacgcccagaggcgggtcccctccaaccacaaccaccgcaaatccagaatggccctatgaacggatgtgagaaagacagttcttcaactgacagcgccaacgagaaaccagccctgatcccccgagagaaaaaaattagcatcctcgaagagccctcaaaggccctccgtggggtcacggaaggaaatcgactgctgcaacaaaaactatccctggatggcaacccgaaaccaatccacgggactaccgaacgctccgatgggctgcagtggtccgcagagcagccgtgtaatccaagcaagccaaaggccaagacttcacccgttaaatccaacacacctgcagcacacctggaaattaagcccgacgaactggcgaaaaaaagaggacccaatatcgagaagtcagtgaaggacctccagaggtgtacagtgagtctgaccaggtatagggttatgattaaagaagaagtggattcttctgtaaagaagatcaaggcggctttcgcagagctgcataattgcatcattgacaaagaagtgtctctcatggcggagatggacaaagtgaaagaggaggctatggagattctaacagccaggcagaagaaagccgaggagctgaagaggcttaccgacctagcctctcagatggccgaaatgcagctggcagaactacgggctgagattaagcacttcgtgtcggaacgcaaatatgatgaagaactgggcaaagcggctcgctttagctgcgatatcgagcagctgaaggctcagatcatgctatgcggtgaaataacacatccaaagaacaactactcttcaaggaccccttgctccagcttgttgccactcctcaacgcccacgctgcgacctcagggaaacagtccaattttagcagaaaatccagcactcacaacaagcctagcgaaggaaaggctgccaatcccaaaatggttagctctcttccaagtaccgccgacccttcccaccagaccatgccggctaacaagcaaaacggctctagtaatcagcgtcggcgattcaacccccagtaccataacaacagactaaacggcccagccaagagccagggctcgggaaacgaggccgaacctctgggaaagggaaactcccgacatgaacaccggaggcagccgcataacggatttcggcctaaaaacaaggggggagcgaaaaaccaggaggcgtctctgggcatgaaaacgcctgaggcacccgctcatagtgagaaacctcgcagaagacagcatgctgctgacaccagtgaggccagacccttcaggggtagcgtaggtagggtctcacagtgtaatctgtgcccgacacgtattgaagtgagcacagacgccgctgttcttagcgtgcccgctgttacgcttgtcgcctag

SEQ ID NO: 242241 - DNA, 567 bp, synthetic construct
  misc_feature 1..567: note = Description of Artificial Sequence: Synthetic coding sequence
  source 1..567: mol_type = other DNA
atggctgagctgaatacccacgtcaatgtgaaggaaaaaatttatgccgtgaggtccgtcgtaccgaataaatctaataacgaaattgtgctagtgctgcagcagttcgacttcaatgtggacaaagccgttcaggcatttgtcgacggatccgccatccaagtcctgaaggaatggaatatgaccggaaaaaagaaaaataataagcgcaaaaggtctaagtcaaaacagcaccagggcaacaaggacgcaaaagacaaggttgagagacccgaagccggaccactgcagccgcagcccccacagattcagaacggacccatgaatggctgtgaaaaggattcctcctctacagactctgctaacgaaaagcccgcactgatcccacgggaaaaaaagattagtatcctcgaagagccttctaaggccctgcggggagttaccgagggaaatcggctgttgcagcaaaaactcagcctcgatgggaacccaaagcctatccacggaaccacagagaggtctgatggattacagtggagcgcagagcagccttgcaacccaagttag

SEQ ID NO: 242242 - DNA, 909 bp, synthetic construct
  misc_feature 1..909: note = Description of Artificial Sequence: Synthetic coding sequence
  source 1..909: mol_type = other DNA
atggaacctggcccagacggtccagccgcttccggacccgctgccattcgggaaggctggtttcgcgaaacctgcagtttgtggcccggtcaggcattgtctcttcaggtggaacaactcctccatcatcgtcgctcccgctaccaggatatcctagtcttcagatccaaaacgtacgggaatgtgctggtcctggacggggttatccagtgtaccgaacgggacgaattcagttatcaggaaatgatcgctaacctgcccctatgctcacaccctaatccgcgaaaagtccttataataggtggcggagacggtggcgtgctccgggaagtcgtgaagcaccctagtgtggaatctgttgtgcagtgcgagattgatgaggacgtcattcaagtttcaaaaaagttcttacccggaatggccatcgggtacagctcctcgaaactgaccctgcacgtgggcgacggctttgaatttatgaagcagaatcaagacgcctttgacgtgatcatcaccgattcctctgatcctatgggtccggctgagagcctgtttaaagagagttactaccaactgatgaagaccgcattgaaggaggacggcgtgctgtgctgccaaggtgagtgccagtggcttcatctagaccttattaaagagatgcgccagttttgtcagtccctgtttccggtcgtagcttatgcgtattgcaccatccccacttacccaagtggccagattggatttatgctctgtagcaagaaccctagcactaactttcaggagcctgtgcaacctcttacacagcagcaggtggcccagatgcagctgaagtactataatagtgatgttcaccgggcagctttcgtgctcccagagttcgctagaaaggcgctgaacgatgtgtcttag

SEQ ID NO: 242243 - DNA, 600 bp, synthetic construct
  misc_feature 1..600: note = Description of Artificial Sequence: Synthetic coding sequence
  source 1..600: mol_type = other DNA
gaggagcctccaccacccaccgtgcaagtgcaggggcctgggcctcagcgtgaagaaaagcagaagacaaaaatggccaaatttgtgattaggcccgcaactgccgcagactgcagcgacatcctgcggctgataaaagagcttgctaaatacgaatatatggaagagcaggttatcctgacagagaaagatctgctggaggacggatttggcgagcacccattctatcattgtctagtagcagaagtcccaaaggaacactggacacccgagggaaatccctctcccttcccggaagctagagagaccaaatgttactactttacatatgatccgtggattgggaaactgctctatttagaggatttttttgtcatgagcgactaccggggtctgtggcacagaatccgaaacagcgaagagtctaaaccgggatgcaatgaggtttctctggccgcatgcaccagctgggccgagtggaatgagccctccatcaatttctacaagaggaggggagcatctgatctttcctcggaggagggctggcggctgttcaaaatcgacaaagaatacctcctgaaaatggccaccgaagagtag

SEQ ID NO: 242244 - DNA, 453 bp, synthetic construct
  misc_feature 1..453: note = Description of Artificial Sequence: Synthetic coding sequence
  source 1..453: mol_type = other DNA
atggccaaattcgtcatccgacctgccacggccgcagattgctcagacatcctgcggctcatcaaagagctggctaaatacgagtatatggaagagcaagtaatattgactgagaaaggcaacagtacagtcgcaggccgtggcacctctgttcgctgcctgtcaccttctcctaggcctttgccacctctgttgcccctgctggctgacctcctggaagatggtttcggagagcacccattctatcactgtctggtggctgaagtgcccaaggagcattggactcccgaaggaaacccctcacccttcccagaggcacgcgagaccaaatgttacgtgcgtagttccgtgggttgcgtggagccgctgacaactcaggctgaggtgaccgagaatctggaccggaagaacagccagcaggtgttcaagctgctccggaagaagaagaactag

SEQ ID NO: 242245 - DNA, 363 bp, synthetic construct
  misc_feature 1..363: note = Description of Artificial Sequence: Synthetic coding sequence
  source 1..363: mol_type = other DNA
atggctaaatttgtcataaggcctgcaactgcagcagactgttcagacatactgcggctgatcaaggagctagccaagtatgaatacatggaagagcaagtcatcctcacagaaaaggaccttttggaggatggcttcggcgaacacccattttatcactgtttggtggccgaagtgcccaaggagcactggaccccagagggaaacccttcaccgtttccagaggctagggagaccaaatgttatgtgcggagtagcgttggctgcgttgagcccctcacgacccaggccgaggtgaccgagaacctcgaccgtaagaattcccagcaagtgtttaaactcttgaggaagaaaaaaaactag

SEQ ID NO: 242246 - DNA, 432 bp, synthetic construct
  misc_feature 1..432: note = Description of Artificial Sequence: Synthetic coding sequence
  source 1..432: mol_type = other DNA
atggccaaatttgtaatcagaccagctacagctgccgattgctcggacatcctgaggctgatcaaagagttggcaaaatacgagtatatggaagagcaggtcatccttaccgagaaagggcatagtattgtcggcttcgccatgtattactttacatatgacccgtggattggcaaactcctatacctcgaggatttcttcgtgatgagcgattatcgcggattcgggattgggtccgagatcttaaaaaatctatctcaggtggcaatgcgttgcagatgttcaagcatgcactttctagtcgcagaatggaacgaaccctctataaatttttataaacggagaggagccagcgatttgtcttcagaagaagggtggagattgttcaagatcgataaagagtatctgctcaagatggcaaccgaagaatag

SEQ ID NO: 242247 - DNA, 516 bp, synthetic construct
  misc_feature 1..516: note = Description of Artificial Sequence: Synthetic coding sequence
  source 1..516: mol_type = other DNA
atggctaaattcgtgataaggccagccactgccgctgattgctccgacattcttaggctgatcaaagagctcgccaagtatgagtacatggaagaacaggtcattcttacagaaaaggatctgctcgaagatggtttcggcgagcaccccttctatcattgcctggtggccgaagtgcctaaggagcattggactcccgaagggcacagcatcgtgggatttgccatgtattactttacctacgacccttggatcggaaaattgttgtacctagaggattttttcgtgatgtccgactatagggggttcgggatcgggtccgaaatcttaaagaacctgtcccaggtggccatgagatgccgctgctctagcatgcatttcctagtggccgagtggaacgaaccttcgattaatttctacaagagaagaggggcttccgatctctccagtgaggaagggtggcggctatttaaaatcgacaaggagtatctgcttaaaatggcaacggaggaatag

SEQ ID NO: 242248 - DNA, 513 bp, synthetic construct
  misc_feature 1..513: note = Description of Artificial Sequence: Synthetic coding sequence
  source 1..513: mol_type = other DNA
atggctagtgtgcgcataagggaggccaaggaaggtgattgtggcgatatcctcagactcataagggagttagccgaatttgagaagttgtccgaccaggtcaagattagcgaagaagctctgagagccgacggcttcggggacaatcctttctaccattgtctggttgcggagatactgcccgctcccggaaagttgcttggtccatgtgtggtgggatacggcatctactatttcatttacagtacatggaaaggaagaacgatatacctcgaggatatatacgtgatgcccgagtatcgcggacagggcattggatcgaaaatcattaaaaaagtagctgaggtggccctagacaagggttgttcccagtttagactggcagttctcgattggaaccaaagagctatggacctgtacaaggcgttgggagctcaggacctcactgaggccgaagggtggcacttcttctgcttccagggggaagcgacacgaaagctggctgggaagtag

SEQ ID NO: 242249 - DNA, 750 bp, synthetic construct
  misc_feature 1..750: note = Description of Artificial Sequence: Synthetic coding sequence
  source 1..750: mol_type = other DNA
atgccagggcagaggatcgcatcactggcatattctttactgccctatggcgctggaatacccgctccactcacacggccaagattgccacggaggccgcctcggctaccgccaccacgtagccttcggctgttccgcattcaagtacgccgtcccttcaagggttcttcctgtcggctccggggacccggaacactggtacctgatagcggggatccggacggcttccgggctgatcctaggggacagggcggacggctgtggaggtaccccgaagctgattctggcgaggattgtcggcctgagctggccgagttcgagaagctaagcgaccaggtaaagatttccgaggaagccctgagggctgacgggttcggtgataatcccttttaccactgcctagttgccgagattctgcctgctccgggaaaactgctcggcccttgtgtggtaggctacgggatttattactttatttattcaacctggaaaggtagaacaatctacctggaggatatctacgtaatgcccgagtatagaggacagggaattgggtccaagattataaaaaaggtggctgaggtggccctggacaagggatgctcccagttccggctagcagtccttgactggaaccagagagcaatggatctgtacaaagcattaggcgctcaagacttgaccgaagcagaggggtggcacttcttttgctttcagggagaggccacgagaaaactcgcaggtaaatag

SEQ ID NO: 242250 - DNA, 942 bp, synthetic construct
  misc_feature 1..942: note = Description of Artificial Sequence: Synthetic coding sequence
  source 1..942: mol_type = other DNA
atggctgctgcccgacactccactctggacttcatgctgggggcaaaggcagatggcgaaactatactcaagggactacagagtatttttcaagagcagggtatggccgagtcagttcacacttggcaggaccacgggtacctagctacgtacaccaacaaaaacggacggctgccccctattgtgagagggggagcgattgaccgttattggcctacagccgacgggagacttgttgagtatgacattgacgaggtcgtgtacgatgaggatagcccataccagaacattaagattttgcacagcaaacagtttggcaacatcctaatactgtcaggcgacgtcaacctcgccgaaagcgacctggcttatactagagcaattatggggtcaggaaaggaggattacacgggaaaagatgtcctcatcttaggagggggagacggaggcatcttgtgtgagatcgtcaagctgaagccaaagatggtcaccatggtggaaattgaccagatggtgatcgacggctgcaagaaatacatgagaaaaacgtgtggcgacgtgctggacaatctgaagggagattgttaccaggtgcttatagaggactgtatccccgttttgaagcgctatgccaaagagggcagggaatttgattacgttatcaacgacctaaccgccgtgcccattagcactagccccgaggaggatagcacttgggagttccttagactgattctggacctatcaatgaaagtcctaaaacaggacggcaagtattttacccaggggaactgcgtaaatctgaccgaagcgctgtcattgtatgaagagcagctggggaggctgtattgtcccgttgagttcagtaaggaaatcgtgtgtgttccctcctatttggagctttgggtcttttacaccgtttggaagaaagctaagccctag

SEQ ID NO: 242251 - DNA, 1101 bp, synthetic construct
  misc_feature 1..1101: note = Description of Artificial Sequence: Synthetic coding sequence
  source 1..1101: mol_type = other DNA
atggctgccgcaaggcactcaacgctggacttcatgctgggggcaaaagccgatggcgaaacgatattgaagggactccagtcaatctttcaggaacaaggaatggctgagtccgtgcatacttggcaggatcacggctacctggccacgtataccaataagaatggctctttcgccaacttgaggatttacccccacggcttggttttgttagacctccagtcctacgatggcgacgcccagggtaaggaagagattgacagcatcctgaataaggtcgaagaaaggatgaaggagctgagccaggactctaccggtagggtcaaaaggttgccacccattgtgcgcggaggagcaattgatcgatattggccgactgctgacggacgtcttgttgagtatgacattgatgaggtagtctacgatgaagactctccatatcagaatatcaagatccttcactcaaaacagtttggaaatatcttgatactgagtggagatgtcaatctggccgaatcagacttagcgtacaccagggccattatgggcagcggaaaagaggattacactggtaaggacgtgctgattctggggggaggagacggtggtatactatgcgagatcgtcaaactgaaacctaagatggtgaccatggtggagatcgaccagatggtgatcgacggatgcaagaaatacatgcgaaagacctgcggggatgtactcgataatctgaaaggagactgctaccaggttctaatcgaagactgcatccccgtgcttaaaaggtatgccaaggaaggtcgggagtttgactatgtgattaatgatctcaccgccgtgccaatctccaccagccccgaggaggactcgacttgggaatttctccgactgatcctggacctctccatgaaggtgcttaagcaggatggaaagtacttcactcagggtaactgtgttaacttaaccgaagctctgtcactgtatgaggagcagcttggtagactgtattgtcctgtggagttctcgaaggagattgtgtgcgtgcccagctacttggagctgtgggtgttctacacagtgtggaagaaagctaaaccatag

SEQ ID NO: 242252 - DNA, 828 bp, synthetic construct
  misc_feature 1..828: note = Description of Artificial Sequence: Synthetic coding sequence
  source 1..828: mol_type = other DNA
atgaaagagctgagtcaggacagcactggcagagtcaaacgactgcctcctatcgtaaggggaggcgctatcgatcgttactggcccacagctgacggcaggttggtggaatatgacatcgacgaagtggtttatgatgaggactccccgtatcaaaacatcaaaattcttcacagtaagcaattcggaaatattctgattctgtccggggacgtgaacttggccgagtccgacctggcttacacgcgagcaatcatggggagcggcaaggaggactatacaggcaaggacgtgcttatcctaggaggaggcgacggtggaattctgtgcgagatcgtgaagcttaagcccaagatggtgacaatggtggagatcgatcagatggtgatcgatggctgtaagaagtacatgagaaagacctgtggagatgttctcgacaacctgaaaggcgactgttaccaggtgttgatagaagactgcatcccagtcctgaagcgttatgccaaggaaggccgtgaatttgattacgtcatcaacgaccttaccgccgtgccaatttcaacatcaccagaagaggactccacctgggaattcctccggttgattctggacctgtcaatgaaggttctgaagcaggacgggaagtacttcacacaggggaactgtgtcaacctgactgaggcgctttctttgtacgaggagcaactaggacggctctattgtccagtggaattcagcaaagagatagtatgtgttccctcttacctagaacttttcctcttgcagttctggcgcgttaggtcatcaaagtgcgcgttggagggttag

SEQ ID NO: 242253 - DNA, 936 bp, synthetic construct
  misc_feature 1..936: note = Description of Artificial Sequence: Synthetic coding sequence
  source 1..936: mol_type = other DNA
taaggtggcagggccgaagccgcactgcttctggcccctcgaagtgtacccgcagccgctagaggcctgcaggggcagtcacgggtgccggctggaagggccgctctgccaggacccggaagaccacccgcattaccacggggattagccgcattcgctcttccactcggagagagccccggttgcagagccagggccgaccctccatgggacgaagggtgtagagactgtggaggtgcccgacgagatccgaggggagagccaggcctcggtgcgtgtgccgaaagaggatgtccacgggacctgttcctgtttctgcaagccgctgacggggaaaccattctgaaaggcttgcagagcatattccaggaacaaggcatggccgaatccgtgcacacctggcaggatcacggatacctggccacctacaccaacaagaacgggtctttcgccaacttaaggatctatccccatggtttggtgttgctggacctgcagtcctatgatggggacgcccagggaaaggaggagatcgactctattctgaacaaggtagaggagagaatgaaagaactgtcacaggactcaaccggtcgagtgaagaggctacccccaatagtgcgaggcggtgccatcgaccgttactggcctactgcggatggacgactggttgagtacgacattgatgaggtggtctacgacgaggattccccatatcagaatatcaaaatccttcactctaagcagttcgggaacattttgattctgagcggcgatgtcaatctcgcggaatccgacctcgcgtatactcgcgcaataatgggcagtgggaaggaggattacactgggaaagatgtgctgatccttggtgggggtgacggcggtatcttgtgcgagattgttaaactaaagcccaaaatggtgacgatggtttag

SEQ ID NO: 242254 - DNA, 3801 bp, synthetic construct
  misc_feature 1..3801: note = Description of Artificial Sequence: Synthetic coding sequence
  source 1..3801: mol_type = other DNA
agggaagccacgccacctttgagagggttaccggctcctcctagacacgccccttttcccgctggtagattcgagccccctcgaacaaaacagggcggacggggatcacatactccttgggtgtacgtcatcaatgacctaggtatagaggaaaacctcaaaaatgacggaaaacctaaatgtcagactggcggaaaatccaagaggaccatccaaggaacacataagacaaccaagcagcaatcaaccgcggtggactgtaagataacctccagcactacgggcgacaagcactttgacaagagccctaccaagacccgccatccacggaaaatcgatctgcgggcacgatattgggcctttctgtttgataatctgcgcagggcggtggatgaaatctacgtcacttgtgagagtgaccagagcgtcgtcgaatgtaaggaggtactgatgatgctggataattacgtccgcgattttaaagcactgatagactggatacagctgcaggagaagctggaaaagaccgatgctcaatcccggcctactagcctcgcgtgggaagtgaagaagatgtctccagggaggcatgttataccaagtccttcgacggaccgaattaatgtcaccagtaacgctcgccgatctctgaattttggtggtagtactggcaccgttcccgctccacggctggccccaacaggagtttcttgggctgacaaggtgaaagctcaccatacaggctctactgcctcctccgagataactcctgcacaatcctgtcctcctatgaccgtgcaaaaggccagccgcaagaacgagcgaaaagacgccgaaggatgggagacagtgcaaaggggcagacctatcagatcacggtctacagctgtgatgcccaaggtatctttagcaactgaggcaacccggtccaaggacgattcagataaggaaaatgtatgcctgctgcccgacgagagcatacagaagggtcagtttgtgggagacggcactagcaacactattgaaagtcatcctaaggattctctacattcctgtgaccaccccctggccgagaaaacccagtttacagtgtctaccctggatgatgtgaagaactcaggatcgattcgggataattatgtgcgaacatcagagatatcggctgtgcatattgacactgagtgcgtgtctgttatgcttcaggcaggaactcctcccttacaggttaacgaggagaaatttccggcagagaaagcgagaatcgagaacgagatggatccctccgacatatcgaatgtgtccgccgcaaacctgagcatggcagaggttttggcaaaaaaagaggagctggcagacaggctggaaaaggctaacgaggaagccatagcatccgctatcgctgaagaggaacagctgacgagggagatcgaagccgaagagaacaacgacattaacatagaaaccgacaatgattcagatttctccgcttccatgggatcaggaagcgtcagcttttgtggcatgagtatggactggaatgacgtactggccgactacgaggcaagagagtcctggaggcaaaacacctcttggggcgatatcgttgaagaagagcccgctcgacctcccggtcacggaatacacatgcatgagaagctttcttccccttctcgaaagcgcaccattgccgaatcgaagaaaaagcatgaagagaaacaaatgaaagcacagcagttgagagagaaactcagagaagaaaaaaccctgaaactgcagaagcttctggagagggagaaggacgtccgaaagtggaaggaggagctgctggaccaacggaggcgcatgatggaagagaagttgctccacgccgagtttaagagagaggttcagctgcaggctatcgtgaagaaggcccaggaggaggaggccaaggtcaatgagattgcattcattaacaccctcgaagcacagaataagcgccatgatgtgttaagtaagctcaaggagtacgagcagaggttgaacgaattacaggaagagcgccagcggaggcaggaggaaaaacaggcacgcgacgaagcagtccaagaacgaaaaagagctcttgaggctgaaagacaggccagagtggaagagctgttaatgaagcggaaggagcaggaagctcggatagagcaacagagacaagaaaaggagaaggccagggaggatgcggcacgcgagagggccagggatcgggaagaaaggctggcagcgttaactgccgcacagcaggaagctatggaagagctccagaagaagattcagctcaagcatgacgagtctatccggagacacatggagcagatcgagcagagaaaggaaaaagcagccgagctctcgtccggcaggcatgctaatactgactacgctcctaaactgacaccttacgaacggaagaagcaatgcagcttgtgcaatgttctcatttcctctgaggtgtatctattttcccatgtcaaggggaggaaacaccaacaggcagtgcgggagaacacaagcatccaaggccgtgagctgtccgacgaagaagtcgagcacctcagtttaaaaaagtatattattgatatcgtggtggagagtacagcccctgctgaggccttgaaagacggggaagagagacagaagaacaagaagaaggcgaagaaaataaaagcccgtatgaacttcagggctaaagagtacgagagtctgatggaaactaaaaactcgggcagcgacagcccctacaaggctaaactgcagagactagccaaggatctgttgaaacaggtgcaggtacaagactcgggcagttgggcgaacaataaggtttctgcccttgacaggaccctcggcgagataactaggatcctggagaaagaaaacgtggccgatcaaatcgcctttcaggcagctggagggctgaccgctctggaacatatcctccaggctgtggtaccggcaacaaatgttaacactgtgctcagaatccccccaaaatccttgtgtaacgccatcaatgtctacaaccttacgtgcaacaattgcagcgagaattgcagcgacgtgctgttctcaaataaaatcacctttctgatggacctcctgatccaccagctcactgtctacgtgcctgacgagaataatacgattctgggcagaaacacgaataagcaggtctttgagggccttacaaccggactgttaaaggtgagcgcggtggtgcttggttgcctcatcgccaatagacccgatggcaattgccaacccgcaacgccaaagattcctacgcaagagatgaagaacaaaccgtctcaaggcgacccttttaacaaccgcgtgcaggacctgatctcctacgtcgttaacatgggcttgatcgataaactgtgcgcctgcttcctgagtgtccaggggccagtagatgagaatccgaagatggctatatttcttcagcatgctgctgggttgctccacgccatgtgcacattatgcttcgccgtaacgggcagatcctacagtattttcgacaataacaggcaggatccaaccggtctcaccgccgctcttcaggctacagatttggcaggggttctgcacatgctctactgtgtgctgttccacggtacaatccttgacccatccacagcctcaccaaaagaaaactatacccaaaacaccatacaggttgcaatacagagcctgcgcttttttaactccttcgccgcattacatcttcctgcttttcaggtgcccagtatcggcctgtacagatgttag

SEQ ID NO: 242255 - DNA, 4203 bp, synthetic construct
  misc_feature 1..4203: note = Description of Artificial Sequence: Synthetic coding sequence
  source 1..4203: mol_type = other DNA
atgatggccagctttcagcggtccaacagccatgacaaggtccgtaggattgttgccgaggagggacgcactgcgaggaacctaattgcatggtcagtacccctggagagtaaggatgatgacggaaaacctaagtgccagacaggtgggaagtcaaagaggaccattcaaggaacccacaagaccactaagcaatcaactgccgtggattgcaaaatcacctcctccaccaccggcgacaaacacttcgacaagagtccaacaaaaacccgccatcctagaaaaatcgatctccgcgctcggtactgggcgtttctttttgataacctgcgcagggcggttgatgagatctatgtgacgtgcgagtcagaccaatccgtcgtggagtgcaaggaagttctgatgatgctcgacaattatgttagggactttaaggctctgatcgactggatacagctgcaggagaaacttgagaagacagacgcccaatctcggccaacttcgcttgcctgggaggtgaagaagatgtctcctggacgccacgttatcccgtctccttcaacggatcgcatcaatgtaacctccaacgcacgcaggtccctgaatttcgggggtagcactggcaccgtgcccgctcccaggctcgccccaactggggtgagctgggctgacaaggtcaaggcacaccacacgggcagcacagcgtcctccgaaatcactccggcacagtcttgtccaccaatgactgttcaaaaggcctcccggaaaaacgagcggaaagacgccgaggggtgggagactgtgcaacggggaagacctatcaggtccagatctaccgcagtgatgcccaaagtgagcctggcaaccgaggcaacacgatctaaggacgattcagacaaggaaaacgtctgtctgctgcctgacgaatccatccagaaaggtcaatttgtaggggacggtacaagtaatactatcgagtcccacccaaaggactccctacacagctgcgaccaccccctcgctgagaaaactcagtttactgtgagcactctggatgacgtcaaaaatagcggttccattagagataattacgtgaggacaagcgagattagcgccgtccacatcgacaccgagtgtgtgtcagtcatgcttcaggcagggaccccccctctgcaggtgaatgaagaaaagttcccagcagagaaggcaaggatcgagaatgagatggacccttctgacatctcgaactcaatggcagaggtcctcgccaaaaaagaagaattggccgataggttagaaaaggcaaatgaagaggccatcgcttcggccatcgccgaggaagaacagcttacccgcgagattgaggcagaggagaacaacgacatcaatattgagactgacaacgattccgacttctctgctagcatgggttccggctccgtttccttttgtggcatgagtatggactggaatgatgtgcttgcagattacgaagcaagggagtcatggaggcagaatacttcctggggtgacatcgtcgaagaagagcccgcacggcctcccggacacggcatccacatgcatgagaagctgtcctcaccttctaggaagcgtactattgcagagtccaagaagaaacatgaagaaaagcagatgaaagcccaacagctacgcgagaaacttagagaagaaaaaacattaaaacttcagaagctacttgagcgggagaaggacgtgcgaaaatggaaggaagaactgctggatcagcgccgtcggatgatggaagagaaactgctacatgcggaatttaaaagagaagtacagttgcaggcaattgtcaagaaggcccaggaggaggaagccaaggtgaacgagatagcttttattaatacactcgaagctcagaataaaaggcacgacgtgctgtcaaagctaaaagaatatgaacagcgtctgaacgaattgcaggaagagcggcagaggcgacaggaagagaagcaggcccgtgacgaggccgtccaagagcgcaagagggctctggaggcagaaaggcaagcgagagtggaagagttgctgatgaagagaaaggagcaagaggcacggattgaacagcagcgccaggagaaggagaaggccagggaggacgctgccagagaacgggctcgcgacagggaagagaggctcgccgctctgacagcagcacagcaggaggccatggaggaactgcagaagaagatccagctgaaacacgacgaaagcatacggagacatatggagcagatagagcagaggaaggagaaggccgcagagctgagtagcggaagacacgcaaatacagattatgcgcctaaattgactccttacgagcgtaagaagcagtgttccctctgcaatgtattgatctcctccgaggtatatctgttctcccacgtgaagggaagaaaacaccagcaggcggttagagaaaacacgagcattcagggacgagagttgtcggacgaggaggtggagcacttgagcctgaagaagtacataatcgatatcgttgttgagtccaccgcacccgcagaggcgttaaaagatggggaggagcggcagaaaaataaaaaaaaggctaaaaagattaaggctcggatgaacttccgagctaaggagtacgaaagcctgatggaaaccaaaaatagcggctctgatagcccatataaggccaagcttcaaaggctggccaaggacttgcttaagcaggtgcaggtccaggatagcggcagttgggctaataacaaggtgtccgcattggatcgcaccctgggagagatcacacgcatcctggagaaggagaacgtggctgatcaaatcgcttttcaggcagctggcggtttgactgctctggagcacatccttcaagcagtggtccccgctaccaacgtcaatacagttcttagaattccacctaagagcttatgtaatgccatcaacgtgtacaatctgacatgtaacaattgctcagaaaactgctctgacgtgctgtttagcaacaagatcacttttcttatggacctgttgattcatcaactgactgtttacgtgccagatgaaaataatactattctggggagaaataccaataaacaggtgttcgagggtctgaccacagggctgctcaaagtctctgccgttgtgcttggctgcctgatcgctaaccggccagacggaaattgccagccagccacccccaagatcccaacccaagagatgaaaaacaagcccagtcagggtgaccctttcaataacagggtgcaggatcttattagctacgtggtgaatatgggactgattgacaaactgtgcgcctgcttcctgtcagtccagggaccggtggatgaaaaccccaagatggccatctttctccagcacgcagccggtctactgcatgccatgtgcaccctttgtttcgcagtgacgggaaggagttactctattttcgacaataaccggcaagatcctaccggtctcactgccgcactacaagccacagatctggcaggcgtcctgcatatgctgtattgcgtgctgttccacggaaccatcctggatcctagtaccgcctcccctaaggaaaactatacacagaatacaattcaggttgctatccagtctctgcggtttttcaactcgttcgctgccctccatctgccagctttccaaagcatcgtcggggctgagggactttccttggctttcagacacatggcgagctcattactgggacactgctcccaggtgagctgcgagtctctgttacatgaggtgattgtctgtgttggatacttcaccgttaatcacccagacaaccaggttatcgttcagtccggtaggcaccctactgtgctgcagaagctatgccagctgccatttcagtatttcagcgatcctcgtctcattaaggttctgttcccgtcacttatcgccgcttgctataacaatcatcaaaacaagattattctcgaacaggaaatgagctgtgtgctgttggcgaccttcatccaggacctagcacagacccctgggcaggctgaaaatcagccttaccagcctaagggtaagtgccttggtagccaggattacttggagctggcaaaccggtttccccaacaggcctgggaagaggcacggcagttcttccttaagaaggagaagaagtag

SEQ ID NO: 242256 - DNA, 3465 bp, synthetic construct
  misc_feature 1..3465: note = Description of Artificial Sequence: Synthetic coding sequence
  source 1..3465: mol_type = other DNA
atgaaaacaaagtatattttttgcaatatcaccgagagaaaagacgccgagggatgggaaacagtccaacggggtagacccatccgcagccgctcaacagccgttatgcctaaagtctcccttgccaccgaggcaacacgcagcaaggacgactcagacaaagaaaacgtgtgcttgttgcccgatgagagcatacagaagggacaatttgtcggggatggcacctctaataccattgaatcccatcccaaagatagcttgcactcttgcgatcatccacttgcagagaaaactcagtttaccgtgagcacgttggacgatgtgaagaactccggaagcattcgcgacaattacgttcgcacctctgaaatcagcgcagtccacatcgacaccgagtgcgtatctgtcatgctgcaggctggaacccctcccttgcaggttaacgaggagaaatttccagcagagaaagccaggatcgaaaacgagatggatccttccgacatcagcaatagcatggccgaggttctggccaaaaaggaagagctggcagatagactggagaaggctaacgaggaggccattgcgtcagccattgcagaggaggaacagttaacacgggagatcgaagcagaggaaaacaatgacattaatatcgaaacagataacgacagcgacttttccgccagcatgggttccgggagcgtgagtttttgtggcatgtccatggactggaacgacgtacttgccgactatgaagcacgggagtcctggaggcagaatacaagctggggggacattgtggaggaggagccagcacggccaccaggccacgggattcatatgcacgaaaagctttcaagcccgagccgcaaaaggacgatagctgaatcaaaaaagaaacacgaagaaaagcagatgaaggctcagcagcttcgagagaagctgagagaagaaaagacgttaaaacttcagaagctgctggagcgcgagaaagacgtgagaaagtggaaggaagagctcctggatcagagacgtaggatgatggaagaaaagttgctgcacgcggagttcaagcgcgaagtacagcttcaggctatcgttaagaaagcccaagaggaggaagccaaagtcaatgaaatcgcctttatcaacacgctagaagcacagaacaagcgacatgacgtactgtcgaaactgaaggagtacgagcagaggctgaacgaacttcaggaggaaaggcaacgaaggcaggaagaaaaacaggccagagacgaggccgtccaggaaagaaagagggccctcgaagcagagaggcaggcccgagttgaggaactcctgatgaagagaaaggaacaggaggcaaggattgagcaacagcgccaggaaaaggagaaggctcgggaagatgctgcaagggagcgagccagagacagggaggagagactggctgcactgactgccgcacagcaggaagcgatggaagaactccaaaagaaaattcagctgaaacacgatgagagtattagaagacatatggagcagattgagcagcgcaaggaaaaagctgcggaactgtcctcaggccgacacgcgaataccgactacgcacccaagttgaccccttacgagcggaagaaacagtgcagcctgtgcaatgtattgatcagcagcgaagtataccttttctctcatgtcaaaggccgaaaacaccagcaagcggtacgggagaacaccagtattcaagggagggagctgagcgacgaggaggtggaacatctttctctgaagaagtacatcatcgacatcgtagtggagagcacagcacccgcagaagctctgaaagacggtgaggagcgccaaaagaacaaaaaaaaagccaaaaagataaaagctcgtatgaactttcgagctaaggagtatgagtccctgatggaaactaagaatagtggttccgacagtccgtacaaagcgaagctgcagcggttggccaaggatctcctcaaacaggtccaggtccaggattcagggtcttgggctaataataaggtgagcgctctggacaggaccttaggcgaaatcacccggattctggagaaagaaaacgtggccgatcagatagcttttcaggccgctggcggactgaccgccctcgagcacatccttcaggccgtggtgcccgcaaccaacgtgaatacagtccttcgaatccctccgaagtccctgtgtaatgctattaatgtgtacaatctgacctgtaataattgtagcgaaaattgttccgacgtgttattttcgaacaagataacctttctcatggacttgctcattcatcagctgactgtttatgttcctgacgagaataatactatactaggcagaaacactaacaaacaagtattcgaaggactgacaacgggactgcttaaagtgagtgcagtggtcctcggatgtttgatagctaaccgccctgacggaaattgccagcccgcaacccccaagatcccaacacaggagatgaaaaacaagccttctcagggagatccctttaataacagagtgcaggatctgataagctacgtggttaacatgggcttgattgataaactgtgtgcatgcttcctctctgtgcaaggccctgtagacgagaaccctaagatggcaatatttctccagcacgccgcaggactcctccatgcaatgtgcacactgtgctttgctgtgactggtcggagctattcaatctttgacaacaaccgccaagaccccacaggtctgactgccgctttgcaggctacagatctggccggtgttctacacatgctctactgtgtgctgttccatgggaccattctagaccctagcactgcctcacctaaggagaattatacccagaatacgatccaggtggccatccagagtctgagattttttaatagtttcgccgcactacacctacccgctttccagtccatcgttggcgctgagggactctccttggccttccggcacatggcctcgtcactgctcggacactgtagccaggtgagctgtgagtctctactgcatgaagttatcgtatgcgtgggttacttcactgtgaaccaccctgacaatcaggtcatcgttcagtccggacggcaccctacagtacttcagaagctttgtcagctcccctttcagtattttagtgatccccgactgatcaaggtgctgtttccttccctgatcgccgcttgctacaacaaccatcaaaacaagatcattttggagcaagagatgtcatgcgtgctgctggcgacctttatccaggacctggcccaaaccccagggcaggcagagaaccagccataccagcccaaggggaagtgtctcggatcccaggactaccttgaattggcaaacagattcccccagcaagcgtgggaagaggcgcgacagttcttcctgaaaaaagaaaaaaagtag

SEQ ID NO: 242257 - DNA, 4203 bp, synthetic construct
  misc_feature 1..4203: note = Description of Artificial Sequence: Synthetic coding sequence
  source 1..4203: mol_type = other DNA
atgatggcaagtttccagcgaagcaattcccacgacaaagtgaggcggatagtggccgaggagggaaggaccgcacgtaatctgattgcatggtcagtgcctctagaatctaaagatgacgatgggaagcccaagtgtcagactggcggtaagtcgaagaggacaattcaaggcacacacaagacaaccaagcagagcactgcggttgattgcaagattacatcctcgacaaccggggataagcatttcgataaatccccaacaaaaacaaggcatccacggaaaatcgacctgcgagcgagatactgggcgttcctgtttgacaaccttagacgggctgtggatgagatatatgtgacttgtgagtccgatcagagtgtcgtagagtgcaaagaagtgttgatgatgctggataactatgtgagggatttcaaagcattaattgattggatccaattacaagaaaagctggagaagaccgacgcacagtccagacccacatctctggcatgggaggttaagaaaatgagccctgggagacatgtgatcccgtcacccagtaccgacaggattaatgtcacatcaaacgccagaaggagcctgaattttggaggaagtacgggcaccgtgccagcgccacggctcgcacctactggcgtcagttgggctgacaaagtaaaggctcaccatacgggcagtaccgccagctccgaaattactcctgcacagtcttgccccccaatgaccgtccaaaaggccagtcgcaagaacgagcgaaaagacgccgaggggtgggagaccgttcagcgtggacgcccaattcggagcaggtcaaccgcagtaatgcctaaggtgtcactggctacagaggcaacccggtccaaagatgattcagataaggagaacgtgtgtcttctccccgacgaaagcatacagaaggggcagttcgtaggagatggcacatccaataccatagagtctcacccaaaagactcactgcacagctgtgatcatcccctggccgaaaagactcagttcaccgttagcactctcgatgatgtgaaaaatagcgggtcaatacgggacaactatgtacggaccagcgaaattagcgcagttcatattgacacagaatgcgtgtccgttatgttgcaagcgggaacacctcccctgcaggtcaatgaggagaagttccctgccgagaaggccaggattgagaacgaaatggatcccagtgatatctccaactcaatggcagaggtcttggcgaaaaaggaggagcttgcagatagattggagaaggccaatgaggaggctatagcatccgctatcgccgaagaggagcagttgactcgcgagatcgaagcagaggagaataatgacattaatatcgaaacagataacgacagtgacttttccgcgagcatgggttctggctcagtgtccttttgcgggatgtcgatggactggaacgacgtcctggcagattacgaagctcgggaatcctggaggcagaacacatcttggggtgatattgtggaagaggaaccagccagaccccctggccatggaatccatatgcatgagaagctgtcctctccatcacggaagagaacaatcgcagaaagtaaaaaaaagcatgaggaaaagcagatgaaggctcagcaactgagagaaaagctcagggaagaaaagacactgaagttacagaaactgctcgagagagaaaaggacgtcagaaagtggaaggaggaacttctggaccagcgcagacgcatgatggaggagaaactcctgcacgctgagtttaagagagaggtccaactgcaggccatcgtgaagaaggcccaggaggaggaggccaaggttaatgaaattgctttcatcaacactttggaggcccagaacaagcgccatgatgtcttgtctaaattgaaggaatacgaacagaggctgaatgaacttcaggaagaacggcagcgaaggcaagaagagaaacaagccagagacgaagccgtccaggagcgtaagcgcgctctagaagccgaaaggcaggctcgcgtggaagaactactcatgaagcggaaggagcaggaagcccgtatcgagcagcagcggcaggagaaggagaaagcgcgagaggacgctgcaagagaacgggctagagatcgggaggagagactggcggctttgacggctgctcagcaggaggccatggaagagctacaaaagaaaatccagctgaagcatgatgaatcgatccggagacacatggaacagatcgagcaaaggaaggagaaagccgctgagctgtcctccggtcggcacgccaatacagattacgcccctaagctaactccatacgagcgaaaaaagcaatgttcactgtgcaatgtgctgatctcgagcgaggtgtacctgtttagtcacgtgaagggtcgcaaacaccagcaagctgttcgcgaaaataccagcatccaaggccgagaattgtctgatgaggaggttgagcatctcagtctcaaaaagtatatcattgatattgtggtggaatccacagccccagccgaagctctgaaggacggtgaagagagacagaaaaacaaaaaaaaagcaaaaaagattaaggcaagaatgaattttcgcgctaaggagtacgaatccctgatggaaacgaagaacagtggaagcgacagtccgtacaaagcaaagctccagaggctggctaaagacctgttgaagcaagttcaggttcaagactccgggtcctgggcgaataataaggtgtctgccctggaccgtactctgggggagattacaaggattctagagaaagagaacgtggccgaccagatagcgttccaagcagcaggcggtctcaccgctcttgagcatattcttcaggcagtagtaccagcgactaatgtgaacacagttctccgaatcccaccgaaatcactatgcaatgccatcaatgtgtacaaccttacctgcaacaattgttccgaaaattgctcggatgtgttgttttccaacaagatcacttttctgatggatctgttgatccaccagctaacagtgtacgtgccggacgagaacaataccatcttgggtcgaaatactaacaaacaggtgttcgagggattgaccacagggttactcaaagtctccgcagttgtcctcggatgcctcatcgcaaatcgtcctgatggcaattgccaaccggctacccccaaaatcccgacacaggagatgaaaaataagccctcccaaggggacccattcaacaatagagtccaggatttaatttcatatgtcgttaacatgggccttatcgacaagctatgtgcttgtttcctaagtgtgcagggaccagtggacgagaatcccaagatggctatcttcctgcagcacgccgcaggcctcctgcacgctatgtgtaccttgtgctttgccgtcacagggcgatcctactcaattttcgacaataatagacaggaccccacaggcctgaccgccgctctgcaggcgaccgatctcgccggtgtcttgcacatgttgtattgtgtgctcttccatggcaccatcctcgacccatcaactgcctcacccaaggaaaactatactcagaacaccatccaagtggcaatccaatcgctccgctttttcaactctttcgcagcgctgcacctgcccgcttttcagtcaatcgtgggcgcagagggtctgagtctggcattcagacacatggcaagctcccttctgggacactgttcccaggtgagttgtgagtctcttctgcatgaggtgattgtctgcgtaggatattttactgtgaaccacccagacaaccaggtcatcgtacagtcaggcaggcatcccactgtattgcagaagctgtgccagctccccttccagtactttagcgatcctcgcctgattaaagtcctgttcccctctctgattgctgcatgttacaacaaccatcaaaataagatcattctggagcaagagatgtcttgtgtccttttggccacgtttatccaagaccttgctcagacccccggtcaggccgaaaatcagccctatcagccaaagggtaagtgcttgggctcccaggactatctggaattagcgaacaggttcccccagcaggcatgggaagaagctaggcagtttttcttgaagaaggagaaaaagtag

SEQ ID NO: 242258 - DNA, 1233 bp, synthetic construct
  misc_feature 1..1233: note = Description of Artificial Sequence: Synthetic coding sequence
  source 1..1233: mol_type = other DNA
atgcaccgaaaacatctgcaggaaattcctgacctgagctccaatgtcgctacctcatttacttgggggtgggactccagcaagacttctgagctcctgtccggcatgggcgtttctgctctcgaaaaggaggagcccgattctgaaaatattcctcaagagctcctgagcaacctcggacatcccgaatcccctcctagaaagcggttgaagtccaagggcagcgataaagattttgtgatcgtacgtcggcctaaactcaacagggagaatttccccggagtgtcttgggactctctccctgacgaattgctgctgggtatctttagctgtctctgtcttcctgagctgctcaaagtgagcggagtgtgtaaacggtggtatagattggccagcgacgaatctctctggcaaacattagacctcaccggaaaaaatctccatccagacgtgacaggccgattgctttctcagggggttatcgccttccggtgtccgagaagtttcatggaccagccgctcgccgaacactttagcccatttagggtgcagcatatggacctcagtaactcagttatcgaggtgagtacgctgcacggaattctctcccagtgctccaaactgcagaatctcagcctggaaggactgagactttcagatcctatcgtcaacaccctggcgaaaaatagtaatctggttcgattgaacctgtccggctgtagcggcttcagcgaatttgccctgcagactctattgagctcctgtagccggctggatgagctcaatctatcgtggtgtttcgatttcaccgaaaaacacgtgcaggtagcggtggcccacgttagcgagactattacccaactgaacctatccgggtaccgtaaaaacttgcagaaatcagatctttccaccctggtgcgacgctgccctaacctggtgcacctggatttatccgatagtgtgatgctcaaaaacgattgtttccaggaattttttcaactcaactacttacaacatttgtctctttcccgctgctacgatattatccctgagacactactgctcgtaacgcgcgctggagtgcgtatcagattagactcggatatcgggtgcccacagacctataggacctccaagctcaaatcttcccacaagttgttctgtcagcatgtgcgggttatttgcatatttgtttgtgatttctatttctaccgtcttgtgcttaaacaatag

SEQ ID NO: 242259 - DNA, 1275 bp, synthetic construct
  misc_feature 1..1275: note = Description of Artificial Sequence: Synthetic coding sequence
  source 1..1275: mol_type = other DNA
atgcatcggaaacacctgcaggaaatcccagatctgtcatctaatgtggctactagtttcacctggggatgggactcatctaagacaagtgaactattatcaggaatgggtgtgtcagcactggagaaagaagaaccagatagcgagaacatcccgcaggaacttttgtctaacctggggcacccagagtcacccccacgaaaacgcctgaagagcaagggctccgacaaggactttgtgatcgttaggaggccgaagctgaatcgggagaacttccctggtgtgagctgggattccctgccggatgagttactgctcggtatctttagttgtctatgtttgccagaactgttgaaggtcagcggtgtgtgcaagcggtggtatcggctcgcttctgacgaatccctctggcagactctggacctgactggtaagaatctccaccccgacgtgacaggacggctcctgtcacagggggtgattgctttccggtgccccagatcctttatggatcaaccattggccgaacactttagcccattccgggtgcagcacatggacctttcaaattccgtgattgaggtctccaccttacacgggattctctcccagtgttccaagttacagaacttgagcctcgaaggacttcgactctcagatcccattgttaatactctagccaagaattcaaatctcgtgaggctcaacctctctgggtgttctggcttcagcgagtttgcactacagactctgctgagctcatgtagcagactggacgaacttaacctctcttggtgcttcgacttcactgagaaacatgtgcaagtggcagtggcccacgtgtcagagaccattacccagctaaacctgagtgggtacagaaagaatctgcaaaaatcagaccttagcacgctggtgcgcagatgtcccaatctggttcatctagatttatctgatagcgtaatgctcaaaaacgattgttttcaggagttttttcaactcaattacctacagcacctgtccctctcacggtgctacgatatcatcccagagaccctcctggagctgggtgaaatcccgactctgaagactctccaggtgtttggcatcgtcccagacggaactctgcagctcctgaaggaggcactgccccatctgcagattaactgttctcacttcacaacgatcgcacggccaacaatcggtaacaagaagaatcaggaaatctggggaatcaaatgcaggctgaccctacaaaaacctagttgcctctag

SEQ ID NO: 242260 - DNA, 1173 bp, synthetic construct
  misc_feature 1..1173: note = Description of Artificial Sequence: Synthetic coding sequence
  source 1..1173: mol_type = other DNA
atgcatcggaagcatttacaagagaaggaagagcccgactcagaaaacatccctcaagagctcctgagtaacctgggacatcccgagtcaccacctagaaagagattaaaatccaaggggagcgataaggacttcgtgatcgtcaggaggcccaaattaaatagggagaatttccccggtgtctcgtgggactccctgcctgacgagcttctcctgggtatctttagctgtctgtgtctcccagaactgctgaaggtgtcaggtgtgtgtaagagatggtatcgactcgcatccgacgagtccctgtggcagaccctagatctgactgggaaaaatctgcacccagatgtcactggccgactgcttagtcagggcgttatcgcattccgctgccctagaagctttatggatcagcctctggcagaacattttagcccctttcgggttcagcatatggacctgtccaattcagttatcgaggtgtctaccttgcacggtattttatctcaatgctctaaactacagaacttgtccttggaaggcttacggctctcagacccgatcgtaaacacactggccaaaaatagcaatttggttagactgaatctgtctggctgttcaggattcagtgaatttgctctgcagacactgctgtcatcatgcagtcggcttgatgagctaaacctgagctggtgtttcgactttactgaaaaacatgtgcaagtggccgtggcccatgtcagcgaaactattactcagttgaatttatctggctaccggaagaacctgcaaaaatcagacctaagcacgctcgtccggagatgccctaatctggtgcatctggatctgtccgatagcgtgatgctgaaaaacgattgtttccaggagttctttcagcttaattatcttcagcatttgtctctgtctcgctgttatgatatcatcccagaaacgttactggagctgggagaaataccaacgctcaaaacgctgcaggtatttggtatcgttccagacggcaccctccaactgctgaaagaggcccttccccacttgcagataaattgtagtcactttactaccatcgctaggcctactataggtaacaaaaagaaccaggagatatggggaataaaatgcagactgaccctgcagaaacctagctgtttatag

SEQ ID NO: 242261 - DNA, 633 bp, synthetic construct
  misc_feature 1..633: note = Description of Artificial Sequence: Synthetic coding sequence
  source 1..633: mol_type = other DNA
atggatcagcctctggccgaacacttctctaccctggcgaagaattcaaatctggtgaggttaaacctgtcgggctgctctggcttttcggaatttgctctgcagaccctcctttcttcgtgttctcgtctcgatgagctgaatctgtcctggtgcttcgactttacggagaaacatgtgcaagtggcagtagcacatgtttcggaaacgatcacacagctcaatttatcaggttaccgtaaaaatttgcagaaaagtgatctttctacccttgtgagacgatgcccaaaccttgtgcatctcgacctctccgatagcgtaatgctaaagaacgactgttttcaggaattcttccaactgaattacctccaacacttaagtctttctaggtgttatgatattatccccgagacacttctcgagctgggagagatcccgactttaaaaacactgcaggtgttcggaatcgtcccagacggaaccttgcaactgctcaaggaagccctgcctcacctgcagatcaactgttcccactttactaccatcgcaagacccaccatcggaaacaaaaagaaccaggaaatctgggggatcaaatgccggctaactttgcagaaacccagctgtttgtag

SEQ ID NO: 242262 - DNA, 1362 bp, synthetic construct
  misc_feature 1..1362: note = Description of Artificial Sequence: Synthetic coding sequence
  source 1..1362: mol_type = other DNA
atggctctggtgcgcgcacttgtctgctgcctgctcaccgcctggcattgtcgaagcggcctggggctccccgtcgctcccgcaggcggtcggaacccccctccagccatcggacagttctggcatgttactgatttacacctggatcctacgtatcatattaccgatgatcatactaaggtgtgcgcctcgagcaagggagcgaacgcatctaaccccggaccctttggagacgtcctgtgtgatagcccgtatcaattgattctctctgcctttgacttcatcaaaaactctggtcaggaagcttcatttatgatttggacgggagactctccgccacacgtgcccgtgcccgagcttagtacagacactgtcattaacgtcatcaccaatatgacaaccaccattcaatctctgttccctaatctccaggtgtttccagctctaggcaatcacgactactggccccaggaccagctacccgttgtcacatccaaagtctataatgccgtagcaaacttgtggaagccttggctggatgaggaagcaataagcaccctccgcaaggggggattttatagccagaaggtgaccaccaaccccaatttaagaataatctccctcaacactaacctctactacggtcccaacatcatgacactcaataagaccgacccagccaatcaattcgagtggttggaatctacgctgaacaatagccagcagaacaaagaaaaggtgtatatcatcgcccacgtcccagttggctacctgcccagcagccagaacatcaccgcaatgcgtgagtactataatgaaaagctgatagatatctttcagaaatacagtgacgtgattgcgggtcagttctacggacatacccacagggactccattatggtcttgtcagacaagaagggttctcctgtgaattctttgttcgtcgccccagcggttacccctgtgaaaagcgtgcttgagaagcagaccaacaaccctggcattcggctcttccaatatgatcctcgcgactacaagctcttggacatgctccaatactacctgaacctgactgaggctaacctcaaaggtgaatcaatctggaaattggagtacatccttacacagacatatgatattgaagatctccaacccgaatcactctatggtctggctaagcaattcaccattctggatagcaaacagtttatcaaatactataactacttcttcgtaagttacgactccagcgttacttgtgacaaaacctgtaaagccttccagatatgtgccatcatgaacctggacaatatctcttacgccgattgccttaaacaactgtacataaaacacaactattag

SEQ ID NO: 242263 - DNA, 969 bp, synthetic construct
  misc_feature 1..969: note = Description of Artificial Sequence: Synthetic coding sequence
  source 1..969: mol_type = other DNA
atgacgacaacaattcagtcactttttcccaatttacaggtgtttcccgctctcggcaaccacgattattggccccaggaccagctgccggtggttactagcaaagtctacaacgccgttgccaatttatggaaaccgtggttggacgaggaagccatatccaccctcaggaaaggtggcttttattcacagaaagtcacaaccaacccaaatcttagaatcattagtctgaataccaatctatattatggtccaaacatcatgactctgaataaaacagaccctgctaaccagttcgaatggcttgagagtaccctgaacaatagtcaacaaaataaagagaaagtctacataattgcccatgttccagtaggttaccttccaagtagtcagaacatcacagctatgagggagtattacaatgaaaaactgatcgacatttttcaaaagtactctgatgtaattgccggtcagttctatggacacactcatagggatagcattatggtcctgagtgataagaagggtagtcccgtgaacagcctgttcgtcgcccctgcagtgacacccgtgaagtcagtgctggagaaacagactaacaatccgggtattcgactttttcagtacgacccgagagattacaagttgctggatatgctgcagtattacttaaatctaactgaggccaacttgaagggtgagtctatctggaaattggagtatattttaacgcagacgtatgatattgaggacctgcagcccgagtccctgtacgggctggctaaacagttcacgatcctcgacagcaagcaatttattaagtactataactacttttttgtgtcttatgattcatccgtgacctgcgacaaaacgtgcaaagcttttcaaatctgtgccataatgaacctggacaatatctcctatgcagattgtttgaagcagctgtacatcaagcacaattactag

SEQ ID NO: 242264 - DNA, 726 bp, synthetic construct
  misc_feature 1..726: note = Description of Artificial Sequence: Synthetic coding sequence
  source 1..726: mol_type = other DNA
atgaaggaagtcgtgtattggagccccaagaaagttgccgattggcttcttgagaatgcaatgcccgagtattgcgaacctcttgaacattttacaggccaagacctgataaatttgacccaggaagactttaagaagcctcctctgtgtcgggtctcatccgacaacggacagcgactgttagatatgattgaaaccctgaagatggagcaccatctcgaggcccataaaaacggccacgccaacggccatttaaacatcggtgtggatatccctacaccggacggatcctttagcatcaagatcaaacctaatggcatgccgaacggctaccgaaaagaaatgattaagattcccatgccagagctggagcgatcccagtatcccatggagtggggcaagacattcctggcattcttgtatgcgctatcttgctttgtgctgacaaccgtgatgatttccgtagttcatgagagggttcctcctaaagaggtccaaccgcctcttcccgacacatttttcgatcattttaatagggtacagtgggctttttcaatatgcgaaattaatggtatgatcttggttggcctttggctgatccaatggctcctattgaagtataaggacgttgggaatgagtccagagtggtgatgattttcctgtcgatagtgcatccagtactcttgctggggtctatcgctggctttctaagcctgagtctttag

SEQ ID NO: 242265 - DNA, 1242 bp, synthetic construct
  misc_feature 1..1242: note = Description of Artificial Sequence: Synthetic coding sequence
  source 1..1242: mol_type = other DNA
atgaaggaggtcgtctattggtctccaaagaaggtggccgattggctcctggaaaacgctatgcccgagtactgtgagccactggaacactttacaggtcaggacctgattaacctcacacaggaggacttcaagaaacctccactgtgcagagtgagctccgacaatggtcagagactgctcgatatgatcgaaacactgaagatggaacaccacctggaagcccacaaaaatgggcatgctaatggccacctgaacatcggggtagacatacctacaccggacggatctttttccattaagattaagcctaacggaatgcccaacggttatcgcaaggagatgatcaagattccaatgccggaactggagcgctctcagtaccccatggagtggggtaagactttcctggcgtttctctatgcgctatcttgttttgttttgaccactgtaatgatttccgtggtccacgaacgagtgccgcctaaggaggttcagccacccttacctgacacattttttgatcactttaatcgggtgcagtgggccttttcaatctgcgagattaatggcatgattttggtggggctctggttgatacaatggctgctgctcaagtataaatccataatttccagaaggttcttttgtattgtaggaacactgtacctttaccggtgcattaccatgtatgtcacaaccctgccagtgccagggatgcactttaattgtagtcccaagctgtttggggattgggaagcgcagcttcgtagaatcatgaagctgattgcagggggagggctttccattaccggttcccataacatgtgtggggactatctttactccggacacactgtgatgctcaccttgacgtatctgttcataaaggaatactcgccaaggaggctttggtggtaccactggatatgctggttgctgtccgtggtcgggatcttttgcatacttctggctcatgatcactatactgtggatgtcgttgttgcttactatattacaacccggctcttttggtggtaccacactatggcaaatcaacaggtgctcaaggaagcaagtcaaatgaatctgctggccagagtatggtggtatagaccattccaatactttgagaaaaatgtgcaagggatcgtgccacggagctaccattggcctttcccgtggccagtggtgcatctgtcaagacaggtcaagtactctcggctggttaacgacacctag

SEQ ID NO: 242266 - DNA, 642 bp, synthetic construct
  misc_feature 1..642: note = Description of Artificial Sequence: Synthetic coding sequence
  source 1..642: mol_type = other DNA
acctacatgtatatctctaacaaatctattatttcaagaaggtttttttgtatcgtggggactctttatctgtacaggtgtatcacaatgtacgtgactacactgcccgtgcccggaatgcatttcaattgttccccaaagttattcggcgactgggaagcgcagcttcgtcggattatgaaattgattgccggaggtggtttgagcatcacaggctctcacaacatgtgcggtgattatctgtactccggccacactgtgatgctcacactgacctatctgttcatcaaggaatattcaccacgtaggctgtggtggtatcattggatttgctggctcctcagcgtcgtgggcatattttgcatactcctggcacatgaccactacactgttgatgtggtcgtcgcatattacattaccacgcgactgttctggtggtatcacacaatggccaaccagcaggtgttgaaagaagcttcccagatgaatcttctcgccagagtatggtggtaccgccctttccaatattttgagaagaatgtccagggcatcgtcccacggtcttatcattggccatttccatggcctgtagtgcacttatctaggcaagtgaagtattctagattagttaacgatacctag

SEQ ID NO: 242267 - DNA, 735 bp, synthetic construct
  misc_feature 1..735: note = Description of Artificial Sequence: Synthetic coding sequence
  source 1..735: mol_type = other DNA
atgggtgggcgtggaggagggggacggagccgccagctgccaggtagatttagggcgcctgcagccaggtggcccggaggcaggtggttgcctggagctccccgaactgtgacatggagcattattagtagaagatttttttgcattgtgggtacactctatctgtacaggtgcatcacaatgtatgtcactaccctcccagtgcccggtatgcacttcaattgttcgcccaagttgttcggggattgggaggctcaactacggaggatcatgaaacttattgccggagggggactcagcatcacgggttcccataacatgtgcggggattatttgtattccggtcacactgttatgctgacactgacatacctgtttattaaggaatactcaccccgtagactgtggtggtatcattggatctgttggctcctgtccgttgtcgggatcttctgtatccttttagcccatgaccattacaccgtggacgtggttgtcgcctattatataacaacaaggctcttctggtggtatcatacaatggccaaccagcaggtgctgaaagaagcctcccagatgaatctgctggcaagagtttggtggtaccgccctttccagtatttcgaaaagaacgttcagggcatagtgcccaggagttaccattggccctttccgtggccagtggtgcacctgagcagacaggtgaaatattcacgcttggtgaatgatacctag

SEQ ID NO: 242268 - DNA, 1098 bp, synthetic construct
  misc_feature 1..1098: note = Description of Artificial Sequence: Synthetic coding sequence
  source 1..1098: mol_type = other DNA
atggacatcatcgagactgccaagctggaagagcatttggagaaccagccttcggatcctacaaacacatacgccagaccagccgagcctgtggaggaagaaaataaaaacgggaatggtaaacccaagagtctttcatctggcctaagaaagggtacaaaaaaatatcctgactatatacagatcgccatgcctactgaatcaaggaataagttcccattggaatggtggaagaccggaattgcgttcatctatgccgttttcaatcttgtcctgacaaccgtgatgatcactgttgtacacgaaagagtcccacccaaagagctgagtccacccctgcccgataagttttttgattatatagatcgagtgaagtgggctttctcagtgtctgagataaacggaatcatcctcgtgggtctgtggattacacaatggctctttctacggtacaagtccatagtgggtcggaggttttgttttataattgggaccctgtatctctacagatgcataactatgtatgtcaccaccctgccggtgccgggtatgcattttcagtgtgctcccaagttgaatggcgacagtcaggctaaggtacaacggatacttaggctcatatcgggtgggggtctgtccattacgggatcccacatcctatgcggagactttttattcagtggccacaccgtgacattgacgttaacttacttgttcataaaggagtactcccccaggcacttttggtggtatcacctgatctgctggctgctgtccgcagccggtatcatttgcatccttgttgctcacgagcactatacgattgatgtgattatagcgtattacattactactcggttgttttggtggtaccacagtatggctaacgaaaaaaatctgaaggtgagttcacagacgaatttcctgtcgcgggcttggtggtttcctattttctatttctttgagaaaaacgtccagggttctatcccatgttgcttctcctggcccctatcatggccgcctgggtgcttcaagagcagttgcaaaaaatattcgcgcgttcagaagattggtgaagataatgaaaagagcacttag

SEQ ID NO: 242269 - DNA, 1098 bp, synthetic construct
  misc_feature 1..1098: note = Description of Artificial Sequence: Synthetic coding sequence
  source 1..1098: mol_type = other DNA
atggacattatcgagaccgctaagcttgaggaacatctggagaatcaacctagtgacccaactaacacatatgccagacccgcagagcccgttgaagaagaaaacaagaacggcaatgggaaacccaagagcctctccagtgggctaaggaaaggcacaaagaaatatcctgattatattcagatcgctatgcccaccgaatcacggaataaattccctttagaatggtggaagacaggtattgcgtttatttatgctgttttcaacctagttctgacaaccgtgatgatcacagtagtgcatgagagggttccccctaaagagctgtccccaccattgcctgataagtttttcgattatattgatcgtgtaaagtgggcttttagtgtatcggagataaacggaatcattctagtcggcctgtggattactcaatggcttttcttgagatacaagtccattgtgggtaggagattctgttttatcattggaacgctttacctctaccggtgcataacgatgtacgtgaccaccctacccgttcctggcatgcattttcagtgtgccccaaagcttaacggcgatagtcaagccaaagtacaacggattctgaggctcatttccggcggaggcctcagcatcaccggatcccacatcctttgcggagattttttattctctggccatacggtgactctcacacttacttaccttttcatcaaagagtatagccctcgacacttctggtggtaccatttaatctgctggctgctatctgctgctggtattatatgtatccttgtagcacacgagcactacacaatcgatgtgataatcgcctactacattaccacccgactcttttggtggtaccacagcatggcaaacgagaagaatctcaaagtctcctctcagaccaattttctgtctcgcgcttggtggtttcccattttttacttctttgagaaaaacgtccagggctctattccctgctgtttctcctggccgcttagttggccgcctggctgttttaaaagcagctgtaaaaagtacagccgcgtccagaaaataggggaggacaatgagaaaagcacctag

SEQ ID NO: 242270 - DNA, 1098 bp, synthetic construct
  misc_feature 1..1098: note = Description of Artificial Sequence: Synthetic coding sequence
  source 1..1098: mol_type = other DNA
atggacattatcgagacagcaaagctcgaagaacaccttgagaatcagccttccgacccgacaaacacttacgccagacctgctgaacccgtggaggaagagaataagaatggcaatggaaagcccaaatcgctcagctccggcctgagaaagggcaccaagaaatacccagattacatccagatcgcgatgccaacagagagtcgcaacaaattccccctcgaatggtggaaaactggtatagcgtttatctacgcagtttttaatctggtacttaccacagtgatgatcaccgtcgtgcacgagcgtgtccctccaaaggagttgtctccgccactccccgataaattcttcgactacattgaccgagttaagtgggcgttttccgtgagtgagattaatgggatcattctggttggcctctggattacccagtggctgttcttgaggtacaaatctattgttggaagacgcttttgcttcattattggtaccctctatctgtaccgctgcattacaatgtatgtgaccacgctacctgtaccgggaatgcactttcagtgcgctcctaagttgaacggggactcccaggctaaggtccagcgcatcctgaggctaatctcgggtgggggactcagtattaccgggtcacacatcttgtgcggtgacttccttttctctggacatacagtgaccctgaccctcacttacctattcattaaagagtattcgccacgccatttttggtggtaccatttgatctgctggttgctcagcgctgctggaatcatctgtatcttagtggctcacgaacactacacaattgatgttatcatagcctactacatcacgacgcggctgttctggtggtatcactccatggccaacgagaaaaacctcaaggtttcgtcacaaaccaattttctgagccgcgcttggtggtttccaatcttctactttttcgagaaaaatgtgcagggaagtattccctgttgtttctcttggcccttatcttggcctcccggttgctttaaatcatcctgcaagaaatacagcagggtccaaaagattggcgaagataacgaaaagtcaacatag

SEQ ID NO: 242271 - DNA, 135 bp, synthetic construct
  misc_feature 1..135: note = Description of Artificial Sequence: Synthetic coding sequence
  source 1..135: mol_type = other DNA
atggatatcatcgaaacagccaagttggaagagcatttggagaatcagccgtctgaccccaccaatacttacgcccgaccagctgaacccgtggaagaggagaacaaaaacgggaacgggaagcctaaatcatag

SEQ ID NO: 242272 - DNA, 105 bp, synthetic construct
  misc_feature 1..105: note = Description of Artificial Sequence: Synthetic coding sequence
  source 1..105: mol_type = other DNA
atggacattatcgaaacagctaaactcgaggagcacctggagaaccagcccagcgatcctacaaatacctacgcccgtccagcagagcccgtcgaggaagagtag

SEQ ID NO: 242273 - DNA, 1326 bp, synthetic construct
  misc_feature 1..1326: note = Description of Artificial Sequence: Synthetic coding sequence
  source 1..1326: mol_type = other DNA
atgtcactgcgccaaagactggcacagttggtggggagactgcaggatccacagaaagttgccagatttcagcgtctttgtggggtggaagcacctcctcgcagatccgcggatcgccgtgaagacgagaaggcagaggcaccacttgctggcgatcccagattgcgtggtcggcaacccggtgccccagggggtccacaaccccctgggtccgatcgaaaccaatgccctgccaaacccgatggcggaggagccccaaacggcgtccggaacggactcgccgctgaactcggcccagccagccccagacgtgctggggctctaaggcgaaactctctgaccggcgaggagggtcagctggccagagtgtcaaattggcccctctattgcttgttctgtttcggtaccgaactgggaaatgaactcttttatatcctctttttccctttctggatctggaacctagatccattggtgggcaggcggctggtggtgatttgggtattggttatgtatcttggacagtgcactaaggatataattaggtggcccagacctgcctcaccgcctgtcgtgaagctggaggtgttctacaactcagagtactcaatgccaagtacacatgcaatgtctggcacagctattcccatttccatggtgctgctcacctatggcagatggcaatacccgttgatatacggactgatcctgataccgtgttggtgtagccttgtttgcctgagcagaatctacatgggcatgcatagcatcctggatataattgccggattcctctacacgattctgatcttagctgtcttttaccctttcgtagacctcatcgacaactttaatcagacccacaagtatgcacctttcattatcattgggctgcacctggctcttggcattttcagcttcaccctcgacacctggagtaccagccggggagatactgccgagatattgggttccggggctggcattgcttgcggctctcacgtcacctataatatgggactggtgctcgaccctagcctcgataccctcccgcttgcaggaccccctatcacggtgactttattcggtaaagccattctgcgcattctgattggaatggtgtttgtcctgattattcgcgacgttatgaagaagattacaattccacttgcctgcaagatattcaacatcccttgtgatgatatccggaaagctcggcagcatatggaagtcgagttgccctatcgctatattacctacggcatggtgggcttttctattacttttttcgtcccctacatcttcttcttcattggtatcagctag

SEQ ID NO: 242274 - DNA, 1200 bp, synthetic construct
  misc_feature 1..1200: note = Description of Artificial Sequence: Synthetic coding sequence
  source 1..1200: mol_type = other DNA
atggcagaactcttgaggtctttgcaggactcacagttggtggccaggtttcagaggaggtgcgggctgttcccagctcccgacgagggtcccagggagaacggagcagatccaactgagagggccgctcgggtccccggagtcgagcatctgcccgctgccaacgggaaaggaggagaggctcccgcaaatggcctccgcagagcggcagcacctgaagcctatgttcaaaagtatgttgtgaaaaattacttctattattatctgtttcaatttagcgctgcactgggacaggaggttttttatattactttcctcccatttacgcattggaacatcgacccttacctgagtagacgcttaattataatctgggttcttgtgatgtatattggacaggtcgccaaggacgtcttgaagtggcctcggccatcatctccacccgtcgtaaagttggaaaaacgccttattgcggagtatgggatgccctctacacatgcgatggcagccaccgccatcgcattcactctgctcatttccaccatggatcgctaccagtaccctttcgtgctgggactggtgatggcggtggttttttctacgctggtttgcctgagccggctctacaccggtatgcacacggtgctagatgttctgggcggtgtgctgatcacggccctgcttattgtgctgacttatcccgcatggacattcatcgactgcctggacagtgcctctccattgtttcccgtgtgtgtgatcgttgtgccgttcttcctttgctataactaccctgtttctgattattactctccaaccagggcagatacgaccactatactggccgctggagccggtgtgacgattgggttttggatcaatcacttctttcagctggtcagtaaaccggcagaatctctgccagtgatacaaaatatcccccctctgacaacatatatgctggtgctgggtcttactaagtttgccgtggggatcgtactaatacttctggttagacagctggtgcagaatctgagcttgcaggttctgtactcttggttcaaagtcgtcaccaggaataaggaagcaaggcggaggctcgaaatcgaggtaccttacaaatttgtgacatacacttctgtgggcatttgcgccacaacgtttgtgcccatgctacaccgatttctcggtctgccatag

SEQ ID NO: 242275 - DNA, 1062 bp, synthetic construct
  misc_feature 1..1062: note = Description of Artificial Sequence: Synthetic coding sequence
  source 1..1062: mol_type = other DNA
atgggttcactctatagcgagtacctgaatccaaacaaggttcaggagcattataactacacaaaagagaccctggagacccaggaaactacctccaggcaagttgcctccgcctttattgtcattctgtgctgtgccattgtcgtagaaaacctactggttcttatcgccgtcgcccgaaacagcaagtttcacagcgccatgtatctgttcctgggcaacctggcggcttctgacctactcgctggcgtggcctttgtggccaataccttgttatctggctctgtgacgctgcgattaacgcccgtgcagtggttcgccagagaggggtcagctttcatcacactgtctgccagcgtgttctcattgttggctattgccattgaacgacatgttgcaatagcaaaggtcaaactgtatggtagcgacaaaagttgccgaatgctgctgctcattggcgctagttggctgatctcgttggttctggggggtctgcctatcctggggtggaattgtttagggcatctcgaagcctgtagcactgtgctccccctgtacgccaaacattacgtcttgtgcgtggtcacaatttttagtataatcctgcttgctatagttgctctttatgtcagaatctattgcgtggtccggtctagccatgccgacatggccgcaccccagacactcgctctactaaaaactgttacaattgtcttgggagtctttatagtgtgctggttaccggcattctcaatcctattactggactatgcctgccccgttcatagctgtccaatcctctacaaggcccactatttcttcgctgtctcaacactgaattcactcctgaaccctgtcatctacacttggcggtcacgagaccttcgcagggaggtcttgcggccactgcagtgttggcgcccaggcgtcggcgtgcagggcaggcggagaggcggaactcctggccaccatttattgccgctccggagctctagctcactggagcgcggaatgcacatgcctacaagcccaaccttcctggaggggaatacggttgtctag

SEQ ID NO: 242276 - DNA, 1137 bp, synthetic construct
  misc_feature 1..1137: note = Description of Artificial Sequence: Synthetic coding sequence
  source 1..1137: mol_type = other DNA
atggctactgccctaccgccacgtctccagcccgttagaggaaatgagacattacgggagcattaccagtatgtagggaagctggcagggcgtttgaaggaagccagtgaagggtccaccctgaccaccgtcctattcctagtgatctgctcctttatcgtgctcgagaacttgatggtcttgattgcaatatggaagaataacaaattccacaaccgaatgtatttttttatcggcaatctcgcattgtgtgatttgttagccggtattgcttataaggtcaatatactcatgtctggcaaaaaaaccttttcgctgagtcccactgtgtggttcttgagagaaggaagtatgttcgtcgctcttggagcttccacctgcagcctactcgccatcgcgatagaacgccacctgaccatgatcaagatgcggccatacgacgcaaacaaaaggcacagggtttttctgctcatcgggatgtgctggttgattgctttcaccctgggagcactgcccatactagggtggaactgcctgcacaatctgccggactgtagtacaatcttgcccctttattctaagaaatatatcgctttctgtatctcaatttttaccgcaattcttgttactattgttatcctctatgctcggatctattttttagtcaaaagttccagcaggaaggtggctaatcataataactccgagaggtctatggccctcctccggacagtggtaattgtagtctcagtatttatcgcctgctggtccccactctttattctttttcttattgatgtagcatgtcgagtccaggcgtgtcctatattgttcaaagcgcagtggttcatagtattggctgttctcaattctgcaatgaacccagtcatatacacacttgcttccaaggaaatgagacgggcatttttccgtctggtctgtaattgcctggttagaggacgcggagccagggccagtccaatccaacccgcactggatccaagcagaagtaaatcaagttcatccaacaacagcagccacagcccaaaggtaaaagaggacctgccacatacagccccatcttcttgcattatggacaagaacgccgcattgcagaatggcatcttctgtaactag

SEQ ID NO: 242277 - DNA, 1137 bp, synthetic construct
  misc_feature 1..1137: note = Description of Artificial Sequence: Synthetic coding sequence
  source 1..1137: mol_type = other DNA
atggctaccgcactgcctccccgactgcaacccgtaaggggcaatgaaacactgagggaacactatcaatatgtggggaaattggcagggaggctgaaggaagcaagtgaagggtctaccctcactaccgtgctgtttcttgtaatttgttcttttatcgttctggaaaacctgatggtgctgatcgctatctggaaaaacaataaattccataatcgtatgtatttcttcatcggaaatttggcattgtgcgatttgctcgccggaattgcttacaaagtgaatatcctgatgtctgggaaaaaaacgttctctcttagcccgactgtgtggtttctgagggagggttcaatgtttgttgccctgggagctagtacttgctcattactggcaattgcgatcgagcgccacctgactatgataaagatgcgaccgtacgatgccaataaaaggcatcgcgtctttctactgattgggatgtgttggctcattgccttcaccctgggcgctctgcccatcctcgggtggaactgcctccataacctgccggactgctcgaccatcctgcccctgtactctaagaaatatattgccttttgtattagtatttttactgccattctcgtgaccattgttatcctatatgccaggatctactttctggtcaaatcttccagcagaaaggtggcaaatcataacaattccgagagaagtatggcacttctgagaaccgtagttatcgtggtttccgtgttcattgcttgttggagcccgttgttcatcctgtttctgatcgacgtagcctgtagggtgcaggcatgtccaattttattcaaggcacagtggtttattgttctggccgtactaaattcggccatgaatccagtgatttataccctagctagcaaggagatgcgcagagcattttttcgactagtttgcaattgcttggtgagaggtagaggtgcacgggcttctcctattcagccagcactggacccttctagatctaagagtagctccagcaataattcctcccactcgccgaaagtgaaagaagacctgccgcacaccgccccttccagttgcatcatggataaaaacgccgcactgcagaatggaatattctgcaattag

SEQ ID NO: 242278 - DNA, 1155 bp, synthetic construct
  misc_feature 1..1155: note = Description of Artificial Sequence: Synthetic coding sequence
  source 1..1155: mol_type = other DNA
atgaacgccacgggtactccggtggcacccgaatcatgccagcagctggctgctggtggacactcccggctgatagtactccactataaccattctgggagactagcgggacgagggggtcccgaagatggcggactgggtgcgctgcggggattgagtgtggctgccagctgtctagtggtcctggaaaatctgttggtgctggcagctataacctcccacatgcgctcaagaagatgggtttactactgtctggtcaatatcaccctgagtgacctgctgaccggtgctgcctatctagcaaatgtgctgctcagcggcgcacggaccttccggttagcccctgctcaatggtttcttcgggaggggctgctgttcacagctcttgcagcctcaaccttctctctgctgttcaccgcaggcgagcgattcgccacgatggttcggccagttgcagagagtggcgctactaagacctctagagtctatgggttcatcgggctgtgttggcttctagcagcccttctgggtatgctccccctgttgggatggaactgtttgtgtgcattcgacagatgtagcagcctgttaccgctctatagcaagcggtacatcctgttctgtcttgtgatctttgccggtgtgctagcgacaataatggggctctatggggctattttccggttggtgcaggctagcggccagaaagccccacggcctgctgctcggcgaaaggcgaggcgactgctgaagacagtccttatgattttactggcgttcctcgtctgttgggggcctttgtttggtctgcttctggcggacgtgtttggatcaaacctgtgggcccaggaatatcttcgtgggatggactggatactggccctggctgtgcttaattccgcagttaatcctattatttacagcttccggtcacgggaagtatgtcgagcagttctttcattcctgtgttgtggctgcctgcggttagggatgagggggccaggagactgcctagcccgagcagtggaggctcactctggcgcatctaccacagattcctccctacgcccaagagactcgttccgcggtagccggtccttatccttccgaatgagggagccactgtcatcaatcagtagcgtgcggtccatctag

SEQ ID NO: 242279 - DNA, 1197 bp, synthetic construct
  misc_feature 1..1197: note = Description of Artificial Sequence: Synthetic coding sequence
  source 1..1197: mol_type = other DNA
atggagagcggcctactgagaccagctccggtgtctgaggttatagtgttacactataattacaccggcaaactgcggggagcgagatatcaaccaggagccggactgcgggctgatgccgtcgtgtgcttggctgtgtgcgcattcatcgtccttgagaacctggctgtcctgcttgtgttagggaggcatccaagattccatgctccaatgttcctgctgctgggctccttaactctttcagacctgctcgctggcgctgcctacgctgccaatatcctcctgagtggaccgctgacacttaaactctctccagcactgtggttcgctcgtgagggaggagttttcgtggcactgaccgcctcagtactgtctttgctggcgatcgcactcgaaagatcgctcacgatggccagacgaggacccgcacccgtttcgagtcggggtcgcacccttgccatggctgccgctgcctggggggtgtcacttcttctagggctcttgccggctcttggatggaactgtctcggacgacttgacgcctgcagcactgtgctcccgctttatgcaaaagcatatgtgcttttttgtgtcttagcctttgttggaattctggctgctatctgcgctctgtatgctaggatctattgccaagtgcgcgctaacgctaggcgcctcccagcccgtcccggaaccgctgggactacttccacgagagcacgcaggaagccacggagtctggccctacttcgtacattatcagttgtactcctagcgtttgtggcctgttggggtcccttgtttttgctgctccttctcgatgtggcctgccccgcacgaacttgtccggtgttgctccaggccgaccctttcctaggccttgctatggccaatagcctgctgaacccgatcatctacaccctgactaacagggatctgagacatgcactgttaagattagtgtgctgtggaagacacagctgcggacgcgacccgtccggatcccagcaatcagcaagcgctgccgaggcttctggagggcttagaagatgcctccctcccggactggatggctcctttagcggcagcgaacgctcatcccctcaacgggatggactggacaccagcggcagcactggctcacccggtgcacctaccgcggctcgcactttagtaagcgaacccgcagccgactag

SEQ ID NO: 242280 - DNA, 933 bp, synthetic construct
  misc_feature 1..933: note = Description of Artificial Sequence: Synthetic coding sequence
  source 1..933: mol_type = other DNA
atggagagcggcctgctgcggccagcaccagtgtctgaggtgattgtcctccactataactataccggaaagttgcgtggcgcaagataccaacccggagccggtctgcgagcagacgctgttgtgtgtctggcagtttgtgcgtttatagtcttggagaacctggctgtcttactggttcttgggaggcacccacgattccatgctcctatgtttctcctgttgggctcactgacgctgtcagatctgctcgctggcgcagcctatgcagctaacatactcctgtccggtccactgacactgaagttaagcccagctctgtggtttgccagggagggcggagtatttgtggctctcactgcctcggtgcttagtctcctggccatcgccctggagaggtcccttacaatggccagaaggggtccggcacctgtcagctcaagaggccgaacccttgctatggccgcagctgcctggggcgtctcgttactcctaggtctgctgcctgctctgggatggaactgtttaggcagacttgatgcttgttccactgtgttgcctctttacgccaaagcctacgttctgttctgtgtcctcgctttcgtgggaatattggcagctatttgcgcactgtacgccctggctggtctcgcagcccatgctcagagaggcgcaccagggttgtgtgggatgttaggaccaccccttcccgcagccgtcgctcggagaggcgtgcccggagctcatctgtcatgcacaccagctggaagatctctgcccggtaccggccatggacagctaacctccgagcctcaccacttgcacgctcaccagcccaggccagctccacgagctcctgccccagggctgctacgtactcctttattgcggcagcggcctgagtggcttcccgcagtgggtgaacgcggttag

SEQ ID NO: 242281 - DNA, 1197 bp, synthetic construct
  misc_feature 1..1197: note = Description of Artificial Sequence: Synthetic coding sequence
  source 1..1197: mol_type = other DNA
atggagagtggcctcctgaggccagccccagtctccgaggtgattgtgctccactacaactatacgggaaagctgagaggcgctcggtaccagccaggggctggcttgcgagcagacgcagtggtctgtctcgccgtttgtgcattcattgtcttggaaaacctggccgtcttactggtgcttgggcgacatccaaggttccatgcaccgatgtttctgctacttgggtccttaaccctgagcgaccttctcgcaggtgctgcttatgcggcaaatatcctattgagcggaccactgacactgaaattaagtcccgctctctggtttgcccgtgagggcggagtcttcgttgctttaacagctagtgtcctaagtttgctggcaatcgctctagagagatccctgactatggcaagacgtggaccagcacccgtatcttctaggggaaggactttagccatggctgccgctgcatggggcgtttcgttattgttagggctgctgcccgctctcggttggaactgtctggggagactcgacgcatgctccaccgtgctacctctgtatgccaaagcctacgtgttattctgcgtccttgcatttgtgggcatactcgcagcgatctgcgcactgtacgctcgcatttattgccaggtgcgtgctaatgctaggaggctaccagcccgacccggtaccgctgggacgactagcactagggcgagaaggaaaccacggagcctggcccttcttcgcacgctttctgtggtgttgctggcatttgttgcgtgttggggtcccctgttcctcttgctgttgctggacgtggcatgtcctgctagaacttgcccggtgctgctccaagcagatcccttcctcggactggccatggctaattctcttctgaaccctatcatctataccctcactaatcgcgacctgcgccacgccttactcaggcttgtgtgctgcggaaggcacagctgcggcagagatcccagcggttcacagcagtcagcttctgccgcagaggcctccgggggtctgcgaaggtgcttacctccgggactggacggtagcttctccggctctgagcgctcttccccccagcgcgacggcttagacacgagcggttccaccgggtcaccaggggctccaactgccgctcgaacacttgtctccgaaccagccgcagattag

SEQ ID NO: 242282 - DNA, 5015 bp, synthetic construct
  misc_feature 1..5015: note = Description of Artificial Sequence: Synthetic coding sequence
  source 1..5015: mol_type = other DNA
atggatggtaattccctgctctctgtcccatccaatctcgaatcatcacgcatgtatgacgtgttggagcctcaacagggacggggatgcggtagttcgggtagtggacccggaaactcaataactgcttgtaaaaaggtgctcagatcaaattctttactagagtccaccgactactggttgcagaaccagagaatgccctgccagatcggatttgtcgaagacaagagtgagaattgcgctagcgtttgcttcgtcaacttagacgttaacaaagacgagtgctccacggaacacctacagcaaaaacttgtcaatgtgagtccggatttacccaagctgatcagtagcatgaacgtgcagcagcctaaggaaaacgagattgtggtcctaagcggtctcgcttctggaaacctgcaggcagactttgaggtgtcccagtgtccctggctgcccgatatctgcctggtacagtgcgctcgtggcaataggccaaattctaccaattgcataatattcgagattaataaattcctcatcggcctggagctggttcaagaaaggcaactgcacttggagaccaacatcctgaagctggaggacgacaccaattgctcgttgagcagcatcgaagaggatttcttgacggcctctgaacacctcgaggaggaatcagaagtggacgagagtaggaacgactatgaaaacatcaacgtgtcggccaacgtgctggaaagcaagcaattgaaaggcgcaacccaagtcgaatggaattgcaacaaagagaagtggttatacgcccttgaagacaaatacatcaataagtaccccacacctctgattaaaaccgaaaggagcccagaaaacctcactaaaaacactgcactacagtcactcgacccaagcgccaagccatcacagtggaagagggaggcggtgggtaatgggaggcaggctacccattattaccatagcgaggccttcaaaggacagatggagaaatcccaagctctatacattccgaaggacgcttacttctctatgatggacaaagacgttccatcagcatgcgccgtggcagaacagaggtctaatttgaatcccggtgaccatgaggacacaaggaatgcactacctcctaggcaggatggcgaagtgacaacagggaagtacgccacaaatttggccgagtccgttctgcaagatgccttcatcaggttgtcccaatcacagtccacattgccccaagaaagtgcggtaagcgtctcggtggggtcttccttgcttccttcatgctatagcactaaagatacagtcgtgagcagaagctggaatgagctccccaaaattgtggtggtgcagtcccctgatggctctgacgccgcaccccagccgggaatctcctcttggccagagatggaagtgtcggttgaaacttcttctatcttaagcggggaaaactcttctcgacaacctcagtcagcgttagaggtggcactcgcatgtgccgcaacagtcatcgggacgataagctctcctcaggccactgagagactgaagatggagcaggtagtaagtaattttccgccagggagtagtggggctcttcagacacaagcccctcaagggctaaaggaaccctccattaacgaatacagctttccgtctgcactctgtggaatgacccaggttgcaagtgcagtcgcggtctgcggcctgggtgaaagggaggaggtcacatgctctgtggcaccgagcggctctcttccaccggctgcagaagcctctgaggcgatgcctccgctatgtggactcgcatctatggaactggggaaggaagcaatagccaaaggactgttgaaggaggcggctttggtgctgacccggccaaacacttatagttcgatcggggacttcttggactccatgaaccgcaggattatggaaacagcttccaaaagccaaaccttgtgttcggagaatgtggtacgtaatgaacttgcccatacactgtcaaacgtaatacttcgacactctatcgacgaggtgcatcataagaatatgatcattgatcccaacgacaacaggcactccagcgaaatacttgacacgctgatggagtcgactaaccagctgttgcttgatgtaatctgctttacctttaaaaagatgagccatatcgttaggcttggagagtgccccgctgtgctcagcaaggaaaccatccgaaggcgagaaacagaacctagctgccagccaagtgatccaggggcaagccaggcctggactaaggcaaccgagtcctcaagttcaagtccactgtcaaactcgcacaacactagccttgtgattaacaatctagtcgacggcatgtattccaagcaagacaaaggaggcgttagacctgggctgttcaagaatccgactctgcagtcacaactgagtcggtcccacagggtgcctgattcttccactgctactacctcctcgaaagagatctatctgaagggcattgccggagaggatacgaagagtcctcaccactcagagaacgaatgtcgcgcaagctccgaaggtcagcgttcccccacggtgtctcagtcccgtagtggttcccaggaagctgaagagtctatccacccaaacacccaggaaaaatacaactgcgctacatctaggatcaatgaggtgcaagtgaacctgagcctcttaggagatgacttattgctgcccgctcagtctacgctgcagaccaagcacccagatatatattgcattactgatttcgctgaagagctcgcagataccgtagtcagtatggctacagagatcgctgccatatgcctagacaacagcagtggcaagcagccgtggttttgcgcctggaaacgtggcagcgaattcctcatgacccccaacgtaccgtgcagaagcctcaaaagaaaaaaggagagccaaggatcagggactgccgtgcggaagcacaagccccctagattgagcgagattaaacgtaaaacggatgagcacccagagcttaaagagaaattgatgaaccgggtcgtggatgaatccatgaacttggaggacgtgccagacagcgtgaacctgttcgcaaatgaagtcgcagccaaaattatgaaccttaccgaattctccatggtcgacggaatgtggcaggcgcaggggtacccacggaaccgtctcctgagcggggatagatggtcacggctcaaggcatcttcttgcgagtccattccagaggaggattccgaagccagggcgtatgttaacagtttgggactcatgagtacattaagtcaacccgttagcagggctagctctgtgtccaaacagagctcctgcgagagtattaccgacgagttcagcaggttcatggtgaaccagatggagaatgagggtcgcggattcgagttgcttctggactattatgctggtaagaacgcttctagtatcctaaattctgccatgcagcaagcctgcagaaaaagcgatcacctctccgtgagacctagttgtccctccaaacagtcaagtaccgagagcatcacagaggaattctatcgctatatgctgagagacatagaacgtgatagtcgagaatctgcatcgtccagaaggtcctcacaagattggaccgctgggctactgagcccttccttacggtcccctgtttgccatagacaaagcagtatgccagacagccggtcaccctgtagccgcctcacggtgaacgtgcctattaaggctaacagcctcgacggatttgcccaaaattgtcctcaggacttcctgagcgtgcaaccagtgtcatccgccagctcttccgggctgtgtaagagcgattcttgcctttatcgcagaggaggcacagaccacattaccaatatgctgatccatgagacatgggctagctcaattgaggctctgatgaggaagaataagattattgttgacgatgcggaggaggccgacacggaacctgtgagtggcggaagccctagccaagccgagaaatgcgctaaccgactcgccgcttcgcgtatgtgttcagggccaaccttgttggtgcaggaaagtcttgactgccctcgaaaagattcggtcaccgagtgcaaacagcctcccgtgtcttctctgtccaagaccgcatctctgacaaaccacagccccctggatagtaagaaagagacaagttcctgccaggatccagtgcccatcaaccacaaacgcaggtcattatgcagcagggaggtgcccctgatacaaattgaaactgatcagagggaggcctgcgctggggagcctgaaccctttctgtctaagagttctcttctggaagaggctgagggacacagcaatgataaaaatataccggatgtcgttcgaggcggagacaccgccgtttctgcgtgtcagatccacagcgacagcctggacaccagagatgtgcctgaagcagaggcgtctactgaagctcgcgcacccgatgaggcacctaatccgccaagctcatccgaagagtcaaccggatcatggacacagctggcaaacgaggaggacaatccggacgacacaagtagtttcctgcaactaagtgaacgctcgatgagcgagctcgtggaagagaagaagattctgaaaggacaaagcgagtcaactgaggcaccggcttcaggcccacccacggggaccgcttctccccagcgctctttgctcgtgatcaatttcgacctcgaacctgagtgcccagatgccgagctgagggctaccctgcagtggattgctgccagtgaattaggaataccaaccatctactttaagaagtctcaggaaaatcgaattgagaagttcctagacgtcgtccagcttgtgcataggaaatcgtggaaggttggcgacattttccatgccgtcgtgcaatattgcaagatgcacgaggagcagaaagatgggagactgtctttattcgattggctgttagagctaggcta

SEQ ID NO: 242283 - DNA, 5102 bp, synthetic construct
  misc_feature 1..5102: note = Description of Artificial Sequence: Synthetic coding sequence
  source 1..5102: mol_type = other DNA
atggacggcaactcactcctgagcgtaccttccaatctggagagttccagaatgtacgacgtgctcgagcctcaacagggcaggggatgtgggtccagtgggagtggccctgggaatagcatcacagcctgcaagaaggtactgaggtcaaattccttactggaatcaacagattattggctgcagaaccagaggatgccatgccagattggtttcgtcgaggataagtccgaaaactgcgcttcagtctgtttcgtgaatctggatgtgaacaaagacgaatgctccactgagcatctgcaacagaaactggtcaacgtgtctccggacctgcccaagttgatcagtagtatgaacgtgcagcagcccaaagaaaatgagatcgtcgtactgagcgggctggctagtggtaacctgcaggcagactttgaagtgagccagtgtccctggttgccagatatatgtttggtgcaatgcgccagagggaatcggcctaactccactaactgtattatcttcgagatcaataagttcctgattggcctggagttagtacaggaacggcaactgcatcttgagacaaacatacttaagcttgaggatgatacaaactgctccctgtcaagcatcgaggaagattttctgaccgcatctgaacatcttgaggaagaatcggaagtcgatgagagtaggaacgactacgaaaacatcaacgtcagcgccaatgtactggagtccaagcagctgaagggggcaactcaagtcgaatggaattgtaataaagaaaaatggctgtacgcactcgaggataagtacataaataaatatcctacgccacttatcaagacagagcgctccccagagaatctcacaaagaataccgccctgcagagcttggacccttctgccaaaccttcccaatggaaaagagaggctgttgggaacggaagacaggcgacacattactatcattctgaggcattcaagggacaaatggagaaatctcaggctttgtacattccgaaagacgcctacttttctatgatggacaaagatgtgccatccgcatgcgctgtcgctgagcaaaggtctaatttgaatccaggagatcatgaggacaccagaaacgccctgccaccacgccaagatggcgaggttaccactggcaagtacgccacgaacctggcagagtctgttctgcaggacgctttcattagactctcccagagccagtcaacactcccacaggaaagtgccgtgagtgttagcgtgggcagttccttgctccccagctgctactcaaccaaggatactgtggtcagtagatcctggaacgagttacccaagattgtcgttgttcaatctcctgatgggagcgatgcggctcctcagcccggaatttccagttggcctgaaatggaggttagcgtagaaacgtcctcaattttgtcaggcgaaaactcctcccggcaaccccagtcagctctggaggtagcacttgcctgcgcagcgacagtgattgggacgattagctcgccgcaggcaacagaacggttaaagatggagcaggtggtcagcaatttccccccagggagtagtggcgcactccagacccaagcaccgcaaggactgaaggagccaagtattaacgagtattcgtttcctagcgccttatgcggaatgacccaggtggcctccgctgtggctgtctgcgggctgggcgagcgagaagaagtgacttgctcagtggctcccagcggctccctcccaccagcagccgaggctagtgaagcgatgcctccgctctgcggactggcctccatggaattgggcaaggaggcgattgcaaaaggacttctgaaggaggctgctctggtgctgacgcggcctaacacttacagttctatcggagattttctagactctatgaacagaaggatcatggagactgcttccaagtcacagacactgtgttcggagaatgtcgtccgcaatgagctcgcacatactctaagtaatgttatattgaggcattctatagatgaggtgcaccacaagaatatgataatcgaccccaatgataatcggcatagttccgaaatactggataccttaatggagtccaccaatcagttattactggacgttatctgcttcacgttcaagaagatgagtcacattgtccgcctaggggagtgtcccgcagtgctttccaaggaaaccataagacgacgggaaacagaaccgtcatgtcaaccgagcgatcctggggcatcccaggcgtggactaaagctacagaatctagtagctcctctccactgtccaactctcataacaccagcctcgtcatcaataaccttgtcgacggcatgtactcaaagcaggataaggggggagtgcgccctggcctgttcaagaaccctactctgcagagtcagctcagtcggtcccatagagtgcctgactcctcaacagccaccaccagttcaaaggaaatctacctgaaaggcatcgcaggggaggatacgaaaagcccccaccactcagaaaacgagtgtagagccagcagcgaaggacaaagaagtccaaccgtctcccagtcccggagcggttcccaggaggcagaagaatcgatccaccccaatacccaagagaaatataactgcgcaacttctcgaattaacgaagttcaggtgaacctgtcgcttttgggtgacgacctgctgctcccagcacagtccacccttcaaacgaaacatccggacatatattgcattacagacttcgccgaagaattagcggataccgtcgtgtcgatggctactgagatcgcggctatctgtctggataactcttctggaaaacagccctggttttgtgcgtggaagagagggtccgagttccttatgacacctaatgtgccctgcagaagcctcaaaagaaagaaagagtctcaaggtagtggcacggccgtgcggaagcacaagccacctcgcctatctgaaatcaagcggaagactgacgagcaccccgaactgaaggaaaaacttatgaacagagtggtggacgagtccatgaacttggaagacgtgcccgactcagtcaatctttttgccaacgaggtagcagccaagattatgaatctgactgagttctcaatggtggacggcatgtggcaggcccagggatatccaaggaataggctcctgtcaggagataggtggtccaggttgaaggcatcctcatgcgaatccatacccgaggaggattccgaagcccgtgcctatgtcaattccctcggccttatgtctacactcagtcagcctgtatcaagggcatcaagtgtttctaagcaatcgagttgtgaatccattacagacgagttcagccgttttatggtaaatcaaatggaaaacgagggtcgaggattcgaactgcttttggattattatgcagggaagaacgcatcaagcatcctgaactcagctatgcagcaagcatgccggaagtcagatcacctttctgtccgccctagttgtccttccaagcagagtagtactgagtctataactgaggaattctaccgctacatgctcagggatattgagagagacagtcgtgagagtgccagcagcagacgctcctcacaagactggacggcgggtctgctgtcaccttcactcagaagtcccgtttgtcataggcagtccagcatgccagattcccgatctccgtgtagccgactaacagtgaatgtacccatcaaggctaactcactggacggctttgcacaaaactgcccgcaggactttttgagtgtgcaacccgtgtcaagtgcgtcaagcagcggactgtgcaaatctgatagctgcctgtacagacgtggaggtaccgatcatataactaacatgttaatccacgagacctgggctagttccatcgaggctctgatgaggaagaataagataatcgtagatgatgctgaggaggctgataccgagcccgtgagcggcggaagcccttctcaagccgagaagtgtgcaaatcggctggctgcttctagaatgtgttccggccctacattactggttcaggaatcccttgactgtcctagaaaagatagcgtgacagagtgcaagcagccccctgtgtcttcactcagtaaaactgcgtcgctgactaatcacagccccttggactcgaaaaaggagacaagctcatgtcaggatcctgtgcctataaatcataagcgtagatctctgtgcagcagagaggtcccactgatccagatcgaaacagatcagagagaagcatgcgctggcgagcccgaaccctttctgtctaaatcttctttactggaggaagccgaaggtcactctaatgacaaaaacatccccgacgtggtcagagggggagatactgctgtgtcagcatgtcagatccattcggacagcctggacacgagagacgtgccagaggcagaggcatcaacagaagctagggccccagacgaagctccgaacccgccttctagtagcgaagagagcaccgggtcatggacccaattggccaatgaggaagacaaccccgacgacaccagctctttcctccagctgtctgaacggagcatgtcaaacggtaactcaagcgcaacgagctcactggggattatggacctggacatataccaggagtctatgcccagctccccaatgatcaatgagctcgtcgaagaaaaaaagatactaaaagggcagtctgaatctacggaggcccctgcctctggacccccaaccgggactgctagtccccagagaagtctgctcgttattaacttcgacctagaaccagaatgtccagacgccgagctgcgcgctacgctacagtggattgctgcttcggagctgggaattcccactatatattttaagaaaagccaggaaaatcggatcgaaaaatttttggatgtagttcagttggtccataggaaatcatggaaggtgggcgatattttccatgccgtggttcagtactgtaagatgcacgaggaacagaaagatgggagactgtccctattcgactggttgttggaacttggcta

SEQ ID NO: 242284 - DNA, 789 bp, synthetic construct
  misc_feature 1..789: note = Description of Artificial Sequence: Synthetic coding sequence
  source 1..789: mol_type = other DNA
atgctcgcgctggaggcggctcagctggatggaccccatttctcttgcctataccctgacggagtcttctatgatctggatagttgtaagcattcaagttaccccgattcagagggggctcctgattctttgtgggactggaccgtggctcctccggtcccagctaccccctatgaagccttcgatcctgccgcagccgctttttcccatcctcaagctgctcagctctgctacgagccacccacatactcgcctgctggaaatctggaactcgcaccatctctcgaggcacctggccctggtctcccagcatacccgacagagaattttgctagccagaccctggtgccaccagcttacgccccatacccttcccccgtgctttccgaagaggaagacctcccactggatagtcccgctctggaagtctctgacagcgaatccgatgaggccttggtcgccggacccgaagggaaaggatctgaggctggcacacgcaagaaactccggttataccaatttctgctgggcctgctcactcgcggagatatgcgcgaatgcgtttggtgggtggaacccggtgcgggagttttccagttcagcagtaagcacaaggagctgctcgcaaggagatggggtcagcaaaaggggaacaggaaacggatgacttatcagaagctggccagggctcttcggaattacgctaagacaggggaaatacgcaaagttaagagaaaactcacgtatcagttcgattctgccttacttcctgctgtgcgcagggcttag

SEQ ID NO: 242285 - DNA, 516 bp, synthetic construct
  misc_feature 1..516: note = Description of Artificial Sequence: Synthetic coding sequence
  source 1..516: mol_type = other DNA
atggcctcatccatgacttggaccgctgcctcaatacccgcaactctgattcagcggggactgcttaccctcgtccctcctgcatacgctccctacccttccccagtattgtccgaggaggaggacttgccccttgattcccctgccctggaggtatctgactccgagagcgacgaagccctggtggccggtcccgaaggcaaaggatccgaggctggaacccgcaaaaaacttcgcttatatcagtttctcctaggattgctcactcgcggagacatgcgcgagtgcgtgtggtgggtggaacccggagctggcgtgtttcagttctcttctaagcacaaggagttgttagccagacggtggggtcagcagaagggaaacagaaaaaggatgacgtaccagaaactggccagagctcttagaaactacgcgaagactggtgaaattcggaaggtgaaacgaaagttgacttatcagttcgattcggcacttctgccagccgtcaggagggcatag

SEQ ID NO: 242286 - DNA, 747 bp, synthetic construct
  misc_feature 1..747: note = Description of Artificial Sequence: Synthetic coding sequence
  source 1..747: mol_type = other DNA
atgacttgcgttgaacaagacaagctgggccaggctttcgaggatgccttcgaggtgctgagacagcattccacaggggacctgcaatattctcctgattacaggaactacctggccctgattaaccacaggccccatgttaagggcaattctagttgctacggtgtgctgcctacagaagagccagtgtacaactggaggaccgtgatcaatagcgctgccgatttctatttcgaggggaatatccatcagtcactacaaaacattaccgagaatcaactggtgcagcccactctgctgcaacagaaaggcggaaaaggcagaaagaaactgagactgttcgagtacctacatgaatcattatacaaccctgagatggctagctgcatccagtgggtggacaaaacgaagggcatattccagttcgtctcgaaaaataaggaaaaactggcagaactctggggcaaacgtaaagggaaccgcaagaccatgacctatcagaaaatggctcgcgctctacgaaattatgggaggagtggcgaaataactaaaataaggagaaaattgacctatcaatttagcgaagccatcctccaaagattgtctccttcctacttcttaggaaaggaaatcttctactcgcagtgcgtacaacccgatcaggagtatctgagtctgaataactggaatgctaattacaattatacttacgcgaactaccacgagctcaatcatcacgactgctag

SEQ ID NO: 242287 - DNA, 747 bp, synthetic construct
  misc_feature 1..747: note = Description of Artificial Sequence: Synthetic coding sequence
  source 1..747: mol_type = other DNA
atgacatgcgtagagcaggacaagctcggtcaggcattcgaagacgcattcgaagtcctccgtcagcacagcacgggcgacctccaatatagtcccgattaccggaattacctggctttgattaaccacagacctcacgtcaagggcaattcatcatgttatggggtgctgcctaccgaagaaccagtctataattggcgaacagtgatcaactccgccgcagacttctattttgagggcaacattcatcagagtctccagaacattaccgaaaaccagctggtgcagcccacccttctccagcagaagggcggaaaggggaggaagaaactgaggctctttgaatacttgcatgaaagcctgtacaaccctgagatggctagttgtatacagtgggtagataaaacaaaaggcatcttccagtttgtgagtaaaaataaagagaaactggccgagctttgggggaaaagaaaaggaaaccgaaaaactatgacctaccagaaaatggctagggcgctgaggaattacggcagatcaggagaaattacaaagatccgcagaaagttgacatatcagttcagcgaggccattctgcaaagactgtctcccagttattttttgggaaaggagattttttactcacagtgtgtgcagccagaccaggagtacctgtctctgaataactggaatgccaactacaactatacctatgctaattaccacgaattgaatcaccatgactgctag

SEQ ID NO: 242288 - DNA, 2568 bp, synthetic construct
  misc_feature 1..2568: note = Description of Artificial Sequence: Synthetic coding sequence
  source 1..2568: mol_type = other DNA
atgtccttcgttagagttaatagatgtggcccaagggtgggagtgagaaagacacccaaagtgaaaaagaagaagactagcgtcaaacaagaatgggacaacaccgtgacggacctcactgtccacagggccacgccagaagacctcgtgcgcaggcacgagatacacaagtccaagaatagagctctggtccattgggagctgcaagagaaagcacttaaaaggaagtggaggaaacagaagcctgaaacgttgaacttagaaaaacgtaggctcagcatcatgaaggagattctctcggaccagtatcagatgcaggacgtgctggagaaatctgaccacctgatcgccgcagctaaggaactctttccaaggcgcaggactggtttcccaaatgttactgtggcacctgacagctcccaggggcctattgtcgttaatcaggaccctatcactcagagtatcttcaacgaatccgttattgaaccacaagccctcaatgatgtagacggtgaggaagagggcaccgtgaatagccaatccggggagtcggagaatgagaatgagcttgataactctctcaacagccaatctaatactaacaccgatcgatttctccagcaactgaccgaggagaacttcgagcttatatcaaaattgtggactgacatccagcagaaaatcgctacccagagccagatcactccaccaggaacgccatcctctgccctgagctcgggggagcaacgcgcagctctgaatgccacgaatgctgttaagaggttacaaactcgcctccaacccgaagaatcaacagaaacgctggacagttcttatgtggtgggtcacgtgctaaactctcgaaagcagaagcaacttcttaacaaagtgaaacggaaaccaaatcttcacgccctttccaagcccaaaaaaaacatctcatctggttccactacatctgcagaccttcctaaccgcactaacagcaacctggatgtactgaagcacatgatccacgaagtggagcatgagatggaagagtatgagagatggactggtcgcgaagtgaaaggcttgcaatctagccaaggcctgacggggttcactctctcactcgtcagctccctctgcaggctggttagatatcttaaggagtcagagattcagttaagaaaggaggtggagactagacagcagcttgaacaggttttgggtgaccaccgagagctgattgacgccctgaccgcagaaatcttaaggctcagagaggaaaatgccgcaacccaagcacgactgcagcagtatatggtaacgaccgatgagcagctgattagcttaactcacgcgatcaaaaattgccctgtgatcaataatagacaggagattcaggcaagcgaatccggggcaactgggagacgcgtgatggactctccagagcgccctgtcgtaaacgccaatgttagcgtgccattgatgttccgagaggaagttgctgagttcccacaagaggaactgccggtcaaactgtctcaggtgccagatccaccggataacatgaatctggctaagaactttcctgcacacatcttcgagccggcagtgttactcactcccccaagacagaagtctaatctgaagttttctccgcttcaagacgttctgagacgtacagtgcagaccagacccgctccaaggctcccaccaaccgtggagataatcgagaaggagcagaactgggaggagaaaactctgcctatcgatacagacatccagaacagctccgaagagaatagattgttcacccagcgatggcgcgtgtcgcacatgggcgaggatcttgaaaataagacgcaggcacccttcgtgaacctgagccagcccttgtgtaattctcacagtaacactcagcagagcagatctcccaccttctcagaagagttgcccgtgctgggcgatggccaacagctgcgcaccaacgagtcccttatccagagaaaagacatcatgacacgcatcgctgacttaaccctccagaatagcgccattaaagctcacatgaacaacattatcgagcccagaggtgagcagggagacggtttacgggagctgaacaagcaggaaagtgcatccgacatgacctctacctttcctgtggcacagtctcttacgcccggaagcatggaagaacgtatcgctgagctgaataggcagtccatggaagccaggggtaaactgttacagctgatcgagcaacaaaagctggtggggctcaacctgtctcccccaatgagtcctgtccagctcccattaagggcgtggactgagggggcaaaaaggacaatcgaggtgtccattccaggagcagaggccccagaatccagtaaatgttcaacagtgagcccagtgagtgggatcaacacccgccgtagtagtggagcaacaggtaacagctgctctccactcaacgccacatccggaagcggcaggttcactccgcttaatccacgagcaaagattgaaaaacagaatgaggagggctggttcgctctgtctacacatgttagttag

SEQ ID NO: 242289 - DNA, 483 bp, synthetic construct
  misc_feature 1..483: note = Description of Artificial Sequence: Synthetic coding sequence
  source 1..483: mol_type = other DNA
atgtcttttgtaagagtcaaccgatgcggacctcgggtgggcgtacgcaagactccgaaagtcaaaaagaagaagaccagcgttaagcaggaatgggataacactgtgacagatctgaccgttcatcgggcaacacctgaggatctcgtgcggaggcatgagattcacaagtccaagaaccgggctcttgtgcactgggagctgcaggaaaaagcccttaagcggaaatggagaaagcagaaaccggaaacgttaaacttggagaagaggaggctgagcataatgaaagagatactcagtgaccagtatcagatgcaggatgtgctggagaagtctgaccatctcatagctgctgcaaaagaactgttccccaggaggcggaccgggttccctaatgtcacagtcgcacccgactccagtcagggccctatcgtggtcaaccaggaccccatcacacagagcatctttaatgaatcagtttag

SEQ ID NO: 242290 - DNA, 522 bp, synthetic construct
  misc_feature 1..522: note = Description of Artificial Sequence: Synthetic coding sequence
  source 1..522: mol_type = other DNA
atgtctttcgtgcgagttaatcggtgcggcccacgcgtgggcgtccgcaaaacacccaaggtgaaaaaaaaaaaaacttcggtcaaacaggagtgggacaatactgttacagatttgacagtacaccgagcaacccccgaagatttggtcaggagacacgaaattcacaaaagtaagaaccgcgcactggtgcattgggagttacaggaaaaagccctgaagaggaagtggaggaagcagaagcccgaaaccctgaatcttgagaagcgcagactgtctattatgaaagagattctgagtgaccagtatcagatgcaggatgtgcttgagaaatctgatcacctgattgcagctgcaaaggagctgttccccagaaggagaacggggtttccaaatgtgactgtcgccccagattctagccagggccctatcgtcgttaatcaagacccaatcacacagagtattttcaacgagtccgttattgagccccaggctctcaacgacgtcgacggcgaggagtag

SEQ ID NO: 242291 - DNA, 60 bp, synthetic construct
  misc_feature 1..60: note = Description of Artificial Sequence: Synthetic coding sequence
  source 1..60: mol_type = other DNA
atgagtttcgttcgcgtcaataggtgtggtcctagggtaggggtgcgcaagaccccttag

SEQ ID NO: 242292 - DNA, 789 bp, synthetic construct
  misc_feature 1..789: note = Description of Artificial Sequence: Synthetic coding sequence
  source 1..789: mol_type = other DNA
atgaagaccccatttggaaaaacccccggtcagagatcgcgcgcagatgcgggtcacgccggtgtgtccgcgaacatgatgaagaagagaacatcccacaaaaagcacaggagcagtgtgggccctagcaagcctgtatctcagccgaggaggaacatcgtggggtgtcggatccagcatgggtggaaggagggaaatgggccagtcacccaatggaagggcacagtgctggaccaggtccctgttaacccttccctctatctcattaagtacgatggcttcgattgcgtttacggcctggaactgaataaggatgaacgagtgtccgcactggaggttcttccagacagggtcgccacaagtcgtatatccgacgcccacttggccgatactatgataggcaaggcagtcgaacacatgtttgaaactgaggacgggagtaaagatgaatggcgcggaatggtgctggccagggcaccagtcatgaatacatggttttacattacttatgaaaaagaccccgttctatatatgtaccagctcctggatgactacaaagagggcgatctcaggataatgccagatagcaacgattcgccccctgccgagcgggagccaggcgaggtggtcgattcactggtggggaagcaggtggaatacgctaaggaggacggaagtaaacggacagggatggtgattcaccaggtcgaggcaaagcctagcgtgtacttcataaaattcgatgatgacttccatatttatgtatacgatctcgtgaaaacatcgtag

SEQ ID NO: 242293 - DNA, 789 bp, synthetic construct
  misc_feature 1..789: note = Description of Artificial Sequence: Synthetic coding sequence
  source 1..789: mol_type = other DNA
atgaaaacccctttcggtaagacacccggacagaggagtcgggcagacgccggtcacgctggggtcagtgctaacatgatgaaaaagcggacatctcataaaaagcaccgcagttcagtcggcccttcaaaaccggtgtcacagccccgacgtaacattgtggggtgcagaattcagcatggctggaaagagggtaacggcccagtgacacaatggaaaggtacagtgctggatcaggtgcctgtgaatccatctttgtatctcattaaatatgacggctttgactgtgtgtatggtctggaactgaacaaagacgagcgggtaagcgcccttgaggtgctcccagatcgtgtggctaccagtagaatctcagacgctcacctggccgatactatgattggaaaggcggtagaacatatgtttgagactgaggacgggtcgaaggacgagtggcgtggaatggtgctagcacgcgcacccgtgatgaacacttggttttacatcacgtacgagaaggaccctgtcttatacatgtaccagctgctcgatgattataaggagggagacctgcgcattatgccagatagcaatgattcccctccagctgagcgcgagcctggggaagttgtcgactcgcttgtcggcaagcaggtcgagtacgccaaggaggatggctctaaacggacaggtatggtcattcaccaggtagaggccaaaccttccgtctactttatcaaattcgatgacgactttcatatttatgtgtacgaccttgtgaaaactagctag

SEQ ID NO: 242294 - DNA, 1587 bp, synthetic construct
  misc_feature 1..1587: note = Description of Artificial Sequence: Synthetic coding sequence
  source 1..1587: mol_type = other DNA
atggccggtagcgacacagcccctttcctgagtcaggctgatgatccagatgacggacccgtgccgggaacacccggtcttccgggttcgacgggaaaccccaagtctgaggaacccgaagtccccgaccaagaagggctgcaacgcatcactgggttgtcccccggaagatccgccctaatcgtggcagtcctgtgttatattaacctcttgaactacatggatagattcactgtggctggcgtgttgcccgacatcgaacaattctttaacatcggtgattcgtcctccggtctgatacagaccgtatttatctcgagttacatggtgctggcccctgtgtttggctatctcggcgaccgttataatcgcaagtacttaatgtgtggtggcattgccttctggtctttggttacactcgggtcttcatttattccaggagaacacttctggctgctgctgctgactagggggctcgtcggggtaggcgaagcgagctacagcaccatcgcacctacactgatagccgatctcttcgtggcagaccagaggtcccgcatgctgtcgatattctattttgcaatccctgttggaagcggcctgggatacattgctgggtccaaagtaaaagacatggctggtgactggcactgggcccttcgtgtgacacctggcttgggagtagtcgctgttctgctactgttcctcgtcgtgagagagccgccaagaggcgctgtcgagcgacactccgatttacccccattgaatccaaccagttggtgggcagaccttagggcactggctaggaatccatcatttgtgctgtctagtctcggtttcaccgccgtggcctttgtcacgggctcactggccctgtgggctccggcatttttattaaggtcgagagtggtgctcggggagaccccaccttgtctcccaggcgattcttgtagcagctctgattccctaatcttcggcctcataacgtgtcttaccggagtcctcggggtggggctgggcgtggaaattagccgcaggctgcgacatagcaatccaagagccgatccgcttgtgtgtgcgactgggcttttgggctcagcaccgttcctcttcttgtctctcgcttgcgccaggggtagtatcgtggctacatacattttcattttcatcggcgaaacccttctgtcaatgaattgggcaatcgtggccgacattctcctgtacgtggtcatccccaccaggaggtctaccgcagaagcctttcagatcgttttgtcccaccttctgggggacgccggatcaccctacttaatcggcctgatttccgacaggctccggcgaaactggccaccttcattcctcagcgagtttcgagccttacagttttctctcatgctttgtgccttcgtgggggctcttgggggtgcagctttcttgggcacagccatctttatagaggctgatagacgcagagcgcagcttcatgtccaaggtttgctgcacgaagctggatcaacagacgaccggattgtcgttccgcagcggggtagaagcacgagagtaccggtggctagcgtgcttatttag

SEQ ID NO: 242295 - DNA, 1368 bp, synthetic construct
  misc_feature 1..1368: note = Description of Artificial Sequence: Synthetic coding sequence
  source 1..1368: mol_type = other DNA
atggacagatttaccgtcgcgggtgttcttcctgacatcgagcagttcttcaatatcggcgattcaagcagcggtctgattcagacagtctttatatcttcttacatggtgctggcgccagtgttcgggtacctcggtgaccgctataacaggaagtatctgatgtgcggcggaattgccttttggtccctggttacgctgggcagctcttttataccgggagagcacttctggctcctactgctgacacggggactggtcggggttggtgaagcctcttactcgaccattgccccaacattaatagctgacctgtttgtggccgaccagagatcccggatgctgtcaatcttttatttcgctattcctgtgggctctggtctgggctacatcgcaggttctaaagttaaagacatggctggcgactggcactgggctctccgggtcacgccaggactgggagtcgttgcggtcctgctgttatttcttgttgttagagaaccccctagaggggctgtggagcgtcattcagacctgcccccactcaatcccaccagttggtgggccgacctcagggccctagctcgtaatccttcctttgttttgtcgagtctgggcttcaccgccgtggctttcgtgacgggcagtctggctttgtgggcacctgctttcctcctgagaagccgagtggtgctcggtgaaacgccgccatgcttaccgggagatagctgtagttcttccgactctcttatttttggtttaatcacatgcctgacaggagttctcggggtgggcctgggggtggaaatatcgagacgcctaagacatagcaacccacgagccgatccgctcgtgtgcgctacaggactgctcggctcggctccattcctctttttaagcctggcttgtgcacgaggttctatagtggccacatatattttcattttcattggggagactctgctgagcatgaactgggccattgtggcagatattttactctatgtcgtcattcctactagacgtagcacagccgaggcctttcagattgtgctttctcacttgctaggagacgcaggatccccgtatttgatcggtctgatttcagatagactcagacgcaactggcccccttcattcctttctgagttccgtgctcttcagttctcactgatgctgtgcgcgttcgtgggggctctcggaggcgcagcctttttgggtacggccatcttcatcgaggccgacagacggagagcacagcttcacgtgcaaggcctgctgcatgaagcaggctccacggacgaccggatcgtggtcccccagagggggagatccactagagtgcctgtggctagtgtacttatctag

SEQ ID NO: 242296 - DNA, 1431 bp, synthetic construct
  misc_feature 1..1431: note = Description of Artificial Sequence: Synthetic coding sequence
  source 1..1431: mol_type = other DNA
atggctggaagcgacacagctcccttcttatctcaggccgacgacccagacgacggtcccgtgcccggaacccccggactaccaggaagcaccgggaatccaaagagtgaggaacccgaagtaccggaccaggaaggactgcagcggatcaccggactctctcccggaagaagcgctctcatcgttgcggtgctgtgctacataaatctccttaattacatggatcgcttcaccgtcgctggcgttctccccgacatcgagcaattcttcaatatcggggattcctcatctggactcattcaaacggtttttatttcatcatatatggttttggcccctgtctttggctatctgggcgataggtacaatcggaagtatttaatgtgcggtgggattgctttctggtccctagtcactctcgggtctagcttcattccgggagaacatttttggctcctgttacttacacgcggactcgtcggtgtgggggaggcgtcttattctacaatcgccccaacactgatagctgaccttttcgttgccgaccaacgatcccgcatgttgtcaatcttctatttcgcaatccctgtgggctctgggctgggctatattgctggatccaaagtgaaggatatggcaggcgattggcactgggcattgcgagtgacgccaggtctcggagtcgtcgccgtcctgctcctgttcttagtggttcgagagccccctcggggtgcggtggagcggcactcagatctgcccccactgaatcccacctcatggtgggcggatcttcgggctttggcacgtaacctaatttttggactgatcacatgtctgaccggggttcttggcgtgggtctgggtgtggaaatatctcgccgactacggcactcgaaccccagggctgaccccctcgtgtgtgctactggtctccttggcagtgctccttttctgtttttatctttggcctgcgctcggggatctatcgtggccacatatatctttatcttcataggtgagaccttgctgtccatgaattgggccattgtggctgatatactactatacgtggtcattcccacgcgcagaagcactgccgaggcttttcagattgtcctctcacatctcctgggcgatgccggatcaccttatcttatcgggctcatcagtgatcgactgcgcaggaactggcctccaagcttccttagcgagttccgtgctcttcagttctccctgatgctttgcgcgttcgtcggtgctcttggcggtgcggcattcttgggcactgcaatcttcattgaagccgaccggcgacgcgctcaactacacgtgcagggcctgctgcacgaagctgggtctactgacgaccggattgtcgttccacagcgtggaaggtcgacacgcgtccccgtggcatccgtgctgatctag

SEQ ID NO: 242297 - DNA, 1365 bp, synthetic construct
  misc_feature 1..1365: note = Description of Artificial Sequence: Synthetic coding sequence
  source 1..1365: mol_type = other DNA
atggctggatcagacacggcgcctttccttagccaggctgacgatccagacgacggcccagtccccggaacacccggtctgcccggttcaaccggtaaccccaaaagcgaagaacccgaggtgcctgatcaggagggcctgcagcgtattacgggattgtcacctggtagaagtgccctcattgtcgccgtcctctgctacattaacctcttgaactacatggacaggttcactgtcgcagtcttcatcagttcctatatggtgctcgcccctgttttcggctacttaggggatcgttacaatcgcaaatacctgatgtgcggagggatcgctttttggtccctcgtgacactgggctcgtcctttatcccaggagagcacttctggctcctcttgttaactcgtggtcttgtgggcgtgggagaagccagctactcaaccatagctccaacgctgatcgctgatctgtttgtcgcagaccaaagatcccgtatgctttctatcttttacttcgcaatacccgttgggtcagggctcggatatatagccggatcaaaagtaaaggacatggccggagactggcattgggccctccgagtcacccctggccttggggttgtggcagtcttactcctctttcttgtggtacgagaaccgccaaggggagctgtggagagacacagcgacttaccacctctaaacccaacctcatggtgggccgacctgcgagctctggcgaggaatttgattttcggccttattacatgtctgacaggggtcctcggagtggggttgggggtcgagataagtaggagactgcggcacagcaaccccagggctgaccctttggtttgcgctactggcctcttggggtctgccccattcctgttcctttcgctggcatgtgctcgcggaagcattgtggcaacatacatattcatcttcataggagagacactcctgtccatgaactgggctattgttgctgatatactgctgtacgtcgtgattccaactcgtagatccacggccgaggcctttcagatcgtgctgagccatctgctgggagatgctggctcaccctaccttattgggttgattagcgatcgcctgcgcagaaattggccacccagcttcttgagtgagtttcgggcattacagtttagcctcatgctgtgtgccttcgtgggggcactcggcggagccgcattcttgggcacagccatcttcattgaggctgaccggcgtcgcgcacagctccatgtgcaggggctcctgcacgaggccggatctactgatgatcggattgtcgtgccacaaaggggccgaagtactcgcgtgccagtggcctctgttctaatctag

SEQ ID NO: 242298 - DNA, 1650 bp, synthetic construct
  misc_feature 1..1650: note = Description of Artificial Sequence: Synthetic coding sequence
  source 1..1650: mol_type = other DNA
atgatgtgcctggaatgtgcatcggcagccgcaggcggagccgaagaagaagaggcagatgctgagagacggcgacgtcgacgtggagctcagaggggagccggaggctctggctgctgtggagcccgaggcgctggaggggctggagtgagcgccgcaggcgacgaagtgcagactctgtctggatcagtaaggcgcgcaccaaccgggccaccagggacacccggaactcctgggtgcgcagccaccgctaagggccctggggcacaacagccaaaacccgcttccctgggcaggggacggggagctgccgctgccatattgtccctaggcaacgtattaaactacttagacaggtatacggtggccggagtgctgctcgatatccagcaacattttggagttaaggataggggggctgggcttctgcagagcgtctttatctgctcatttatggtggctgccccaatatttggctacctgggcgatagatttaacaggaaggtgattctgtcttgcggcattttcttttggtcagcggttacattcagcagctctttcatcccccaacagtacttttggctgctagtgttgtcccggggacttgtgggcatcggggaggcctcttattccacgattgccccaacgatcatcggagacctctttaccaagaatacccggactctcatgctgagcgtgttctattttgccatccccctcggcagcgggctgggctacatcacgggatctagcgtgaaacaagctgccggagattggcactgggcgctgagagtgtctcctgtcctgggcatgatcactggcactctcatcctgattctcgtgcccgctacaaagagggggcatgcagatcagttaggcgatcagctgaaggctcgtactagctggctgcgtgacatgaaggcactgatccgcaatagaagttacgtgttctcatcgttggctacttcagccgtctcatttgcaactggtgcccttggcatgtggattcctctctacttacatcgagcccaagtcgtgcagaagaccgccgaaacgtgcaactccccaccatgtggggcaaaggacagccttatttttggagccattacctgctttaccggcttcctcggcgtagtgaccggggctggggctaccaggtggtgccgcttgaaaacccagcgcgctgatcctctcgtttgtgctgtgggcatgctgggctctgccatctttatatgcttaatctttgtggctgctaagtctagtatcgtgggcgcatatatctgcatattcgtgggagaaacgctgctgttcagtaattgggcgatcacagctgacatcttgatgtacgtcgtgatccccacgagacgcgctaccgctgtggcgttgcaatccttcactagtcatcttctgggtgacgccggttctccctacctcatcggattcatttccgacctgattcgccagtctactaaagactcccccctttgggaattcttatcactgggctacgccctgatgctctgcccttttgtcgtggtacttggcggtatgttctttcttgccactgccttatttttcgtgtctgatcgagccagggccgagcaacaagtgaaccagctcgcaatgccaccagcctccgtgaaagtttag

SEQ ID NO: 242299 - DNA, 1158 bp, synthetic construct
  misc_feature 1..1158: note = Description of Artificial Sequence: Synthetic coding sequence
  source 1..1158: mol_type = other DNA
atgctggtgtgtttccgcctttactcttggcttttttttttgtcccggggaattgtcggcacaggtagtgcatcttattcaactattgcacccacagtattaggtgatctgtttgtcagggaccagagaacaagagtcctggccgtgttctacatcttcattcccgtaggatccgggttaggctatgtgttggggtctgcagtaaccatgctgactggaaactggcggtgggctttaagggtcatgccatgccttgaggcagtagctctaatcttgctgatactgctggtgcccgatcctcctaggggcgctgccgaaactcagggggagggagcggtaggaggattccgttcaagctggtgtgaagatgtgaggtatttgggaaaaaactggagcttcgtttggtcaaccctaggtgtcactgccatggcctttgtgacaggggctctcggcttttgggcacccaagtttttgttggaagcgagagtcgtccacggtctgcagcccccatgctttcaggagccttgttccaaccccgatagtctcattttcggagctctgaccattatgaccggagtgataggagtgatattaggagcagaggccgcacgacggtataagaaggtcattccgggtgctgagcccctgatctgcgcatcttctcttctggctactgcaccttgcctctacctggcgcttgtgttagcccctactactctcttggcctcatacgtgtttctgggtctcggggagctgttactaagctgtaactgggccgtggtggctgatatcctcctctccgtggtggtgccacggtgccggggaacagccgaggcattacagatcacagtcggtcatattctgggtgatgcaggatcaccgtatctgacaggattaatctcaagtgtcctcagagcacggaggcctgatagctaccttcagagatttagatccctacagcagtcttttctgtgttgcgctttcgtgatagcactcggtggcggttgttttctactaacggctctatacttggaacgcgacgaaactcgagcatggcaacctgtgactggcaccccggacagcaatgatgtggatagtaatgacctggaacggcaggggttgctgagcggtgcaggggcttcaacggaggagccatag

SEQ ID NO: 242300 - DNA, 1539 bp, synthetic construct
  misc_feature 1..1539: note = Description of Artificial Sequence: Synthetic coding sequence
  source 1..1539: mol_type = other DNA
atggcagggggaatgagcgctgagtgccccgaaccaggccctgggggactccagggacagagtcctgggccagggcgtcaatgccctccccctatcacgccaactagctggagtcttccaccctggcgggcatatgtggcagccgcagtcctctgttacattaacctcctgaactacatgaattggtttatcattgcaggagtgctgcttgatatccaagaagtgttccaaatcagcgataatcacgccggactgttacagaccgtgttcgtgtcctgcctgcttctgtccgcgccagtttttggctatttaggtgatagacattccaggaaagccacaatgtccttcggcattctcctctggagtggggctggcctctcctcctcattcatctcccctcggtattcctggctattttttctaagtcgcggaatagtggggactggctcagcatcttattccaccatcgccccaaccgtgctcggggacttgtttgtgcgggaccagcggactagggttcttgcagttttctatattttcatcccagtggggtcaggtctgggctacgtcctgggcagcgccgtgaccatgctcactggcaactggaggtgggccttgcgtgtaatgccctgcctcgaagccgttgctctgatactgctcatcttactggtgcccgatccccctagaggggctgctgagactcagggggaaggtgctgtgggcggatttagatcatcatggtgtgaagacgtgcggtacctgggcaaaaactggtcctttgtatggagtaccctcggggttactgccatggctttcgtgaccggtgccctcgggttttgggccccaaagtttcttctcgaagctcgggttgtgcatggcctgcagcccccttgtttccaggagccctgtagtaaccccgatagtttaatattcggggcactgactattatgaccggagtgattggcgtgatcctcggtgcagaagcagctcgtcgctataaaaaggtgatacctggtgcagagccgctcatctgcgccagttcattactggccaccgccccttgtttgtatctggcactggtgctggctcccacaacacttctggctagttatgtgttcctgggattgggcgagctgctcctgtcatgcaactgggctgttgtagccgacatcctgctgtccgtggtggttcccaggtgcagaggcaccgctgaggcactgcagattacggtggggcatatcctgggcgatgcgggtagtccatatttgactggccttatatcatcagtcctgcgcgcacgacgcccagacagctatctgcagaggttccgctcactacaacaatcctttttgtgctgcgcattcgtgattgcccttggagggggatgttttctcctgaccgcgctctacctggagcgggacgagacgcgagcttggcagcctgtcacagggacccctgacagcaatgacgtggattccaatgatttggagaggcagggcctgctctcaggagcaggagcctccaccgaggaaccttag

SEQ ID NO: 242301 - DNA, 249 bp, synthetic construct
  misc_feature 1..249: note = Description of Artificial Sequence: Synthetic coding sequence
  source 1..249: mol_type = other DNA
atggggcagactgctctagcagggggttcctcaagcacgccaacaccacaggcattatatcccgatctgagctgtccagaggggttggaggagctgctcagcgctccccctccagacctaggagcccagcgcagacatggttggaatccaaaggattgtagcgagaatatcgaagtgaaggagggcggtctctactttgagcgccgtccagtagcacagtccacagatggtgctagaggtaagagatag

SEQ ID NO: 242302 - DNA, 792 bp, synthetic construct
  misc_feature 1..792: note = Description of Artificial Sequence: Synthetic coding sequence
  source 1..792: mol_type = other DNA
atgggtcaaaccgccctggcagggggaagcagctccacaccaacaccacaggccctgtatccagatctatcatgccccgagggtctggaagaactgctctccgcacctcctccagacctcggcgctcagagaaggcatgggtggaacccaaaggattgttccgaaaatatcgaagttaaagagggcggactctacttcgagagaaggccggtagcccagtcaactgacggtgcaaggggtaagagaggctacagcagggggctccacgcctgggagatatcctggccactggagcagcggggaacccacgcagttgtgggggtcgctactgccctggctcctttgcaaactgatcattacgcggctctgctcggatcgaattccgagtcttggggctgggacatcgggcgagggaaactttaccatcagagcaagggccctggggcaccccaatatcctgctggtacccagggtgagcagctggaggtcccagagcggcttctcgtcgtccttgacatggaagaaggaacgctgggctatgcaatcgggggaacttacctcgggccagcgttccgagggctcaaaggcagaacattatatcccgctgttagtgcagtgtggggacagtgtcaggttcgtattagatatctgggtgaaagacgtgccgaacctcacagcctgctgcacctgagccggctgtgtgtcaggcacaacctgggggatacccggctggggcaggtcagcgcgctccccctgcctcccgcaatgaagaggtatctcctgtaccagtag

SEQ ID NO: 242303 - DNA, 792 bp, synthetic construct
  misc_feature 1..792: note = Description of Artificial Sequence: Synthetic coding sequence
  source 1..792: mol_type = other DNA
atgggtcagaccgcactcgccggtgggagcagctctacccccactcctcaggccctgtatcccgacctttcttgtccagaagggctggaggaactgctgagcgcccctccccctgatctgggagcacagcgccgacacggctggaatccaaaagactgttccgaaaatatcgaggtcaaggagggaggcctgtatttcgagaggaggcctgtcgctcagagcaccgacggagccagaggcaaacgcggttacagccgcggtctacacgcctgggagatctcatggccactggagcagaggggcacccacgcagttgtgggcgtggcaactgccctggcgccactccaaaccgaccactacgctgccctattagggtctaacagtgaatcgtggggctgggacattgggcgtgggaaattgtaccaccagagcaagggacccggagcccctcagtatccagctggcacgcagggggaacagctcgaggtcccagagagacttctggtggtgctcgatatggaggagggaacactggggtatgctattggaggaacctatctcggcccagctttccgcggactgaaagggagaactctatacccggcagtgtccgcggtgtggggacagtgccaggtccggatacgctacctcggtgagcgcagggcagagccccactccctgctacacctgtctcggctctgtgtacgccacaacctgggcgacactcggctgggacaggtgagcgctctccctctacccccagctatgaaacggtacctgctctatcagtag

SEQ ID NO: 242304 - DNA, 1068 bp, synthetic construct
  misc_feature 1..1068: note = Description of Artificial Sequence: Synthetic coding sequence
  source 1..1068: mol_type = other DNA
atggccaggcgaccacgaaattcccgggcatggcatttcgttctgagtgcggctaggcgcgatgctgatgctcgggcagtcgccctggccggaagtactaattggggatacgacagtgacggccagcattcagattccgatagtgaccctgagtacagtacactgcctccaagcatccctagtgccgttccagttaccggagagtctttttgtgattgcgcaggtcagagcgaagcttcattttgcagctctcttcactccgctcatcgaggacgagactgtaggtgtggggaagaggatgaatattttgactgggtgtgggacgaccttaataagagcagtgctaccctcttgagttgtgataatcgaaaggtctctttccacatggaatatagctgtggaaccgccgcaatccggggtactaaggaacttggcgaagggcagcacttttgggagattaaaatgaccagcccagtgtacggaactgacatgatggtgggcattgggacttcagacgttgatctcgacaagtaccgccatacattttgttctctgttggggagagatgaagacagttggggtcttagttacaccgggctgcttcatcataagggtgataaaacttccttttcaagccgctttgggcagggtagtatcatcggtgtccacctggacacgtggcacggaactctgacatttttcaagaataggaagtgtattggggtggctgccaccaaactgcagaataagcggttctacccaatggtgtgtagcacagccgcacgcagctctatgaaagtcacaagatcttgcgcctctgccacgtccttacaatacctgtgttgccatcggcttagacagctcaggcccgactctggtgacacccttgaaggattacccttgccccctggacttaagcaggtgctccataataaacttggttgggtcctgtccatgagttgctcgaggagaaaagcacccgtgagcgacccgcaagccgcaacctctgcacacccttcttcccgcgagcctcgcccatgtcagaggaagcgatgccgccgaacctag

SEQ ID NO: 242305 - DNA, 480 bp, synthetic construct
  misc_feature 1..480: note = Description of Artificial Sequence: Synthetic coding sequence
  source 1..480: mol_type = other DNA
atggaatactcatgcggcactgccgctataagggggaccaaggaactgggcgagggccagcacttctgggaaatcaagatgacctccccagtttacggtactctgacgttcttcaagaataggaaatgtattggagtcgccgctacaaaactgcagaacaagagattctaccctatggtgtgctcgacagctgcccgaagctctatgaaagtgactaggtcctgcgccagcgcaaccagtttgcagtatttgtgctgccacaggcttcgccagctgagaccagatagcggagatacactcgagggcctgcccctgccgcctggactcaaacaggtcctgcacaataaattggggtgggtactgtctatgtcctgcagccgtcgcaaggctccagtcagtgacccccaggcagctacttctgcccatcccagctcgcgggagcctcgtccctgtcagaggaaacggtgccggagaacatag

SEQ ID NO: 242306 - DNA, 1068 bp, synthetic construct
  misc_feature 1..1068: note = Description of Artificial Sequence: Synthetic coding sequence
  source 1..1068: mol_type = other DNA
atggcgaggcggcctcgcaacagccgagcctggcactttgtactgagcgccgcaaggagagacgccgacgcacgcgctgtggccctggctggatctactaattggggatacgatagtgatggccaacactcagacagtgactctgatcctgaatattccacccttccgccttcgattcctagcgccgtccccgtgaccggggagagcttttgtgactgtgccggacagtctgaagcatccttctgtagctcactacattctgctcatcgcggtagagactgcagatgcggcgaggaagatgaatatttcgattgggtgtgggatgacctgaataaatcctccgctaccttgctttcttgcgacaatagaaaagtgtctttccatatggagtactcgtgtggtaccgctgctatcagaggcaccaaggagcttggcgagggtcagcacttctgggagatcaaaatgacaagtcccgtgtatggaacagatatgatggtggggattggaacgtctgacgtggatcttgacaagtacaggcatactttctgttcattgctagggcgtgatgaagatagctggggactgagttacacaggcctcctacatcacaaaggtgataaaaccagcttcagcagcagattcgggcaggggagcattatcggcgtccacctggacacttggcacggcacgctaacatttttcaaaaacagaaagtgcattggagtagccgctactaaacttcagaacaagcgcttctaccctatggtttgtagcaccgcagctcggagctccatgaaagtaacccgtagttgcgcgtcagccacaagcttgcagtacttatgctgccatcgcctgcgacagctcagacccgactccggagataccctggaaggcttgccattgccgccaggtctcaaacaggtgttgcataacaagctgggttgggtgttgagtatgtcttgtagtagacgaaaagccccagtgtctgatcctcaggccgctactagcgcacacccttcctcgcgagaaccccgtccatgccagcgcaagcggtgcaggagaacctag

SEQ ID NO: 242307 - DNA, 822 bp, synthetic construct
  misc_feature 1..822: note = Description of Artificial Sequence: Synthetic coding sequence
  source 1..822: mol_type = other DNA
atgggccagaaattgagcgggtcattgaagagcgtggaggtccgagaacccgctttgcggcctgcaaagagagaattgcgcggagcagagccaggcagaccggctcgccttgaccagttactcgacatgcccgctgctggtctggcggtgcagctcagacacgcctggaatcctgaggatagaagcctgaacgtatttgtcaaggatgatgacaggctgacattccatagacaccccgtggcacagagtaccgacggcatacgcggtaaggttgggcacgcgaggggcctccatgcctggcagattaactggcccgctcggcagcgcggtacgcatgccgttgtgggggtggcgacagccagggcaccactccatagcgtcggctatacagcgctggttgggtctgacgctgagtcctgggggtgggatctcggtcgatctaggctctaccatgacgggaagaaccagcctggcgtcgcttatccggcttttctgggtccagacgaagctttcgccctccctgatagcctgcttgtcgttctggacatggatgaggggaccctttcttttatcgttgacggccagtacctcggagttgcattccggggtttgaaaggtaagaagctgtatccggtggtgagtgccgtgtgggggcactgcgaggtgacgatgagatacattaacgggcttgatcccgaaccactccctctgatggatctgtgtaggagatcaatccgaagcgccctgggaaggcagaggctccaggatattagcagtctacctctgccccaatctttgaagaattaccttcagtatcaatag

SEQ ID NO: 242308 - DNA, 1908 bp, synthetic construct
  misc_feature 1..1908: note = Description of Artificial Sequence: Synthetic coding sequence
  source 1..1908: mol_type = other DNA
atggcctcctcaggaatggccgacagcgcaaatcacctgccatttttcttcggtaacatcactagagaggaggcggaggactatctcgtgcaagggggaatgtccgacgggctctacctgctgagacagtctagaaattatctgggaggtttcgcccttagcgtggcccatggacgtaaagcccaccactatactattgagcgagagctgaatggaacgtatgcaattgctggcggacgcacccatgcttccccggcagacctatgtcattatcacagtcaggagagcgacggcctggtgtgcctgctgaagaaaccatttaatcgcccacagggggtccagcccaaaactggcccattcgaagacctcaaggagaacctcatccgggagtacgtcaaacagacatggaaccttcagggccaagccctggagcaagccattatcagccagaaaccccaactggagaagctgatcgcaacaacggcgcacgaaaagatgccctggttccatggaaaaattagccgggaagagagtgagcagatcgtccttattgggagcaagacaaacggcaagttccttatcagagcgagggacaacaatgggtcctatgcgttgtgcctgttgcacgaagggaaggtgttacactaccgcatcgacaaagacaagactggcaagctctccattcctgaaggtaaaaagtttgatactctctggcagctcgtggagcactactcttataaggcagacggccttcttcgcgttctgactgttccttgccaaaagataggcacccagggcaacgtgaatttcggtggacgcccacagctcccgggaagtcaccccgcaacctggtcagcaggcggtatcatttcccgtattaagtcatattcctttcccaaacctggtcaccgtaagtcaagtcccgcacaggggaatcggcaggaatcgacggtcagtttcaatccttatgagcccgaactggccccttgggctgcagacaagggcccacaaagagaagcgctgcctatggacacagaggtatatgagtccccctacgctgatcctgaagaaatccgtccaaaggaggtgtatcttgataggaaacttctaaccctcgaagacaaggaattaggatcagggaatttcggtactgtgaaaaaagggtattaccagatgaaaaaagtggttaagactgttgcggtgaagatcttgaagaacgaggctaacgatcctgccctgaaagacgaattactggcagaggctaacgttatgcagcaattagataatccttacattgttagaatgattggaatttgcgaggccgagtcctggatgttagtgatggagatggccgaactcgggcctcttaacaagtatctgcaacagaacagacacgtgaaagacaagaatataatcgaactcgtgcaccaagtgtctatggggatgaaatacctggaggagtccaactttgtccatcgtgacctggctgcacgcaacgtgctgctggttactcagcattacgcaaaaatttctgatttcgggctgagtaaagccctgcgcgctgatgaaaattactataaagcccagactcatggcaagtggcccgtaaagtggtatgctcccgaatgcatcaactactataaattcagctccaaatctgacgtctggagttttggcgtcttgatgtgggaagctttctcatacgggcaaaagccttataggggaatgaaggggtcagaagttacagccatgctggagaagggggagcggatgggctgcccagctgggtgtccacgtgagatgtacgatttgatgaatctgtgttggacttacgacgttgaaaatcggcctggtttcgctgctgtcgaattgcgattgagaaattattattacgacgtggttaactag

SEQ ID NO: 242309 - DNA, 1839 bp, synthetic construct
  misc_feature 1..1839: note = Description of Artificial Sequence: Synthetic coding sequence
  source 1..1839: mol_type = other DNA
atggcctcctctgggatggccgatagtgcaaatcatctaccatttttcttcggcaatattacgcgcgaggaggctgaggattatttggtccaaggcggaatgtccgacgggctctacctgctgaggcagagccgaaactatctgggcggatttgctctcagtgtggcacatggcagaaaagcacatcactatacaatagaacgagagttgaatggcacctacgcaatcgctggagggaggactcacgccagccccgctgatctgtgtcactatcatagtcaggaatcagatggcctggtgtgccttctaaaaaagcctttcaaccggcctcagggcgttcagcccaagactggcccttttgaagacctaaaggagaacctgatcagagaatatgtcaaacagacctggaacctccagggccaggcgctggagcaggccattatctctcagaagccccaattggaaaagctgatagccacaacagcccacgaaaaaatgccgtggttccacgggaagatatctcgcgaggagtcagagcagattgtactgatcgggtcaaaaacaaatgggaaattcctgatacgggctagggataacaatggctcttacgcattgtgcttgctgcatgaagggaaagtgttacattaccgcatagacaaagacaaaaccggtaagttatccattcctgagggaaagaagttcgataccttgtggcaactcgtggaacattatagctataaggcggatggactgttgcgcgtactgaccgtgccctgtcaaaagatcggaacccaagggaatgtgaatttcggtggcagaccacagcttcctggttcccatcccgctagttctcctgcccagggaaatcgccaggagtctaccgtctcgttcaatccatacgaacccgaacttgcaccctgggcagcagacaagggacctcagcgcgaagccctgcccatggacaccgaggtttatgaaagcccttatgccgatccggaagaaattaggcccaaggaagtttacctggatcggaagctgctcacactggaggacaaggagctgggcagtgggaatttcggtacagtaaagaagggttactaccagatgaaaaaagttgtgaagacggtagccgtgaaaatcctgaagaatgaggccaacgaccctgccctgaaagatgagctattggcggaagcaaatgttatgcagcaattggataacccatacatcgtgagaatgattggaatatgtgaagccgagtcatggatgctggttatggaaatggccgaactcggtcccttgaacaagtacctacagcagaaccgccatgtgaaagataagaacatcatagagttggtgcaccaagtttcgatgggaatgaagtacctcgaggagtccaatttcgtgcacagggatctggccgctagaaacgtcctcttggtgactcagcactacgccaaaatttcagattttggtctgtcaaaagccctgagagccgacgagaactactataaggctcagactcacgggaaatggccggtaaagtggtacgcacctgagtgcataaactactacaagttctccagtaagagcgacgtgtggtctttcggggtcctcatgtgggaggctttttcttacgggcagaaaccatatcgcggtatgaagggatcagaggtcaccgcaatgcttgaaaaaggagaaagaatgggctgccccgctggctgccctagggaaatgtatgacctgatgaatttatgttggacatacgatgtggagaacaggcccggattcgccgctgtggagctaagactgagaaactattattacgacgtcgtgaattag

SEQ ID NO: 242310 - DNA, 1839 bp, synthetic construct
  misc_feature 1..1839: note = Description of Artificial Sequence: Synthetic coding sequence
  source 1..1839: mol_type = other DNA
atggcctcttcagggatggctgactcagccaaccatctgccctttttctttggcaatattactcgcgaagaagcagaggactatttagtgcaaggcggtatgtcggatggcctctacttgctgcgccagagccgcaactatctaggcggattcgctctgtctgtggcccacggtcggaaagcccaccattacacaatcgaacgggagctgaacgggacatacgctattgctgggggaaggactcacgcttcccccgctgatctgtgccattaccactcacaggagtccgatggactcgtgtgtctcttaaaaaaaccattcaataggccacagggtgtgcagcccaaaacgggcccttttgaagacctgaaggagaacttaatcagggagtacgtaaaacagacttggaacttacagggccaagccctcgaacaggcgattatttcccagaaacctcagctcgagaagctgatcgcaactacagcacacgaaaaaatgccctggttccatgggaagatttcgagagaggaatcagagcagattgtgcttattggatccaagaccaacggcaagtttctcatccgcgcacgagacaataacggcagttatgccttatgtctcttacacgaggggaaggtgcttcactaccgcatcgacaaagataagacaggcaaactctccattcctgagggaaaaaagttcgacactctctggcaactcgtggagcattatagctacaaggctgatggactcctcagggtactgacagtaccttgtcagaagatcggtacacaaggaaacgtcaatttcggtggacggcctcagcttcccggttcccatccggcatcttctccggctcaaggaaatcgccaagagtccaccgtgagctttaacccgtatgagccagaactcgccccttgggccgctgacaaagggcctcagagagaggccctgccaatggacaccgaggtgtacgagtcgccgtatgcagatcccgaggaaattaggcccaaagaggtgtacctggatcgcaagctcctgacactggaggataaagagctcggaagtgggaactttggaaccgtcaagaagggttattatcagatgaagaaggtggtgaagacagtggcggtcaaaatcttaaaaaacgaggcaaatgaccctgcactgaaggatgagttgcttgccgaggccaacgtgatgcagcagctcgataatccttatattgtacgcatgataggaatctgcgaggccgagtcttggatgctcgttatggaaatggctgagctgggaccacttaacaaatacctgcagcagaaccgccacgtgaaggacaaaaatatcatcgagctggtacatcaagtttcaatgggcatgaagtatctggaagagagtaacttcgtgcacagggatctagcagcacgcaacgtccttctcgtgacacaacactacgccaaaatcagcgatttcgggctatccaaggccctgagagccgatgaaaactactataaggctcaaactcatggaaagtggccagtgaagtggtatgccccagagtgtataaattactataaattcagttccaaaagcgacgtgtggagttttggcgttctgatgtgggaagcctttagctatggtcagaaaccttatagaggcatgaagggtagtgaagttacagcgatgcttgagaaaggggagcggatggggtgcccagctgggtgccctcgcgaaatgtacgacctgatgaacttatgctggacctatgacgtggagaacaggccgggatttgccgcagtagagttgcgcttgcgaaactactactatgatgtcgtcaattag

SEQ ID NO: 242311 - DNA, 1908 bp, synthetic construct
  misc_feature 1..1908: note = Description of Artificial Sequence: Synthetic coding sequence
  source 1..1908: mol_type = other DNA
atggctagtagtggaatggctgactctgcaaatcacctgccctttttcttcgggaatattactcgagaagaggccgaggattatctggtccagggtggaatgagtgacggcttgtatctattgcggcaaagccgcaactatttgggtgggttcgccctctccgtggcccatggcaggaaggctcatcattatacaattgagcgagagttgaacggcacatatgccatagctggaggcaggacacacgccagtcccgctgacctttgccactatcattcacaggaatctgacggtctcgtttgcctgcttaaaaaaccttttaaccgccctcagggagttcagcctaaaacaggccctttcgaggacttaaaagagaaccttatccgcgaatatgttaagcaaacgtggaacttacaagggcaggctctagaacaagccatcatctcccagaagccacaactggagaaactgattgccaccaccgcccatgagaaaatgccctggttccacggcaaaatttctcgggaggaatcagagcaaatcgtcctgataggatcaaagacaaatggcaagtttttaatcagggctcgcgataacaatggcagttatgcattatgcttgctgcacgagggcaaggttctacattacagaatcgacaaagacaaaacggggaagctgtccattcccgagggcaaaaagtttgataccttgtggcagctggttgaacattacagctacaaagctgatggcttgctcagagttctaacagtcccctgccaaaagattgggacacaaggcaatgtcaacttcgggggtaggccccagttgcctgggtcccatccagccacctggtccgcaggaggcatcatttcgcgcattaagagctacagttttcctaaaccgggtcaccgaaagagctccccagcgcaggggaaccggcaagaatccaccgtgtcctttaacccttacgaacccgagttggctccttgggcagccgataagggacctcaacgcgaggcactccccatggacacagaagtgtacgagagcccctacgctgaccccgaggagatcagacccaaggaggtatacctcgatcggaaactgctgacactcgaggacaaggaactcgggtccggcaactttggcaccgtcaagaaggggtactatcagatgaagaaagtcgtgaagaccgtggctgtgaagattctaaaaaacgaagcgaatgatccagcactgaaggatgagctcttggcagaagccaacgttatgcagcagctcgataatccttacattgtcaggatgatcggaatctgtgaggccgagagttggatgttagttatggagatggcagagctgggtccgttgaacaagtatctgcagcagaacaggcatgttaaagataagaatattatagagctcgtgcatcaagtgtccatgggaatgaaatacctggaggagtccaattttgtccaccgggacctggccgctagaaatgtgctgctcgtcacacagcattacgccaaaatttctgacttcggcctatccaaggctctgagagccgatgaaaactactataaagcacagacacatggcaagtggccggttaaatggtacgccccagagtgcatcaactactacaaatttagtagtaagagcgatgtatggtccttcggcgtgttgatgtgggaggccttttcttacgggcaaaagccatatcgaggcatgaaaggctctgaggttacagccatgctcgaaaagggagagcgaatgggctgtccagcaggttgccctcgggagatgtacgatttaatgaacctttgctggacatatgacgtggaaaaccggccaggatttgctgccgttgaactgcgcctccgaaattactactacgacgtcgtgaattag

SEQ ID NO: 242312 - DNA, 990 bp, synthetic construct
  misc_feature 1..990: note = Description of Artificial Sequence: Synthetic coding sequence
  source 1..990: mol_type = other DNA
atggtgtctaaatctaggtggaagttgctggctatgctggcgctggtgcttgtggtgatggtgtggtattccattagtcgcgaggacagcttctactttcctatccccgagaaaaaggagccatgtttgcagggcgaagccgaatccaaggccagcaaacttttcggaaactattctcgcgatcagccgatatttttgaggctggaggattacttttgggtcaagactccatctgcttacgagctcccttacggcaccaagggaagcgaggatctcctcctgcgcgtgctggcgataacctcgtcgtcaatcccaaaaaacattcagtcactgaggtgccggagatgcgttgtggtgggtaatgggcaccgcctgcgtaatagtagccttggggatgcgatcaacaaatacgacgtagtgatcaggcttaacaacgccccagtggccggatatgaaggcgatgtcggatctaaaacgaccatgagactgttctacccagagtccgctcacttcgatccaaaggtggaaaacaatcccgatacactgctggttctggttgcgttcaaggctatggacttccactggatcgagactatcttgagcgataagaagagagtgcggaaaggcttctggaagcagcctccccttatatgggacgtgaacccaaagcaaattcgcatactgaacccattctttatggagatagctgccgacaagttacttagtttgcctatgcagcaaccaaggaagatcaaacaaaagcctactactggactgctcgcaattactttggccctgcatctttgtgacctagttcacatagcagggtttggttatccggatgcttataacaaaaagcagacaatacattattacgagcagattaccctgaagagcatggcagggagtgggcataatgtttcccaagaggccttggcaatcaaaaggatgctggaaatgggagctatcaaaaacctgacttccttctag

SEQ ID NO: 242313 - DNA, 1917 bp, synthetic construct
  misc_feature 1..1917: note = Description of Artificial Sequence: Synthetic coding sequence
  source 1..1917: mol_type = other DNA
atggccaccggtgctaatgcaactccgcttgacttccccagcaaaaagagaaagagaagtaggtggaatcaggataccatggaacagaaaactgttataccaggtatgcctacagtgatcccaccagggctgacacgtgagcaggagcgggcttatattgtacagctccagattgaagatctgacaagaaagctgagaaccggggacctcgggattccccctaatcctgaggaccggtccccgagccccgagccgatttacaatagcgagggaaagcgattaaacacaagagaattcaggacccggaagaagcttgaggaagagaggcataaccttattacagaaatggtggctttgaaccccgactttaaaccacccgcagattacaagcccccagccacacgcgttagtgacaaagtgatgattccgcaggatgaataccctgaaatcaatttcgtcggtctcctgatcgggcctcgtggaaacacactcaagaatatagagaaagagtgcaatgctaagattatgatcagaggtaagggatctgtgaaggaagggaaagtgggcaggaaagacgggcaaatgctgcctggcgaagacgaacccctgcatgcattggtcactgctaacaccatggaaaatgtcaagaaggcagtggaacagatacgcaatatcctgaagcagggaatcgaaacgcctgaggatcagaacgatctgagaaagatgcagcttagagaattagccagactgaacggtactctacgggaggacgataataggatactccggccatggcagtccagtgaaactcgtagtatcacaaacacaaccgtctgtacaaagtgtgggggtgccggtcatattgcctcggactgcaagtttcagaggcccggtgatccgcagagcgctcaggacaaggctaggatggacaaggagtatctgtctctgatggctgagctgggagaggcacccgttccagcgagcgtcggctccacttctggtccagcgactaccccattggcgtctgcccctcgccctgctgcgcctgcaaacaatcctcctcctcccagcctcatgtccacaacacagtctaggcctccttggatgaattccgggccttccgaatcgagaccctaccacggcatgcacggaggcggaccagggggacccggaggtggcccacacagcttcccacatcccctaccctctctgacagggggtcatggaggccatcctatgcagcataatcctaacgggccaccgccaccatggatgcagcctcctccccctccaatgaaccagggtccacaccctcctggccaccatgggccaccacccatggatcaatacctgggctcaaccccggttgggagcggtgtttacaggctacatcaggggaaggggatgatgcccccacctcctatgggcatgatgccacctccaccccctccaccctccgggcagcctccaccgccaccctccgggcctctgccaccttggcaacagcaacagcagcaacctcctccgccacccccaccctcatctagcatggcgtcttctacaccactaccttggcagcagaatacaaccaccacaaccacgtccgctggcactggctcaatccccccatggcaacagcagcaggccgctgcagcagcctcccctggagccccacagatgcaaggcaaccctaccatggtcccccttccccctggcgtgcagccccctctgccccctggagcgccaccccctccaccacccccaccccctggaagcgcgggaatgatgatcccccctcgaggcggagatggaccatcgcacgagtcagaagactttcccaggcctctggtcaccctccccggaagacagccccagcagcgaccctggtggacaggatggtttggaaaagctgcttag

SEQ ID NO: 242314 - DNA, 1920 bp, synthetic construct
  misc_feature 1..1920: note = Description of Artificial Sequence: Synthetic coding sequence
  source 1..1920: mol_type = other DNA
atggccactggcgctaacgccactccgcttgactttccctccaaaaagcggaagagatctcggtggaaccaggatactatggaacagaaaaccgttattccaggtatgcccactgtgattccaccagggctgaccagggaacaggagagagcatatattgtgcaacttcagatcgaggatctcactagaaaactgcgtactggcgacttaggcatacccccaaaccccgaagatcgttcccccagtcccgagcctatttacaactccgaggggaagcgacttaacacccgtgagtttagaacaagaaagaagctggaagaagagaggcataatcttattaccgaaatggtcgccttaaatccggatttcaagcctccagctgactacaagccccctgccactagagtaagcgacaaagtgatgatcccacaagatgaataccccgaaatcaatttcgtgggcttgctcattgggcctcgcggtaatacgctcaagaatatcgaaaaagaatgtaacgctaaaatcatgataagaggcaaagggagcgttaaagaaggtaaggtaggtcgcaaagatgggcagatgctccctggtgaagacgagcccctacacgccctggtgacagctaatacaatggagaacgtgaaaaaggcagtggaacaaatccgcaacattttaaagcaaggtattgaaactcccgaggatcagaacgacttgcggaagatgcagctccgtgagctcgccaggctgaatggcacccttcgggaggatgacaataggatcctgagaccatggcagagtagtgaaactcgctcaattaccaacactaccgtgtgtacaaagtgcgggggagcaggccacatagctagtgactgtaagtttcagagacctggagacccacagtctgctcaggataaagccaggatggacaaagagtatctgtcactgatggcggagttgggcgaggccccagtgcctgcctcagtcgggagtacctccggtccggcaactacgccattggcatctgcccctcgacctgcagctcctgctaataatccccctccccctagtttgatgtcaacaacccagagtcggccaccctggatgaacagtggtccttctgaatctcggccttatcatgggatgcacgggggagggccaggcggacccggtggtggccctcacagtttcccccaccctctgccttcactgacgggaggccacggtggacaccctatgcaacacaaccctaacggcccaccaccaccttggatgcagccgccaccgccacctatgaatcagggtcctcatcctccaggtcatcatggcccacccccaatggaccagtacctcggaagcactccagtgggctcaggcgtttaccgcctgcatcaggggaaaggtatgatgccaccacctcccatgggtatgatgccacctccgccacctcccccaagcgggcagccccctccaccacctagtggaccgctgccgccttggcagcagcagcaacaacaacccccaccccctcccccaccatcttcaagcatggctagctctacaccacttccatggcagcagaacactacaaccactactacctcagcaggaaccgggagcatcccaccatggcagcagcagcaggccgctgccgcagcgtcccctggagccccacagatgcagggcaacccaaccatggttccacttcctccgggagtacagcctccgttgccacctggagccccaccccctccccctcccccacccccaggtagcgccggtatgatgtacgctcccccaccccctcctcctcctcctatggaccccagcaacttcgtgacaatgatggggatgggggtggccggtatgcctccattcggcatgcctccagcgcctcccccacctcccccacaaaattag

SEQ ID NO: 242315 - DNA, 1716 bp, synthetic construct
  misc_feature 1..1716: note = Description of Artificial Sequence: Synthetic coding sequence
  source 1..1716: mol_type = other DNA
atggctactggcgctaacgcgactcctctagacttcccgtctaagaaacgaaagcggtcacgttggaaccaggatacgatggagcagaagacggtcatcccagggatgccgaccgtcattcccccaggactgacacgagagcaggagagagcgtatatcgtgcagttgcagattgaagacctcactcggaaacttcgcaccggtgaccttggcatcccccctaaccccgaggaccgctccccgtccccagagcccatatataactccgaggggaaacgcctcaacacaagggagtttcggacacgaaagaaacttgaagaggaacgccacaacttgattaccgagatggtggccctcaatcctgattttaaacccccagccgactacaagcctccggctacaagggtgtctgataaagtgatgatcccacaggatgaataccctgaaattaactttgttgggttgttaattgggccaagaggcaacactctgaagaatattgagaaggaatgcaacgcaaagattatgatccggggaaaaggcagcgtcaaggaaggcaaggttgggaggaaagatggacagatgttacccggagaagacgagccgctgcacgccctggtcacggccaacactatggaaaatgtgaagaaggctgtagaacaaattagaaacatactgaagcagggcatagagacgccagaagaccagaacgacctgcggaagatgcaactgagggaactcgcgcgactgaatggaaccctcagagaagacgacaatcggatcttgcggccatggcagtccagcgaaacaagatccatcacgaacactactgtctgtactaagtgcggaggcgcaggacacattgctagtgattgcaaatttcagaggcccggtgatccccaaagtgctcaagacaaggccagaatggacaaagaatacctcagcctcatggccgaactgggcgaggcacccgtccccgcttcagtcggctccacaagtggcccagcgacgactcctcttgcctcagctccacggcctgctgctccagccaacaatccgcctccgcctagcctaatgtccaccacacaatcccgcccaccttggatgaatagcggtccatccgagtcccggccttatcacggcatgcatgggggaggcccagggggacccggaggagggcctcatagtttccctcacccacttccttctctcaccggcggacacggtggacatcccatgcagcacaatcctaatgggccacctcctccgtggatgcaaccacctcctcccccaatgaatcagggcccacaccctcccggacaccacggccctcccccaatggggaaatccgtcccagggaaatacgcctgtggtctctggggcctatctccggcaagccgcaagaggtacgacgccgcaaccacatacggacatgatgccgctgcagcggctgctagtcaatgggccgcacccaccccatccttatggagtagtagtcccatggcgacgacagccgcagccgcatctgccacaccttcagcccagcaacagtatggtttccagtaccccctagccatggcagccaagatccccccacgcggaggcgatggcccatcccatgagtctgaggattttcccaggcccctggtgactctgcccggaagacagccacagcagagaccatggtggaccgggtggtttggaaaggctgcatag

SEQ ID NO: 242316 - DNA, 1302 bp, synthetic construct
  misc_feature 1..1302: note = Description of Artificial Sequence: Synthetic coding sequence
  source 1..1302: mol_type = other DNA
atggtcgccttgaatccagacttcaagccccctgctgattacaagcctccagccactagagtctcagataaggtgatgattccgcaggatgaataccctgagatcaacttcgtgggactcttgatcggaccccgagggaacacattgaaaaatatagagaaagaatgcaacgcaaagatcatgatccggggtaaagggtccgtcaaggagggcaaggtgggacgaaaggacggacagatgctcccaggggaggacgagccactccatgcactggtgacagcgaacactatggaaaatgtcaaaaaagccgtggaacaaatcagaaacattctgaaacaggggattgaaaccccagaagaccaaaacgacttgagaaagatgcagctgcgggagctggcacgcctcaatggcacacttagggaagacgataaccgcatcctgcggccttggcagtcctccgaaacacggtcaataacaaacaccacggtgtgcaccaagtgcggcggtgcgggtcacatcgcgagcgattgcaaattccagcgccctggcgatccccagagtgcccaggacaaggccaggatggacaaggaatacttgtcactcatggctgagctgggagaggctcctgtgccagcttctgtgggttccaccagcggtccagctactactcccctcgccagtgctccgagaccggcagcgccagccaataatccccctccccctagccttatgtccactacccagtcacgcccaccttggatgaactcgggcccaagcgaatctcggccttatcacggaatgcatgggggaggtcctggcggaccagggggagggcctcattcttttccccatcctctcccaagcctaactgggggtcacgggggacaccctatgcaacataatcctaacggccctccccctccttggatgcagccccctccccctccaatgaaccagggaccccacccgcctggccaccacgggccaccacccatggaccagtacctgggttctacccccgttggctccggcgtataccggcttcaccagggaaagggaatgatgcctccccctccaatgggtatgatgcctcctccaccaccccctccatctggacagcccccaccacctcccagtggaccactccccccatggcagcagcagcagcagcagccccctccacctcccccaccatcttcatccatggcgtcgagcacccctctcccctggcagcagcggtctctcccagcggctgcgatggcccgagccatgcgagtaagaactttcagagcccattggtag

SEQ ID NO: 242317 - DNA, 2022 bp, synthetic construct
  misc_feature 1..2022: note = Description of Artificial Sequence: Synthetic coding sequence
  source 1..2022: mol_type = other DNA
atggccaccggtgcgaacgctaccccattggggaaactgggaccacccggactcccaccactgcctggcccaaagggcggatttgaaccagggcctccacctgcccctggccctggagccggattgctggctccgggtcccccaccccctccaccggttggaagtatgggagctctgacagccgcttttccatttgctgccctgccaccgccacctccaccaccccctcctccacctccgcagcagccacctcccccacctcctccaccatctccaggcgcatcctaccctcccccacagcctccacctcctccacccctttatcagcgcgtctcacctcctcagccacctccaccccaaccccctaggaaggaccagcagcctggccctgctggcggtgggggagactttccctccaagaaaagaaagcggtcacggtggaaccaggatacaatggaacagaagactgtcatccctggcatgcccaccgtaattccaccaggcctgactagagaacaagaacgggcatatatcgtacagctgcagatagaagacctaacccgcaagctgcgtacaggtgatcttggaattccaccaaacccagaggatagatctcctagccccgagccaatatataactccgagggtaagcggcttaacactcgggaattccggacccggaaaaaactggaggaggagcgacacaatcttatcactgagatggtcgctctgaaccccgacttcaagcctccagccgattataagccccctgcaacccgagttagcgacaaagtgatgataccccaggatgagtacccagagatcaacttcgttgggctgcttattggacctcggggtaacacattgaagaatatcgagaaggagtgcaatgccaaaatcatgatcaggggcaaaggatctgtcaaagagggcaaggtcggcaggaaagacggccagatgctccctggagaggacgagcctctgcacgctctggtaacagccaacacaatggaaaacgttaagaaggctgtggagcaaattagaaacatcctcaagcaggggattgagactcctgaagaccaaaacgatctgcgaaagatgcagctgagagagctcgccagattgaatggaaccctgcgcgaggacgacaaccggattttgcgtccgtggcaatcctctgagacacggagtatcaccaatactacagtgtgcaccaaatgtgggggagctggacacattgccagcgactgcaagtttcaacgacctggggacccccagtctgctcaggataaagcaaggatggacaaggaatatctgagtctcatggctgagctcggcgaagccccagtgccagctagtgtgggcagtacaagcggacctgccaccactcctctggcaagcgcccctcgacctgctgcccctgccaacaaccctccacctcctagcttgatgtccacaacacagtcccgtcccccatggatgaattcaggcccatccgagagtaggccatatcatgggatgcatggtggagggccaggtggcccaggaggagggccacacagctttcctcatcccctaccaagcctgaccggtggccatggcggacatcccatgcagcataacccaaacggacctcccccaccatggatgcagccgccaccacccccaatgaatcaggggccacaccctcccggtcatcatggcccaccacctatggatcagtacctaggctcaactcccgttggatcaggcgtgtaccggctccaccagggcaagggcatgatgccccctccccctatgggtatgatgcctcctccacccccacccccttctggacagccaccccctccgccatcaggccctcttcctccatggcagcagcagcagcagcaaccgcctccgcctccacctccatcttcaagtatggcgtcttccaccccacttccttggcagcagaggtcgctaccagcggcagccatggctagggccatgagagtccggacatttcgggcacactggtag

SEQ ID NO: 242318 - DNA, 1842 bp, synthetic construct
  misc_feature 1..1842: note = Description of Artificial Sequence: Synthetic coding sequence
  source 1..1842: mol_type = other DNA
atggagcagaagacagtgatccctggtatgccaaccgtcattccacccggactgacaagagaacaggaacgagcctacattgtccaactgcagatagaggatttgaccaggaagttgcgcacaggcgacctgggcattccacccaaccccgaggaccggagtcccagcccagaaccaatctataattcagaggggaaacggctgaatacccgcgagttcaggaccaggaaaaagctggaggaagaaaggcataatctgatcaccgagatggtggcattgaaccctgatttcaagccccctgcagactacaagccacctgcaacccgagtgtccgataaggtgatgattcctcaggacgagtatcccgaaattaattttgtgggactgttaatcggaccacgtggaaatacactgaagaacattgaaaaggaatgcaacgcgaagattatgattagagggaaaggtagcgtgaaggaaggaaaggtcggcaggaaggatggccagatgcttcctggagaggatgaacccttgcacgctctggttactgctaacaccatggagaatgtcaagaaagccgtggagcagattcgcaatatcctgaaacagggcatagagactcctgaggaccagaatgacttaaggaaaatgcagctccgagagcttgccagacttaatggtacgttgagggaggacgataaccggattctgcgtccatggcagtccagcgagacacggagtatcacaaatacgactgtatgcacaaaatgtggcggagctggtcatatcgcatcagattgtaaattccaacgcccaggcgatccccagtccgcgcaggacaaagcccgtatggacaaggagtatctgagcctgatggctgagctcggtgaggctccggtgcctgcctccgttggaagcacatccggcccagccacaaccccattggcgagcgccccaaggccggcagcaccagccaataatccccctcccccttctttaatgagtaccactcagtcaaggcctccatggatgaactctggaccctccgagagcaggccataccatgggatgcatggtggcggtcctggaggtcctggcggtggtccacactcgtttccccacccactaccaagtctgactggaggccacggaggccaccctatgcagcataacccaaatggccctcctcctccatggatgcaaccccctcccccaccaatgaatcagggccctcatccacctgggcaccacgggcctccacctatggaccagtacctcggctccactcccgtggggtccggcgtctaccggttacatcagggaaagggaatgatgccaccacctcccatgggcatgatgcctccccctccccctcccccatccgggcagcctcccccacctcctagcggacccctccccccatggcagcagcaacaacaacagcctccccctccccctccaccctcttccagcatggcctcttccacaccccttccttggcagcaaaatacaactacaaccactacaagtgcgggtaccggctcgatcccaccttggcagcaacaacaggctgctgcagccgcatccccgggagcgcctcaaatgcagggcaaccccacaatggtcccactgccccctggggttcagccacctctgcctccgggtgcaccgcctcccccacccccacctccaccgggttcagccggaatgatgtatgcaccgccaccgccaccccctccccctatggacccgtctaactttgtgaccatgatgggcatgggagttgcaggcatgccgccatttggcatgcctcctgcccctcctccccctccccctcagaattag

SEQ ID NO: 242319 - DNA, 1527 bp, synthetic construct
  misc_feature 1..1527: note = Description of Artificial Sequence: Synthetic coding sequence
  source 1..1527: mol_type = other DNA
atggctaaaagcaatggggaaaacgggccaagggccccagccgctggagagagcctgagcgggacccgggagtctcttgcgcaaggtcccgatgcggctaccacggatgagctgtccagcctaggatcggatagcgaagccaacggatttgccgagagaagaatcgacaagtttggatttatcgtcggctcacagggcgctgaaggggctctggaagaagtcccgttggaggtactgcggcagcgagaaagcaaatggctggatatgcttaacaactgggacaaatggatggcgaagaagcataaaaagatcaggttaaggtgtcagaagggcattcctccatccctgcgagggagggcgtggcagtacctatccgggggaaaagtcaagctacagcagaatcccggtaaatttgatgaactcgacatgtcccccggtgatccgaaatggctggacgtgatcgaacgggatctccaccggcagtttccatttcatgagatgtttgtatccaggggcggtcacggccagcaggatctattccgcgtcttaaaagcatacaccttatatagaccagaagaaggatattgccaggcccaagctcctatcgcagccgtgctgttgatgcatatgcccgcagagcaggccttctggtgcctggtccagatatgcgagaaatacctcccaggatattattctgagaagctggaagcaatccagctggacggcgagatcctcttcagcctgttgcagaaggttagccccgtggctcacaaacatctgagtcgccagaaaatcgatcctctgctgtacatgaccgagtggttcatgtgcgcattctcacgaacgctgccttggagtagcgtgctccgggtgtgggacatgttcttttgtgagggcgtgaagataattttcagagtgggcctggtcctcctgaaacatgcccttggctctccggagaaggtgaaggcatgtcagggccagtacgagactatcgaaaggctgcggtccctgagtcccaaaattatgcaagaagcatttttggtccaggaagtcgtggaactgcccgttacagaacgccagattgagcgtgaacatctcattcagctgcgaaggtggcaggaaacccggggagagttgcagtgcagatcaccccctcgtttgcacggcgctaaagcaatcctagatgccgagcccggtcccaggcccgcactgcagccatcaccatctatccgacttcccctggacgctccattgcctggtagcaaggccaagccaaaaccccctaagcaagcccagaaggaacagcggaaacagatgaagggtcgaggccagctggagaaacccccagcaccaaaccaggcgatggttgtggccgctgcaggagacgcatgccctccccagcatgtgccccctaaggacagtgctccgaaagactctgcgcctcaagatctggcacctcaagtgagtgcgcaccaccggtcgcaggagtctctgacttcccaagagtcggaagacacttacctgtag

SEQ ID NO: 242320 - DNA, 2187 bp, synthetic construct
  misc_feature 1..2187: note = Description of Artificial Sequence: Synthetic coding sequence
  source 1..2187: mol_type = other DNA
atgcccgctggaccggtgcaagccgtgcctcctcccccacccgtgcccactgaacccaagcaaccaaccgaagaagaagccagctcaaaagaggactccgccccttctaagcctgtagtaggcattatctatcctccccctgaggtgcgaaatatagtggacaagactgcttcttttgtggccagaaacgggccagaatttgaggcacgcattcggcaaaatgaaataaataatcctaagttcaatttcttaaacccaaatgacccctaccatgcttactatagacataaggtaagcgaattcaaggagggaaaagcccagtttgtggccaggaatggcaggcaatttctgacccaattaatgcagaaagagcagcggaattaccagttcgatttcttgcgccctcagcatagcctctttaattattttactaagctagttgagcagtatactaagattctcattccacctaagggactgtttagcaaactcaaaaaggaagctgagaaccccagagaggttctggaccaggtttgctacagagtcgagtgggctaaattccaggaacgggagcgaaagaaggaggaagaagagaaggagaaggaaagagtcgcctatgcgcagatagattggcatgactttgtggtggtagagactgtggactttcaaccgaacgagcaaggcaattttcctccacctacaacccccgaagaactgggcgctaggatcctaatccaggagcgatatgagaaatttggtgaaagtgaggaagttgaaatggaggtcgagtcggacgaagaagacgataaacaagaaaaagctgaagaaccaccatcacagttagaccaggacacgcaggtgcaggatatggacgaaggctcagacgatgaggaggaaggccagaaggtcccccctcccccagaaacccccatgccaccaccgctccctcctactccggaccaggtgattgttagaaaggattacgaccccaaggcttccaagccactgccacccgctcccgcacctgatgagtatctcgtttcacctatcactggagagaaaatccccgcatcgaaaatgcaggagcatatgcgaatcgggctgcttgaccccaggtggctggagcagagagaccgctccattagagaaaaacagtcggacgacgaggtgtatgctcctggactggacatcgaaagttcgctgaagcaactagctgagagaagaactgacatcttcggggttgaggaaaccgccataggcaagaaaataggggaggaggagatccagaaacccgaagaaaaagtaacttgggatggccactctgggagcatggctagaacccagcaggctgcccaggcaaacataacactgcaggaacagatcgaggcgatccataaggccaagggtctggtcccagaggacgacaccaaggagaaaataggcccatctaagcctaacgagatcccccagcaaccacctccaccctcatccgcaacaaatataccttctagtgccccaccaatcaccagcgtaccccgtcccccaacaatgcccccacccgttagaacaaccgttgtctcggcagtgccagtaatgccacggcctccaatggcctccgtggtcagattgcctcccggatcagtgatcgccccaatgccgcctataattcatgcaccgaggataaatgtcgtgcctatgccaccttctgccccacccatcatggccccacgcccacctcctatgatcgtgcctaccgctttcgtgcctgccccacctgtcgccccagtgccagctccagcacctatgcctcctgttcaccccccaccccctatggaggacgagccaacctctaaaaaattgaagactgaggactcactgatgcccgaagaagagtttcttcgccgaaacaagggtcctgtaagcattaaagtgcaagtgcctaatatgcaggacaagacagagtggaagctgaacgggcaagtgttggtgttcaccctgcctctgaccgaccaggtatctgttatcaaggtcaaaatccatgaagctactggtatgcccgcaggaaagcagaagctccagtatgagggaatttttatcaaagactctaattcactagcttattacaatatggcaaacggagccgtgatacatctcgccctcaaggagcgaggaggccgaaaaaaatag

SEQ ID NO: 242321 - DNA, 2073 bp, synthetic construct
  misc_feature 1..2073: note = Description of Artificial Sequence: Synthetic coding sequence
  source 1..2073: mol_type = other DNA
atgactctgactatgcccactacagctattcctaaagtgatgcagcaacagcagcagacaacccaacagcagctccctcagaaagtgcaggcacaagtcattcaggaaacaattgtgccaaaggaaccccctcccgagtttgagttcatcgccgaccctccttctatatctgcgttcgatcttgatgtggttaaacttaccgcacagtttgttgctagaaacggcaggcaatttttgactcagttaatgcaaaaggagcagaggaactatcagtttgactttttgcgaccacagcactcactcttcaattactttaccaagctggtggaacaatacaccaagatactaatccctcccaagggtctgttttccaagttgaaaaaggaggccgagaacccccgagaggtgctagaccaggtgtgctaccgggtggagtgggctaagttccaggagcgagagcgcaagaaagaagaagaagagaaggagaaggagagagtagcatatgcccagattgactggcacgactttgtggtcgtggaaactgtcgattttcagccaaacgaacagggaaactttccaccacctaccacgcctgaggaattgggcgctcgcattctaattcaagagcggtatgagaagtttggggaaagcgaggaagtggagatggaggtggagagcgacgaggaagacgacaagcaagagaaagcagaagaacccccttctcaattggatcaggacacacaggtgcaggacatggatgaaggttctgatgacgaggaagaaggacagaaggtacctccaccacccgagaccccaatgcctccccctttgccacctactcccgatcaggtaattgtcaggaaggattacgatcccaaggcatcgaaacccctgcctcccgctcctgccccagacgagtacctagtttcccctattacgggggagaaaatacccgcttccaagatgcaggagcacatgcgcatcggcctgttggacccgagatggctggagcaaagagacaggagcattagggagaagcagagtgatgacgaagtttacgccccagggctcgacatcgagagttcacttaagcagctggccgagaggcgcacagatatctttggggtcgaagagactgcaattgggaagaagattggagaggaggagattcagaagcctgaggagaaggtgacttgggatggacactcaggcagcatggccaggacccagcaagcagcccaggcgaatattactttgcaggagcaaatcgaggcaatccataaggccaaagggcttgtgcccgaggatgataccaaggagaagattggcccttctaagccaaatgaaattcctcagcagccacctcccccatcttccgctactaatatcccatcatctgcccctcctattacgagcgtgccacgtcctcctactatgcctccgccagtaaggacaacagtcgtgtctgcagtgcccgtgatgcccagacctccaatggcaagtgtcgtgaggctgcccccaggctccgtcatcgctccaatgcctcctatcatacacgctcctcgcatcaatgtggttcccatgcccccttctgcgccacctatcatggccccaaggccacctccaatgattgtgccaaccgcattcgtgcctgctcccccagtagcacccgtccctgccccagcacccatgcctcctgtgcatccccctccccctatggaggatgagcctacaagtaagaagttgaagacagaagactctctgatgcccgaggaagagtttttgcgtcggaacaaaggcccagttagcatcaaggtgcaagtccccaatatgcaggataagacagaatggaagctcaatggacaggtactggtgttcactctgccacttactgaccaggtctcagtgataaaagtgaagatacacgaggccactggaatgcccgcagggaaacagaagctccagtatgaagggatttttattaaggattctaatagcctcgcctactataacatggctaacggggctgtgatacaccttgcgctcaaggagcgcggaggccgtaaaaagtag

SEQ ID NO: 242322 - DNA, 900 bp, synthetic construct
  misc_feature 1..900: note = Description of Artificial Sequence: Synthetic coding sequence
  source 1..900: mol_type = other DNA
atggacctctcagagctggaacgtgataacaccggccgttgtaggctgtcctcaccagtgcccgcagtgtgccgtaaagagccttgtgtcctgggagttgatgaagctggccgagggcctgtgctcgggcctatggtctacgctatctgctactgcccactgcctagactggctgacttagaagcccttaaggtggcagattctaaaaccttgctcgaaagtgagcgcgagagattgttcgcgaaaatggaagacacagattttgtaggatgggcccttgatgttctgtctcccaatttaatctccacttcaatgctgggacgggtcaaatacaaccttaactctctctctcatgacactgccactggccttatccagtatgccctagatcagggggtgaacgtcacacaggtgtttgtcgatacggtgggcatgcccgagacgtatcaggcacgtctccagcaatcttttcccggaatcgaggtgacagtgaaggctaaagccgacgctctctatccagtggttagcgcggcaagcatttgcgctaaggtggctcgggatcaagccgtgaagaagtggcaatttgttgagaagttgcaggatttggatactgattacgggtcaggctaccccaacgaccccaaaacgaaggcctggctgaaagaacatgtggaacctgtctttgggtttccccagtttgtgaggttctcctggaggactgctcagactatcctggagaaggaagccgaagatgtcatctgggaggattctgcttcagagaaccaggagggcctccgtaagattacgtcttatttcctgaacgaggggagccaagccaggccacgttcctcccacagatacttcctggagagaggactagaaagcgctactagtctctag

SEQ ID NO: 242323 - DNA, 3915 bp, synthetic construct
  misc_feature 1..3915: note = Description of Artificial Sequence: Synthetic coding sequence
  source 1..3915: mol_type = other DNA
atggcaaagatcgctaagacccacgaggatatcgaggcacagattcgagagattcaggggaagaaggccgctcttgacgaagctcagggcgtgggtctggacagtaccggttactacgatcaggagatatacgggggttcggattccaggttcgccggttatgtgacaagcattgccgctaccgagctcgaggatgatgatgatgattactcctcgagcacctcattactcgggcagaagaaacccggttatcacgcgcctgttgctctcctgaatgatattccccagtcaacagagcaatacgatcctttcgcagaacatcggcctcccaaaatcgctgacagggaggatgaatataaaaagcaccgtagaaccatgataatcagccctgaacggctggatcctttcgccgatggtggcaagacccccgatcctaagatgaatgctagaacgtatatggatgtgatgcgggagcagcacctaacgaaggaggaaagggaaatacggcaacagttagcggaaaaagctaaagctggtgaactgaaagtggtgaatggggctgcagcctcccagcccccaagtaaacggaagcgcaggtgggaccagacggccgatcaaacaccaggcgctactcccaagaaactgtcctcatgggaccaggccgagacaccaggccacaccccttccctgcggtgggacgaaacacctggtcgagcaaaagggtcagagacacccggagcaacaccgggtagcaagatctgggatccaaccccatcccacactcccgcaggggctgcgaccccaggtcgaggtgacacacctggacatgccacccccggacacggtggggctacctccagtgctcgcaagaacaggtgggacgagaccccgaaaacggagagagacactcctggacatggatctgggtgggcagagaccccgaggaccgatagagggggagactcaatcggcgagaccccaactccaggcgcatccaagcggaagtctagatgggatgagaccccagcatcccagatgggcggttctaccccagtattgactccaggaaagacacctataggtaccccagccatgaacatggccacccctacccccggtcatattatgagcatgacacccgagcaactccaagcatggcggtgggagcgggaaatcgacgagcgtaaccgcccattatccgacgaagaattagacgccatgttcccagaaggttacaaggtcttgcctccgccagctggatatgtgcctataagaacaccggctcgcaaacttaccgcaaccccaacccctctcggtggaatgacaggattccacatgcagacggaggacagaaccatgaagtccgtgaacgaccagccatcagggaatctccctttcctgaagcccgacgacatccaatattttgataaattactggtcgatgtggacgaatcaacactctccccggaggagcagaaggagagaaaaatcatgaagctgctgctgaagatcaagaacgggactccccctatgagaaaagctgcactgcgccaaatcaccgacaaagcgagagagtttggggctggacccctcttcaatcagatcttgccattgctgatgtctcctactctcgaggatcaggagcgacatctcctggtaaaggtgattgacagaatcctgtataagctggatgatctggtacgcccatatgtgcacaagatcctcgtcgtgattgagcctttgctgatcgacgaggattattacgcccgtgtggaaggacgggagattataagcaatctggccaaagctgctgggttggccaccatgattagtaccatgcggcctgatattgacaacatggatgagtacgtcagaaacactactgctcgagcgttcgcagtggtggcttccgcactcggcattccaagcttgctgccatttcttaaagctgtctgtaagagcaagaagtcatggcaggcccgacacacaggtatcaagatcgtgcagcagattgctatcctgatgggatgcgcaatccttcctcatttacgcagcctcgtggaaattatagagcacggactcgtagacgaacagcagaaagtgcggacaatatccgccctggcaatcgcagcactggctgaagcggcaaccccatatgggatcgagagttttgattctgttctgaagcctttgtggaaagggatcaggcagcacaggggcaaagggcttgcagcattccttaaagccatcggttatctgatccctttgatggacgccgaatacgcaaactattacactagagaggtcatgctgatacttattagagagtttcagagccctgacgaagagatgaaaaagatcgtgctcaaagtagtaaaacagtgctgcggaacagacggggtggaggccaactatatcaagacagagatacttccaccattcttcaagcacttctggcagcatagaatggcactagatcgtcgcaattatcgtcaactcgtcgacactactgtggaactggccaataaggttggtgctgcagagataattagccggattgtggacgatcttaaggacgaggccgagcaatatagaaagatggtcatggagacaattgagaaaatcatgggaaatttaggcgcagccgatatagaccacaaattggaagagcaacttattgacgggatcttatacgcatttcaagaacagacaacagaggatagtgtcatgcttaatggatttgggactgtggtgaatgccctgggcaagagagtgaagccatacctgcctcagatctgcgggacggtactatggcgcttgaataacaagtccgctaaagtcaggcagcaggctgccgacctgattagccggaccgcggttgtcatgaaaacatgtcaagaggagaagctgatggggcacctgggcgtcgtattgtacgaatatctgggtgaggagtatccagaggttctgggctcaatcctgggcgctctgaaggctattgtcaacgtgatagggatgcacaaaatgacaccccctattaaagaccttctgccacggctgacccctattcttaaaaatagacatgaaaaggtgcaggagaattgtattgatctcgttgggagaatcgctgatcgtggcgctgaatacgttagcgcccgagaatggatgcggatctgttttgagctcttggagttactaaaggctcacaaaaaagccataagaagagctacagtgaacacttttggctacatcgccaaagcaatcggacctcatgatgtgctggccaccctgttgaataatctgaaagtgcaggagcgccaaaaccgcgtctgcaccacagtggccattgccattgtcgccgagacctgcagcccttttactgtgctgccagcgctgatgaacgagtatcgtgtgcctgagctgaatgtacagaacggggtactgaaatcccttagctttctctttgaatatatcggcgaaatgggcaaggattatatttacgcagtgacgccacttttggaagacgccctcatggatcgggacttggtgcaccgacagaccgcgtccgccgtggtgcagcacatgagtctcggggtgtacggctttggctgcgaggattctctgaaccatctcctaaactatgtctggcccaacgtcttcgaaactagcccccacgtaatccaggcagtcatgggcgcactggagggtctgagagtggctatcggtccgtgcaggatgctccaatattgtttgcaaggacttttccacccagccagaaaagtaagggatgtgtattggaagatctataactctatatatatcggaagccaagacgctctgatcgctcactatcctcggatatataacgatgataaaaatacctacatccggtacgagctagattatattctgtag

SEQ ID NO: 242324 - DNA, 435 bp, synthetic construct
  misc_feature 1..435: note = Description of Artificial Sequence: Synthetic coding sequence
  source 1..435: mol_type = other DNA
atggcgaaaattgcaaagacccacgaggatatagaagcccagattcgcgagattcaaggaaaaaaagctgctctggatgaagcacagggggtgggtctggattcaacaggatactacgatcaagagatatatgggggttcagacagccgctttgcaggttatgtcacatccattgctgcaacagagttggaggacgacgacgatgattacagcagcagtacaagtctgctcggccagaagaaacccggttaccatgccccagtcgctctgcttaacgacatcccccagagcactgagcagtatgacccttttgcggagcacagaccgcctaaaatagctgaccgagaagacgaatacaaaaagcatagaagaaccatgataattagtccagagcggttggacccgtttgccgatgggttctacagtgccgcttag

SEQ ID NO: 242325 - DNA, 435 bp, synthetic construct
  misc_feature 1..435: note = Description of Artificial Sequence: Synthetic coding sequence
  source 1..435: mol_type = other DNA
atggccaagattgcaaagacgcacgaagatattgaggcccagatcagggaaattcaggggaagaaggccgctttagatgaagctcaaggcgtagggctggatagcacagggtactatgaccaggagatttacgggggttccgactccagattcgccggatatgtgaccagcattgctgccaccgagttggaagatgacgacgatgattactcttcctcaacttcgctgctgggccaaaaaaagcccggttaccacgcccctgtggccctgctgaacgatataccccaatcaacggaacagtatgacccctttgctgagcataggccacccaaaatcgctgaccgtgaagacgagtacaaaaaacaccgtcgaactatgatcatttcccccgagcggcttgacccgttcgccgacggcttttatagcgccgcatag

SEQ ID NO: 242326 - DNA, 2688 bp, synthetic construct
  misc_feature 1..2688: note = Description of Artificial Sequence: Synthetic coding sequence
  source 1..2688: mol_type = other DNA
atggccacagagcatcccgagcctccaaaagcagagctccagctgccccctccccctcctcccggacactatggggcatgggccgcacaggaattgcaggcaaagctggctgagattggggcacctatacagggaaacagggaagagctggttgagaggctccagtcttacacccgccagaccggaatagttctcaataggccggtgctgaggggggaggacggcgataaggcagcgcctcctcccatgagcgctcagctgcctgggattcccatgccccctcctccgctgggactgcccccattgcagcccccaccgcctccccctccaccccctcccggtcttggtctaggtttcccaatggcacatcctccaaatttgggaccccctcccccactgcgcgttggcgaacctgttgccctgagtgaggaggaaagactcaagctagcacagcagcaagccgctctgctcatgcagcaggaagaaagagccaaacagcagggtgaccatagcctcaaggagcacgagctgcttgaacaacagaaacgcgctgctgtgctcctcgaacaagagcgccagcaggaaatcgccaaaatgggcacaccagtgcccagacccccacaggacatgggccagattggggtgcggactccactgggcccaagggtcgcagctccagtggggcctgtgggaccaacacccacagtgctgccgatgggggcacctgtacccagaccaagaggtccgcctcccccacctggagacgagaacagagaaatggatgatccctcggttgggcctaagatcccccaggcactagaaaagatacttcagcttaaggagtctaggcaggaagagatgaactcacaacaggaagaggaggagatggagaccgatgcgaggtcaagtcttggacagagcgcatctgagacagaagaggacaccgttagcgtaagtaagaaagagaagaataggaagagaaggaaccgaaagaagaaaaagaagccacagcgagtgcgaggggtatcttcggagagttctggagatagggagaaagattcaaccagaagcaggggatccgactcccctgccgcagacgtcgagatcgagtatgtcacagaagaacccgaaatctacgaacctaatttcatattctttaaacgcattttcgaggccttcaaactcactgatgatgtgaagaaagagaaggagaaggagcccgagaagctggataaactggagaactctgccgctcctaagaagaaagggtttgaggaggaacacaaagattcagatgacgatagctccgacgacgaacaggagaagaaacctgaggctcccaaactttcgaaaaaaaagttacgcaggatgaatcgctttactgttgccgaattgaagcaactcgttgcgcgaccagatgtggtggagatgcatgacgtcactgcacaggaccccaagttactggtgcatctaaaagccacccgcaactctgtgcctgttcctcgccactggtgtttcaagcggaagtacctacagggcaagcgaggcattgagaagcctccattcgaactgcccgacttcatcaagagaacggggatccaggagatgcgcgaagcgctgcaagaaaaggaagagcagaaaacaatgaagagtaagatgcgcgagaaggttcgcccaaagatggggaaaattgacatcgactaccagaaacttcacgatgcttttttcaagtggcagaccaaacccaaactgacgattcacggtgacctgtattacgaggggaaagagtttgagacacgacttaaagagaaaaagcccggagatctgagcgatgagttacggatcagtctggggatgccagtgggacctaacgcccataaagtgcccccaccttggctcatcgccatgcagcggtatggcccaccaccaagctaccccaacctaaaaattcctggcctgaactctcccatccccgagtcctgctcattcggctaccatgccggaggctggggcaaacctcccgtggatgaaactggcaagcccttgtacggggatgtatttggtaccaatgccgcagagtttcaaacaaagacggaggaagaggagatagatagaaccccttggggggagctagagccgagtgacgaagagagctccgaagaagaagaggaggaggagtccgacgaagacaagcctgacgagactggattcatcacacccgcagactctggcctgatcactccagggggtttttcgtccgtcccggcaggtatggaaactcctgagctgatagagctaaggaagaagaagatcgaggaggcgatggacggatcagagacaccacagctcttcaccgttctcccagagaagaggaccgccactgtgggtggtgctatgatggggagtacacacatatacgatatgagcacggttatgtcacgcaaaggtcccgcaccagaactacaaggagttgaagtagcactagcccctgaagaacttgaattggatccaatggcaatgactcaaaaatacgaagagcacgtacgcgagcagcaagcccaagttgaaaaagaggatttttcggacatggtagcggagcacgccgctaagcaaaaacagaagaaacggaaagcgcagcctcaggattcaagaggcggttcaaagaagtacaaggaattcaaattttag

SEQ ID NO: 242327 - DNA, 2400 bp, synthetic construct
  misc_feature 1..2400: note = Description of Artificial Sequence: Synthetic coding sequence
  source 1..2400: mol_type = other DNA
gcgaagatggccactgaacatcccgaacctccaaaagctgagttacagttacccccaccgcctcccccaggccactatggcgcatgggctgcccaagagctccaagccaaattggccgaaataggtgcccctattcaaggtaacagagaagagctcgtggaaagactgcaatcatacacaagacagaccgggattgtgcttaatagacccgttcttcggggagaagatggagacaaggcagctccacctccaatgagcgctcagcttccgggaattcccatgccgcctcctcctctggggctgcccccattgcagcctcctccaccccctccaccccctccccctggcttgggcttaggattcccaatggctcaccctcctaacttaggaccgcctcccccacttcgcgtgggtgagcctgtagccctcagtgaagaggaaagattgaagttggcacagcagcaggcagcgttgctgatgcagcaggaggaaagggccaagcaaggagatcacagtctgaaagaacacgaattactggaacaacagaagcgcgcagcggttctgttggaacaagagcgccagcaagaggaagaagagatggaaacagacgcaaggtccagcctcgggcagtccgcctcagaaacagaggaggataccgtcagcgtaagcaagaaagaaaaaaaccggaagcgcagaaaccggaaaaaaaaaaaaaaaccccagcgcgttcgaggtgttagctccgagtcctctggggatcgcgagaaggacagtacacggtccaggggctctgattcccccgcagcggatgtcgaaatagagtatgtaacagaagaacctgagatctatgaacctaatttcattttttttaagaggatctttgaggcgttcaagctgaccgatgatgtgaaaaaagagaaagaaaaggagcccgagaagctggacaaactggagaattccgccgcacccaaaaagaaagggttcgaggaagagcacaaagacagcgatgatgacagttccgacgatgagcaggaaaagaagccggaagcccctaagctgtcaaagaagaagctgcgacgcatgaaccgattcaccgtggcagaactgaaacagctggtcgcacgaccagatgtagtggagatgcatgacgttactgcccaggaccctaaactcttggttcatctgaaagccacaagaaactctgtgcccgtgcccagacattggtgtttcaagcgcaaatacttgcagggcaaaaggggaatcgaaaaacccccatttgagcttcccgattttattaagcggactggcatccaggaaatgcgcgaagccctgcaagagaaagaagagcagaagacgatgaaatctaagatgcgcgaaaaggtacggcctaaaatgggcaagattgacatagattaccagaagctgcacgatgcttttttcaaatggcagacgaaacctaaacttactatacatggcgacctgtattacgaaggaaaggagtttgagacgaggctgaaggaaaaaaagccaggcgatctttccgacgagttgaggatttcgttgggaatgcccgtcggcccaaacgctcacaaggtgcccccaccctggttaattgcgatgcagcgctatggacctccaccgagctacccaaacttgaagatacctggtctgaacagcccaatcccagagagctgttcctttggataccatgcaggcggttggggcaagcccccagtcgatgaaacggggaaacccttgtacggagatgtgtttggcacgaatgctgctgaatttcaaactaagaccgaagaggaggagattgacaggaccccttggggcgagctggaaccatccgacgaagaaagctccgaggaggaggaggaggaagaatcagacgaagataagccggacgaaaccggattcatcacccctgcagattctggactgatcaccccgggagggttcagctctgtaccagcaggcatggaaacccccgagttgatagagctccgcaaaaaaaaaatcgaagaagcgatggatggaagcgagaccccgcagctcttcactgtgttacccgaaaagaggacggccaccgttggaggagctatgatggggtctactcatatttatgacatgtccactgtcatgtcccgcaaaggcccagcaccagagctccagggtgttgaggtagcgctggcaccagaagagcttgaattagacccgatggccatgacacagaaatatgaagaacatgtgagagagcaacaggctcaggtcgaaaaggaggatttcagcgacatggtggctgagcacgcagccaaacagaaacagaaaaaaaggaaggcccaacctcaagatagccgcggaggtagtaaaaaatataaagagttcaagttttag

SEQ ID NO: 242328 - DNA, 3654 bp, synthetic construct
  misc_feature 1..3654: note = Description of Artificial Sequence: Synthetic coding sequence
  source 1..3654: mol_type = other DNA
atgttcctatacaatctaactctgcagagagcaactggaatctcctttgcaattcacggcaatttcagtgggactaagcagcaggagatcgtggtctcacgtgggaaaatcctggagttactgcggcctgaccccaacaccggtaaggttcataccctgctaactgtggaagttttcggggtgattaggagcctcatggcattcaggttaaccgggggtactaaagactacatcgtggtgggttctgactctgggaggatcgtaatcctggagtatcagccctccaagaatatgttcgagaaaatacaccaggagacattcgggaaaagcggatgtcgacgaatcgtgcctgggcagttcctagctgtggaccccaaaggtcgggctgtaatgatctcagctatagaaaaacagaagctggtctatattcttaatagagacgccgctgctagactgaccatcagctctccattagaagctcacaaggccaacactctggtttaccacgtggtgggagtcgacgtgggattcgagaatccaatgttcgcctgtctggaaatggactacgaggaggccgacaacgaccccacaggcgaagccgcagcgaacacacagcagacgttaaccttctatgaactggatttggggcttaaccacgtagtgcgaaaatattcggaacccttggaggaacacgggaacttcctcatcacagtgcctggcggaagcgacgggccatctggagtcctcatatgctccgagaactatataacgtacaaaaattttggagaccagccagatatcaggtgtcccatccctaggagacggaatgatctggatgatcccgagagaggcatgatattcgtgtgcagtgccactcacaagacaaagtctatgttttttttcctggcacagacagagcagggagacatcttcaagatcactctggaaacagacgaggatatggtgaccgagattcggctgaagtacttcgacacagtgcctgtggcggcagccatgtgtgtgctaaaaactggcttcctattcgtggcctcagaatttggaaaccattatctgtatcaaatagctcacttaggagatgacgacgaggaaccagagttttccagcgccatgcccctcgaggagggggacacattctttttccagcctaggccattgaaaaacctagtactggttgatgaactggatagcctgtcaccaattcttttttgccagatcgcagatctggccaacgaggatacccctcagctgtacgttgcgtgtgggaggggcccaaggagtagtttaagagtactgagacacggtctcgaggtttccgagatggcagtgagtgaattacctgggaatccaaacgccgtgtggaccgtacggcgacacatagaagacgaatttgacgcgtatattatcgtgagctttgtcaacgctacattagttctctccatcggggagaccgtggaggaagtcacagactccggatttctggggacaactcctaccttatcctgcagtttactgggtgacgacgcgctggttcaggtctacccggacggaattcgccatatccgggcagacaagagggtaaacgaatggaagacccctggaaaaaagaccatcgtgaagtgcgctgttaatcagcggcaggtggtgatagccttaactggcggagaactggtctactttgagatggacccaagtggccagttgaatgagtataccgagaggaaggaaatgtctgccgacgtagtttgcatgtctttggctaacgtcccaccaggggagcagagatcacgatttttagccgtgggactggtagacaacactgtgagaatcatctcactggaccctagtgactgtctccaacccctatcaatgcaggcattgccagcacagcccgagagcctttgcatagtggaaatgggcggtacagagaagcaggacgaattgggcgagcggggttcgattggctttctgtatctcaacatcggactacaaaacggtgttcttcttagaacagtcctcgatcctgtcaccggcgatctcagcgatacacgcacgcgatatctgggctctagaccagtgaagcttttcagggtgagaatgcagggacaggaggctgtcctggcgatgagttctaggtcttggctcagttatagctatcagtccagattccacttgacaccgctgtcgtacgaaacgctggagtttgcgagtggtttcgcatctgagcagtgccccgaagggatcgtggccatttcaaccaataccctccgaattttagctctggagaagctgggggctgtcttcaatcaggtggcttttcctctgcaatacactcctcgcaagtttgtgatccaccccgagtcaaacaaccttatcatcatagaaaccgatcataacgcttatactgaggccacaaaagcccagagaaagcagcagatggctgaggagatggtggaagccgctggtgaggacgaaagagaactggccgctgagatggctgctgcgttcctgaacgagaatctccctgagagcatctttggagcaccaaaggccggaaacggccaatgggcctccgtgattagggtgatgaaccccatccagggcaatacattggatctcgtacagcttgagcagaatgaggccgcatttagtgtcgccgtgtgtaggttctccaatactggcgaggattggtacgttctggtcggcgtggcaaaagaccttattctcaatccccgatcagtggcaggtggctttgtatatacatataagcttgttaataatggtgaaaagctggagttcctccacaaaaccccagttgaggaggtgccagcagccatcgcccctttccaaggcagggttttaatcggagtgggcaagctactgagagtgtacgatttgggtaaaaagaaactcctgcggaagtgcgaaaataagcacatcgcaaattatattagtggcattcagactatcggacaccgagtgatcgtgagtgatgtccaggaatcattcatttgggtcagatacaaacgtaatgaaaatcaactcataatcttcgcagacgatacgtacccacggtgggttactactgcctccttgttggactatgacacagtcgccggagccgacaaattcgggaatatttgcgtagtccggctaccgccaaacacaaatgatgaagttgacgaagatcctacaggcaacaaagctctatgggatagaggtctgctgaacggggctagccagaaagcagaagtgataatgaattatcatgttggtgaaaccgtgctgtcacttcagaaaaccacgcttatcccaggaggaagcgagagcttagtatacaccactctgagcggcggtatcggcatactcgtcccatttacgagtcacgaggaccacgacttctttcagcacgtggaaatgcatctgagatccgaacaccccccactttgcggaagagaccatctgagctttagatcgtactattttcctgtgaagaacgtaatcgacggcgacctctgcgagcagttcaactctatggagccaaacaaacagaaaaacgtctcagaggagctggataggactccacctgaagtatctaaaaaactcgaagatatccgcactagatatgcattctag

SEQ ID NO: 242329 - DNA, 828 bp, synthetic construct
  misc_feature 1..828: note = Description of Artificial Sequence: Synthetic coding sequence
  source 1..828: mol_type = other DNA
atgttcctgtataacctcacactccagagggcaacaggcatcagttttgccatccatggaaatttttcaggcacaaagcaacaggaaattgtggtaagcagagggaagatcctggagctgctgcgtcctgatccaaacacagggaaggtgcacactcttttaacggtcgaggtgtttggagtaatacgaagcctcatggctttccgactcacagggggaactaaggattacatcgtcgtggggagcgatagtggtcggatcgtaatactcgagtaccagcccagcaaaaacatgtttgagaagatccaccaagagactttcggaaagtcaggttgccgcaggatcgtccctggtcagttcctcgccgtggaccccaaagggagagctgttatgatcagtgcaatcgagaagcagaagcttgtgtacattctgaaccgagacgccgcagccaggctcacaatttcttctcctctcgaggctcataaagcaaatacactagtgtaccatgttgtgggggtggatgtgggatttgagaacccaatgttcgcgtgcctagagatggattacgaagaggcggacaatgatcccacaggtgaagctgccgcaaatacccaacagaccctaaccttctacgagttggatctcggcctgaatcatgtggtaaggaagtacagcgaacccttggaagaacatgggaactttctgattaccgttcctgggggaagcgacgggccatctggtgtactcaacctgtctccccctttcccgaaagccatccccgctcttatttgtctggactcacctgtgtatttctgtacacacccttag

SEQ ID NO: 242330 - DNA, 1275 bp, synthetic construct
  misc_feature 1..1275: note = Description of Artificial Sequence: Synthetic coding sequence
  source 1..1275: mol_type = other DNA
atggccgctgggccaatcagcgaacgaaaccaagatgctacagtttatgtcggtggtctcgacgagaaagtgagcgaacctctgctttgggagctcttcctacaagctgggcctgtggttaatacgcacatgcccaaagatcgggtgacaggacagcaccaaggctatggttttgtggaatttctgtccgaggaggatgctgactacgcaatcaagattatgaatatgatcaagctctatggcaagcctatccgagtgaataaagcaagcgcacacaataaaaacctcgatgttggggcaaacatattcatagggaatctggatcccgagattgatgaaaaattgctgtatgacacattctccgcattcggtgtgatattacagactccaaaaataatgcgggatcctgacacaggaaatagtaaggggtatgccttcattaattttgcatccttcgatgccagcgatgcggcaatcgaggcgatgaatggccagtacttatgcaacagaccgatcacagtgagctatgcttttaagaaggatagcaagggtgaacggcatggcagtgctgcggagcggcttctggcagcccaaaaccctctgagtcaggccgaccgccctcaccaactgttcgctgacgctccccctcctccctcagcccctaatccggttgtttcttcacttggctccgggctgccaccccctggcatgccaccccctggctctttcccaccgccagtccctccgccaggggcactcccgccagggataccccctgctatgcccccaccacctatgccaccaggagctgccggtcacgggcctccatctgccggaactcctggtgccggacacccaggtcacggacactcccatcctcacccttttccccctgggggtatgccacacccaggcatgtctcagatgcagctggcccaccacggtccacacggcctaggtcatccacatgccggtccccctgggtcaggaggccagccgccacccagacctcctcctggtatgccacacccagggccacccccaatggggatgcccccacgcggaccgcctttcgggagccccatggggcacccagggccaatgcccccacatggaatgcgcggtccaccccctctcatgccaccccacggttatacgggtccgccacggccacccccttatggataccagagaggccctctgcctccacctaggcccacgcccaggccccctgtgccaccacggggacccctccgaggccctctcccccagtag

SEQ ID NO: 242331 - DNA, 573 bp, synthetic construct
  misc_feature 1..573: note = Description of Artificial Sequence: Synthetic coding sequence
  source 1..573: mol_type = other DNA
atgcctaaggatagggtaactggccagcatcagggttacggattcgtggaatttcttagcgaggaggacgccgattacgccataaagatcatgaacatgattaagctgtacggcaagcccattcgcgttaataaggccagtgctcacaataaaaatctcgatgtcggcgctaatatctttatcggcaaccttgacccagaaatagacgaaaaactgttgtacgacacctttagtgccttcggggtgatcctgcagactccgaaaattatgagggatcccgataccggcaactccaaggggtacgccttcatcaacttcgccagctttgacgccagtgacgctgcaatagaagcaatgaatggacagtatctgtgtaacaggccgattacggtgtcttacgcctttaaaaaagattctaaaggggaaagacatgggagcgctgctgagagactgctcgccgcacaaaaccctctgagccaagctgatagaccccatcagctgttcgccgacgctccgcctcctcccagcgctcctaatcccgtggtctcctccctggggagtgggctcccttag

SEQ ID NO: 242332 - DNA, 2124 bp, synthetic construct
  misc_feature 1..2124: note = Description of Artificial Sequence: Synthetic coding sequence
  source 1..2124: mol_type = other DNA
atgtcaagagaccgctttcgcagcaggggcggtggaggcggagggtttcaccgcagaggaggcggaggaggtcgagggggtctgcacgatttccgctcacctccacccggaatgggtctgaaccagaaccgaggcccaatgggtcctggtcccggacaatctggacccaagcccccaatacctccgcctcctccacaccagcagcaacagcagccccctccccagcaacctcctcctcagcagccccctccgcatcagcctcccccacatccacaaccccatcagcagcagcaacctcctcccccacctcaggacagcagcaaacccgtcgtagcccagggaccagggcctgctcccggtgtggggtctgctccacccgcaagctcttccgcgcctccagccaccccgcctacaagcggcgctcctcctgggagtggacctggacccacgcccacgcctccgcctgccgtcacctccgcacctccaggcgcaccaccccctactccaccatcctctggcgtccctacaacccccccacaggctggcggtccacccccaccacctgcggctgttcccggacctgggcctggccctaagcaggggcctggcccagggggacccaaaggtggcaaaatgcccggaggccctaaaccaggcggtgggccaggcctttcaacccctgggggacatcccaaaccgccacaccgcggagggggtgaaccacgagggggaagacagcatcacccaccctaccatcagcagcatcaccagggtccgccaccaggtggccctggcggaagatctgaagagaaaatctccgattctgaaggatttaaagccaatctctccctgttgagacggccaggcgaaaagacctacacgcaaaggtgccgcttgttcgtcggaaatcttcccgcagatatcacagaggatgagtttaaaagactgttcgccaaatatggtgagccgggagaggtgttcattaataaaggtaagggcttcggatttataaagctcgaatcgcgcgctctcgcagagatagccaaggccgaactcgatgataccccgatgcgcggaagacagctgagagtccgtttcgctacccacgctgctgcgctgagcgtccgcaacttgagcccttacgtcagcaatgagctgctggaggaagccttctctcaattcgggccaattgagcgggcagtcgttatcgtcgacgacagaggcaggtctacagggaagggtattgtggagtttgcttctaagccagccgcaagaaaggcgtttgagagatgttcagagggcgtgtttctgctgactaccacacctagaccagtgatcgtggaacccttggaacaactcgacgacgaggacgggctgcctgagaaactagctcagaagaatcccatgtaccagaaagaacgggagactcctcctagattcgcccagcacgggacattcgaatacgaatactcacaaaggtggaaaagcctggacgaaatggaaaagcagcaacgagagcaggtcgaaaaaaatatgaaggacgctaaggacaagctcgagtcagaaatggaagatgcttatcatgaacaccaggctaatctcctccgccaggacctgatgcgcagacaagaggaacttagaagaatggaggaactgcataaccaggaaatgcagaaaagaaaagaaatgcagctgaggcaggaggaggagagaaggcgacgggaggaagagatgatgattcggcagagggaaatggaggagcagatgcggagacagagggaggaaagctattcacgcatgggatatatggacccgagagaaagggacatgagaatgggcggagggggagccatgaacatgggggacccctacggcagcggcggacagaaattccctcctctggggggaggtggcggaatcggctatgaggctaaccctggggttccaccggctactatgtccggcagcatgatgggaagcgatatgaggactgagagatttggacagggtggagccggacccgtggggggacagggccctaggggtatgggacctgggacccctgcagggtatggacggggaagggaggagtatgagggaccaaataaaaagccaagattttag

SEQ ID NO: 242333 - DNA, 1875 bp, synthetic construct
  misc_feature 1..1875: note = Description of Artificial Sequence: Synthetic coding sequence
  source 1..1875: mol_type = other DNA
atgaacagcggcggagggttcgggctcggtctggggttcggcctgacacctactagtgtcattcaagtcaccaatctgtcctcagctgttacgtcggagcagatgcgcactctgttttctttcttgggggagatagaggagctccgtctctatccaccagacaacgcccctttagcgtttagcagcaaggtgtgttatgtcaaattccgcgacccatcaagcgtcggtgtggcccagcaccttacaaacaccgtgttcatagaccgggctctgatagtggtgccctgcgctgagggcaaaattcccgaggaatctaaggcgctgtccttgctagcccctgcccctaccatgacctccctcatgccaggtgcgggtctgctgcctattccaacacctaatcccttgaccacactcggtgtgtctctctccagcttgggggcaattcctgcagctgctctggatccgaacatcgcaacactgggggaaataccgcagcctcccctcatgggaaatgtcgacccctcaaaaatcgacgagattcgcaggaccgtctacgtcggaaacctgaatagtcagaccaccactgcagaccagctgctagaattctttaaacaggtaggggaagtcaaattcgtgaggatggccggagatgaaacccaaccaacccggttcgctttcgtggaatttgccgaccaaaatagtgtgccacgagccttggcctttaatggtgtgatgttcggcgataggcccctgaaaataaaccacagtaataatgccattgtcaaaccccctgagatgacaccccaggctgctgctaaagagctggaggaagtgatgaagcgagtaagggaggctcagtcgtttatcagtgccgctatcgaacctgaatctggcaaatctaacgagaggaaggggggaaggagtaggagccatacgcgcagcaaatcacgctcctcatcaaagagccatagtcggcgaaagagatcacaaagtaagcataggagcaggtcccacaacaggagtagaagcagacaaaaggatagaagaaggtcaaaatcacctcataagaagagatctaagtctcgcgagagacgcaagtctcggagtagaagccacagcagggataagcgtaaggacacaagagagaagataaaagaaaaagagagagtgaaggagaaggaccgagagaaagagagggagagagagaaggaaagagaaaaagagaaggaacgcggtaaaaataaggaccgtgacaaggagcgcgaaaaagacagagaaaaggataaagagaaagaccgagagagggaacgtgagaaggagcacgaaaaggatcgtgataaagagaaggaaaaggagcaggacaaagagaaggagagggaaaaggatcggtctaaggagattgatgaaaaacgaaaaaaagacaagaagtcaaggaccccacccaggagttataacgcgtcccgcagaagccgttcctccagcagggaaaggaggaggaggagaagccgtagttcatctcggtcaccccgaacttccaagaccatcaagcgcaagtcctcacgctcaccgagcccacgtagccgcaataagaaggacaagaaacgcgaaaaagagagagaccatattagcgaaaggagggagcgggaaaggagcacctccatgcgaaagagcagtaacgatagggatgggaaggagaaactagagaagaactctactagtcttaaagagaaggaacataataaagagcccgattccagtgtgtccaaggaagtagatgataaggacgccccacggactgaagaaaataaaatccagcataacggaaactgtcagctgaacgaagagaatttgtcaaccaaaaccgaggctgtatag

SEQ ID NO: 242334 - DNA, 1527 bp, synthetic construct
  misc_feature 1..1527: note = Description of Artificial Sequence: Synthetic coding sequence
  source 1..1527: mol_type = other DNA
atgacgtcattaatgcctggggcaggtcttctaccgattccgacccctaaccctcttaccactctcggcgtctctctgtcgtctcttggtgctatacccgcagcagccctagatcccaacatcgctacactgggcgaaatcccgcagcctccactgatgggtaacgtagatccctccaaaattgatgaaatccggaggaccgtgtacgtcgggaacctgaattcccagacaacaactgcagaccagttactggagtttttcaagcaggtgggcgaggttaaattcgtcagaatggctggtgacgagacccaacctactagattcgccttcgtggagttcgctgaccagaactccgtaccccgtgcactagcatttaacggggtgatgtttggggatcgcccacttaagattaatcactctaacaacgcaatcgtgaagcctcccgagatgacaccccaggcggcagcgaaggaactggaggaggttatgaagagggtaagagaggctcagagctttatttctgcagcaatagagccggaatccgggaagtcaaacgagagaaaaggtggcagatcgcgcagccatactcgctccaagagccgttcaagctcgaaaagccactcccgaaggaaaaggtcccagagtaaacatcgatcaagatctcacaaccggagccggtccaggcagaaggacaggagaagatctaaatctcctcacaagaaacgctctaagagcagagaacgacgaaagagcaggtcccgctcacacagccgcgacaagcggaaggacacccgggagaaaatcaaggagaaagaaagggtgaaagaaaaagaccgcgagaaggagcgggagcgggaaaaagagagggagaaagaaaaagagagaggcaaaaacaaggatcgcgataaagagagggagaaggatcgcgaaaaggataaggagaaggatcgcgagagagaacgcgagaaggagcatgaaaaagacagagacaaagaaaaagagaaggagcaggacaaggagaaggagcgggagaaggatcggagtaaggagatcgatgagaagcgcaaaaaggacaaaaagagtcgaacccctccaaggagctacaacgcatccagaagatcacgctcatcatcgcgggaacgccgaagaagaagaagtagatctagctcaaggagtcctaggacaagcaagactataaaaaggaagtcatcccggagtcctagtcctcggagcagaaacaagaaggacaaaaagagggagaaggagcgtgaccatatctcagaacgtagggaaagagaacggtccacaagtatgcgaaaatccagtaatgaccgggatggaaaagaaaaactggaaaaaaattcaacttccctgaaagagaaggaacacaacaaggagccagatagctcagtctccaaggaggtcgacgacaaagatgcgccaaggactgaggagaacaaaattcaacataacggaaactgtcagttgaatgaggagaaccttagcacaaagaccgaggcagtatag

SEQ ID NO: 242335 - DNA, 231 bp, synthetic construct
  misc_feature 1..231: note = Description of Artificial Sequence: Synthetic coding sequence
  source 1..231: mol_type = other DNA
atgacaagcttgatgcctggagcagggcttctccctatacctactcctaatcccctgaccactctaggagtcagcctgtcttctctgggcgcaattccggctgcagctcttgaccccaacatagctacattgggagagataccacagccccctctgatgggcaacgtggaccccagtaaaatagatgaaatacgtaggaccgtttatgtgggaaacctgaacagtcagtag

SEQ ID NO: 242336 - DNA, 1545 bp, synthetic construct
  misc_feature 1..1545: note = Description of Artificial Sequence: Synthetic coding sequence
  source 1..1545: mol_type = other DNA
atgaattcaggcggtggctttgggctggggttgggatttggactcacgcccacctctgtaattcaggtgacaaatttatcttcggctgtgacttctgagcagatgcggaccctgttctcatttttgggtgagatagaggagctcaggctgtatcctcccgacaatgccccactggccttctctagcaaagtctgctacgtcaagttcagagacccttcttccgtgggcgtggcacagcaccttactaataccgtcttcatagatagggctctgatcgttgtgccatgtgcagaaggtaagattcctgaagagtcaaaggccctgagcttactggctccagccccaactatgacaagcctcatgcctggagccggtcttcttcccatacccactcctaatccattgacgacccttggcgtgtcgctatcctcccttggagccatccccgctgccgctcttgacccaaatatcgcgacactcggggaaatcccacagccccctcttatgggcaacgtggatccgtctaaaatagatgagatccgcaggacggtctatgtgggcaatctaaactctcagaccaccactgccgaccagctgcttgaattctttaaacaggttggcgaagttaaatttgtgcggatggctggtgacgagacgcagcctactaggttcgccttcgtggaatttgccgaccagaacagcgtcccaagggctctggcgttcaatggcgtgatgttcggcgataggcccctcaagattaaccactccaacaacgctatcgtaaagccgccagaaatgacaccgcaagcggctgctaaagaactggaagaggtcatgaaacgagttagggaggctcagtcttttataagtgctgcaattgagccagagagcggcaagagcaacgagcggaaaggaggccgatccaggtcccataccaggtcaaagtcccgaagcagctcaaaatcacatagcaggaggaagaggtcgcaaagtaagcaccgtagccgaagtcacaaccgctcccggtccagacagaaggataggagaagaagcaagtctccacacaagaaaagatctaaaagtagggagcggaggaaatcaagatccagaagccactcccgcgataagcggaaggacactcgggaaaagattaaagagaaggagagagtgaaagagaaagatagggagaaggaaagagagagagagaaggagcgtgagaaggaaaaggaacgcggaaagaataaagacagggacaaggaacgagagaaggacagagaaaaggataaagagaaggaccgtgaacgagaacgcgagaaagagcacgagaaggacagggataaggagaaagaaaaggaacaagataaggagaaagagagagaaaaagataggagtaaggagattgatgagaagagaaaaaaagacaagaaccccgagcaccaccctggagtgaccatgcatagagaagatctggtggttcctgccggaaaaggagttggtggaggcgcaggagtacttcccgatcggcaggagcaccagaagccttag

SEQ ID NO: 242337 - DNA, 213 bp, synthetic construct
  misc_feature 1..213: note = Description of Artificial Sequence: Synthetic coding sequence
  source 1..213: mol_type = other DNA
atgtcggaaaagaagcagcccgtggatttgggtctgcttgaggaagatgacgagtttgaggagtttccagcggaagattgggctggattagatgaagacgaggacgcccatgtttgggaagataattgggacgacgataatgtcgaagacgatttcagtaatcaattgagagcagagttggagaaacacggctacaaaatggaaacatcatag

SEQ ID NO: 242338 - DNA, 1077 bp, synthetic construct
  misc_feature 1..1077: note = Description of Artificial Sequence: Synthetic coding sequence
  source 1..1077: mol_type = other DNA
atggccttcgcccctatgggccctgaggcttctttttttgatgtactggataggcacagggagagccttctggccgctttgagacgtggcggtagggaacctccaacaggcggatcgcgcctggcttcacggttcgaagacagtgtgggtctgcagatggtttctcactgtaccaccagaaaaattaaatctgactcgcctaagtccgcccagaagttttctcttatcctgaagattttatccatgatctataaattagtgcagtcaaacacatacgcaaccaagcgcgacatctattacacagattcccagctatttggtaaccagacagtcgtggacaatataatcaacgatatctcatgtatgctgaaggtgtcgcgtcgcagcctccacattctcagcacatcaaaggggctgatcgctgggaatcttaggtacatcgaggaagacggaacgaaggtgaactgcacgtgtggggctactgctgtggctgtgccaagcaatatccagggtatcaggaatctggttaccgacgccaaatttgtgcttatcgtggaaaaggacgccacatttcagcggctgctggacgacaacttctgcaacaagcttagtccctgtataatgatcaccgggaagggcgtgcccgaccttaatacacgcttactggtcaagaaactgtgggatacctttcacgtgccggtattcaccctggtagatgctgatccccatggcattgagattatgtgtatctacaaatacggctccatgagcatgtcctttgaagcacatcacttgacagttccagcaatcaggtggcttggtctgctgccttccgacttaaaacggttgaacgtccccaaggattctctgataccattgacgaagcgagaccaaatgaagctcgacagcatcttgagaaggccttacgtgacctgccagccattttggcgcaaagagatggaaatcatggccgactcaaaaatgaaagcagagatccaggccctgactttcctgtctagcgactacctctcaagggtctacctgccgaacaaactcaaatttgggggatggatatag

SEQ ID NO: 242339 - DNA, 1065 bp, synthetic construct
  misc_feature 1..1065: note = Description of Artificial Sequence: Synthetic coding sequence
  source 1..1065: mol_type = other DNA
atggccttcgccccaatggggccagaggcctcgtttttcgatgtattagaccggcacagagagagtcttctcgcggctttgcggaggggtgggagggagccacctaccggcggaagtcgccttgcttcacgatttgaagattccgtgggtttacagatggtgtcacactgtaccacccggaagattaaatctgatagccccaaatctgctcagaagttctcattgatcctcaagatcttgtcaatgatctacaaattagtgcagtccaatacctacgcgaccaaacgggatatttactatactgacagccagctgttcggaaaccaaacagtggtcgataacataatcaacgatatcagctgcatgctgaaggtgtctaggagatcactgcacatcctcagcacttcaaagggactgatcgctggaaacttgcgttacatcgaggaggacggaactaaggtcaattgtacgtgtggggctactgcagtagccgtgccatctaacattcaagggattaggaacgctaaatttgtgttaatcgtcgagaaggatgccacctttcagcgcttgttggacgataacttctgtaataagttatcaccctgtatcatgatcaccggtaaaggagtgccagacttaaatactcgcttactggttaaaaaactgtgggacaccttccacgttcctgtgtttacactggtcgatgcagatccccatgggatcgagattatgtgtatttacaagtatggctccatgtccatgtcctttgaagcacatcacctgaccgtccccgcaataagatggcttggactcctacctagcgacctcaaacggttgaacgtacctaaagatagcctgattcccctgaccaaacgggatcagatgaagcttgacagtattttgagaaggccatacgtgacatgccagcccttctggaggaaggagatggagatcatggccgatagcaagatgaaagccgaaatacaggcgctgactttcctttcctcagactacctctcaagggtttacctgccaaacaaactgaagtttgggggttggatttag

SEQ ID NO: 242340 - DNA, 1191 bp, synthetic construct
  misc_feature 1..1191: note = Description of Artificial Sequence: Synthetic coding sequence
  source 1..1191: mol_type = other DNA
atggcctttgctcccatgggtccagaggccagcttctttgacgtccttgaccgacatcgcgaatctctgttggctgccctgagaagaggaggaagagagccgcctacgggcggtagtcggctggcgagctcatcagaggtacttgctagtatagaaaatattatccaggatatcatcaccagcctggctcgaaatgaggccccagccttcaccattgacaatcggagttcttgggaaaacattaaatttgaagactctgttggattacagatggtgagccattgcacaactcgaaaaattaagagcgactcacctaagtccgctcagaagttctctctgattttgaagatcctctcgatgatttataagctcgtgcaaagtaacacatatgcaacaaagagggatatatattatacagatagccagctctttggaaatcagacagtggtagataatattatcaatgatattagctgtatgttgaaggtgagccgacgaagcctgcatattcttagtacttcaaagggtctgatcgcaggcaatctgaggtacatagaagaagatggcacaaaggtgaactgcacttgcggagccaccgcagttgccgttccctcgaacatacaagggattaggaacttagtgaccgacgctaaatttgtgctgatcgtcgagaaggacgccacattccagcggctgctggacgataacttttgcaacaagctgtctccctgcatcatgataaccggcaaaggcgtccccgatctcaacacgcgcctcctggtcaagaagctttgggatacctttcacgtgcccgttttcacgcttgtcgacgccgaccctcacgggatcgaaatcatgtgcatctacaagtacggcagcatgtccatgtctttcgaggcacaccatctcactgttcctgctattcggtggctggggctgttgccaagtgatctgaagcgactaaatgtgccaaaggattccctgattcctctaacgaagcgagaccaaatgaagctggacagcatccttagacggccttatgttacatgccagcctttttggaggaaggagatggagattatggccgattccaaaatgaaggctgagattcaggccctcacatttcttagttctgattaccttagtagggtgtacctgccgaataagctgaagttcggagggtggatctag

SEQ ID NO: 242341 - DNA, 813 bp, synthetic construct
  misc_feature 1..813: note = Description of Artificial Sequence: Synthetic coding sequence
  source 1..813: mol_type = other DNA
ctgctcgctgcacttcggagaggcggacgcgaacccccaactggaggttcccgccttgcctcatcctctgaggtgctagcaagtatagagaacatcatccaggacataattacctcgcttgcccgaaacgaggcacccgcatttactatcgacaaccgatcctcttgggagaacataaagtttgaggactcagtgggactgcagatggtgtctcactgtaccactcggaaaatcaaatcggactcaccaaaatccgcccaaaagttttctctgatcttgaaaatcctgagtatgatttataaattggtgcaaagcaacacttacgccaccaagcgcgacatctattacactgatagccaactgtttggaaatcagacagtggtagataatataattaatgatatttcctgcatgttgaaggtgtcgcgcagaagcttacacattctctcgactagcaaaggattgatcgccggtaacttacgctacatagaggaggatggaacgaaagttaattgtacatgcggggctacagcagtggcagtgccaagtaacattcaggggattcgtatcaccgatgccaagttcgtgctgatcgtggagaaagacgccactttccaacggctgttagacgacaacttttgcaacaagctgtcaccctgcatcatgatcacaggtaagggtgtccctgatctgaataccagactgttagtgaagaagctgtgggataccttccatgtgccagtgtttactttagtagatgccgacccacatggaatcgagatcatgtgcatatacaagtacggttccatgtag

SEQ ID NO: 242342 - DNA, 996 bp, synthetic construct
  misc_feature 1..996: note = Description of Artificial Sequence: Synthetic coding sequence
  source 1..996: mol_type = other DNA
atggagaatccatcaccagctgctgctctgggaaaagccctgtgtgccttactcctggccacactgggggctgccggacagcctcttggcggagagtccatttgctctgcccgagccttagccaagtattcaatcacatttaccggaaaatggtcgcaaactgctttcccaaagcagtatcctctcttccgacctccagcacaatggagttccctgctgggcgcagcgcactccagcgactatagcatgtggcggaagaaccagtacgtttccaatggactgagagactttgccgaaaggggagaggcctgggccctgatgaaggaaattgaagctgcaggcgaggcgctgcagtccgtgcacgccgtcttttcagcccctgccgtgccttcgggaacaggacagacgagcgcagaactggaggttcaacggcgtcacagccttgtcagcttcgtggtgagaatcgttccctcgccagattggtttgttggtgtcgactccctggatttgtgtgatggagataggtggagggaacaggccgcattggacctgtacccctatgatgctggcacagattcaggctttaccttctcctcgccaaacttcgccacgattccccaagacacagtgacagagatcacaagctcttctccttctcatccagcaaattctttctattatcctcgcttaaaagcactaccacctatcgcaagagtcacactcgtgagacttaggcaaagtccccgagctttcattcccccagctcccgtcctgccatcccgagataatgagatcgtggatagcgcaagcgtccctgaaactcctttagattgcgaggtctccttgtggtcttcgtgggggctttgcggaggacactgtggccgtctgggcaccaagtcccggacccgctacgtccgagtccaaccggctaacaacggatctccatgtcccgaactagaagaggaggctgaatgtgtgcctgataactgtgtctag

SEQ ID NO: 242343 - DNA, 996 bp, synthetic construct
  misc_feature 1..996: note = Description of Artificial Sequence: Synthetic coding sequence
  source 1..996: mol_type = other DNA
atggaaaatccatctcccgcagctgccctggggaaggcactgtgcgctcttctgcttgccacgctgggcgcagcaggccagcctctcggtggggagtcaatatgctcagctcgagctctggccaaatacagcatcaccttcaccgggaagtggagtcagaccgcctttcctaaacagtatcctctctttcgccctccagcccaatggtcatcactgttaggcgcagcccacagcagcgattactccatgtggagaaaaaatcagtacgtgtccaatggtctgcgggactttgctgagagaggtgaggcgtgggctctaatgaaagaaatagaggccgcaggagaggccctgcagagtgtgcatgctgtattctccgcacccgctgtgccatctggtaccggccagacgtccgccgaacttgaggtccagcgcaggcacagcttggtgagctttgtcgtcagaattgtgccaagtccagattggttcgtgggcgtcgattctctggacttatgcgatggggacaggtggcgggaacaagccgctctggatctgtatccctatgatgccggaacagatagcgggtttaccttctccagccctaatttcgccactatcccccaagacaccgtgactgaaatcacttcgtctagtccaagtcatccagcgaacagcttctattatcccagactgaaagccctacccccaattgcaagggttacattagtccgtctgcggcaatcacccagggccttcatccctcctgcgcctgtgctgccatctcgcgacaatgaaatcgtggacagcgcctccgttcccgagacccccttagactgtgaagtctcactctggagttcttggggactttgcgggggtcactgtggtcgtctaggcaccaaaagccggacccggtacgtccgggtgcagcctgccaacaacggatctccatgccccgagctcgaagaagaggccgagtgcgtcccagataactgcgtctag

SEQ ID NO: 242344 - DNA, 186 bp, synthetic construct
  misc_feature 1..186: note = Description of Artificial Sequence: Synthetic coding sequence
  source 1..186: mol_type = other DNA
atggaaaaccccagtccagcagccgctctggggaaggctctctgtgccctgctgctggcaactcttggtgccgcaggccagcctctcggaggagagtcaatctgctccgcgagagccctggccaagtactcaatcacctttaccggcaaatggtcacagactgcatttcctaagcagtatccctag

SEQ ID NO: 242345 - DNA, 327 bp, synthetic construct
  misc_feature 1..327: note = Description of Artificial Sequence: Synthetic coding sequence
  source 1..327: mol_type = other DNA
atggagaacccgagtccagccgcagcactgggcaaagccctctgtgcccttctgttggcaactctaggagcagcgggtcaaccattgggcggagagagcatttgttccgcacgggcactggcaaagtactcaatcacattcacaggaaagtggtctcagacagcatttcccaaacagtatcccttgtttcggcctccggcacagtggagcagcctcttgggggcagctcactcttctgactactcaatgtggagaaagaatcaatacgtgagcaatggcttgagggactttgctgagcgcggtgaggcctgggctctgatgaaatag

SEQ ID NO: 242346 - DNA, 54 bp, synthetic construct
  misc_feature 1..54: note = Description of Artificial Sequence: Synthetic coding sequence
  source 1..54: mol_type = other DNA
atggagaatcccagtccggcagcagcgctcggaaaagcattgtgcgccttgtag

SEQ ID NO: 242347 - DNA, 27 bp, synthetic construct
  misc_feature 1..27: note = Description of Artificial Sequence: Synthetic coding sequence
  source 1..27: mol_type = other DNA
atggaaaaccccagccctgcagcttag

SEQ ID NO: 242348 - DNA, 51 bp, synthetic construct
  misc_feature 1..51: note = Description of Artificial Sequence: Synthetic coding sequence
  source 1..51: mol_type = other DNA
atggagaatcccagccctgccgcagctctgggaaaggccttgtgcgcgtag

SEQ ID NO: 242349 - DNA, 75 bp, synthetic construct
  misc_feature 1..75: note = Description of Artificial Sequence: Synthetic coding sequence
  source 1..75: mol_type = other DNA
atggaaaacccctccccggcagcagccctcggtaaagccctgtgtgcgctcctgttggcaactttaggcgcttag

SEQ ID NO: 242350 - DNA, 195 bp, synthetic construct
  misc_feature 1..195: note = Description of Artificial Sequence: Synthetic coding sequence
  source 1..195: mol_type = other DNA
atggagaacccgagtccagctgcggctctcggcaaagccctttgcgccctgctacttgctacactcggggcagccggtcagcctctgggaggagagtctatttgttcagccagagctctcgcaaagtatagcatcacgttcaccggcaaatggtcgcagactgcattccccaaacagtatccgctgttccggtag

SEQ ID NO: 242351 - DNA, 960 bp, synthetic construct
  misc_feature 1..960: note = Description of Artificial Sequence: Synthetic coding sequence
  source 1..960: mol_type = other DNA
atggacccgcagaatcagcacgggtcggggtcctccctggtcgtgatccaacagccctcactagatagtcgccagcgacttgactacgaaagggagatccagcccaccgccatactgagcctggatcagataaaggccatcaggggtagcaatgaatataccgaggggccttccgttgttaaaagaccagctccccgaacggccccacggcaagagaaacatgagcgcacacacgagattatccccataaacgttaacaacaactacgagcaccggcatacctcccacctgggtcatgcggttctgccctcaaacgctcggggtccaatactcagccgatccacttctacaggaagcgcagcctcttcagggtcaaactcttcggccagcagtgagcagggtctgctcgggcgttcaccaccaacccgaccagttcccggacacagaagtgagcgtgcaatccgcacacagcccaaacaactaatagtggatgacctcaaagggtctctgaaggaggacttaacgcagcacaagtttatatgcgaacaatgtggtaagtgtaagtgcggagaatgcactgctcccaggaccttaccctcatgcctcgcctgcaaccgacagtgcctgtgttctgccgagtccatggttgaatatggcacctgtatgtgtctggtaaagggaatcttctatcactgttccaatgacgacgagggagacagctattctgacaatccctgcagttgttcccaaagtcattgttgtagcagatacctgtgcatgggagccatgtccctgttcttgccttgcttactatgctacccccctgctaagggatgtctgaaactctgcaggagatgctacgactggatccaccgtcccggatgtcgatgtaagaacagcaacacagtgtattgtaagctcgaatcttgtccctctagaggccagggcaagccatcatag

SEQ ID NO: 242352 - DNA, 960 bp, synthetic construct
  misc_feature 1..960: note = Description of Artificial Sequence: Synthetic coding sequence
  source 1..960: mol_type = other DNA
atggacccacaaaatcagcacggtagcggttccagtctggtcgtgatccagcaaccatccctggattcccgccaaaggctggactatgagagagagatccagcccactgcgatattgagcctcgaccagatcaaagcaatccgtggcagtaatgagtacacagaaggcccaagcgtggtaaaaaggcccgctcccagaacagcccctaggcaggagaagcatgagagaactcacgagataatcccaatcaacgtgaataacaactatgaacacaggcacaccagccacctaggacatgcagtgctgccatcaaatgccagggggccaatccttagcaggagcacttctaccggatccgcggctagttcaggttccaatagctccgcttcaagtgaacagggacttcttggcaggagtcctcccacgcgtcccgtgccaggacataggtcagagcgagcaattcgaactcagcctaaacagctgattgttgacgacttgaagggcagcctgaaggaggatctgacccaacacaaattcatatgcgagcaatgcggaaagtgtaagtgcggagagtgtactgctcccagaaccctcccctcttgcctggcttgtaatagacagtgcttatgttccgccgagtcaatggtcgaatacgggacatgcatgtgcttggtgaaaggaatcttctatcactgttctaacgatgacgaaggggacagctactctgacaatccttgctcttgtagccagagccactgttgttctaggtacttgtgtatgggggctatgtctctgttcttaccgtgtctcttgtgctacccccctgccaagggctgccttaaactgtgtcgccgttgctatgactggatccatagacctgggtgccggtgtaagaacagcaatacagtgtactgtaagctagaatcatgcccatcccggggacagggcaagccgtcctag

SEQ ID NO: 242353 - DNA, 204 bp, synthetic construct
  misc_feature 1..204: note = Description of Artificial Sequence: Synthetic coding sequence
  source 1..204: mol_type = other DNA
atggacccacagaaccagcacggcagcggcagtagtctggttgtgatacagcagccaagtttagatagtagacagcgattagattacgaacgcgaaatccagcctacagcgattctgagcctggaccaaattaaggctatacggggtagcaatgaatacacggagggaccgtccgtggtcaagcggccagcgccacgtacatag

SEQ ID NO: 242354 - DNA, 630 bp, synthetic construct
  misc_feature 1..630: note = Description of Artificial Sequence: Synthetic coding sequence
  source 1..630: mol_type = other DNA
atggatcctcagaaccaacacgggagcggcagcagcttggtggtgatccagcagccctcattggacagcaggcagcggctggattacgaaagggaaattcagccaactgccatcctttcactggatcagatcaaggccattcgcggaagcaacgagtacacagagggcccttctgtagttaagagacctgcacctcggaccgctcctcgtcaggagaagcatgagcggacacatgaaattatacccatcaacgtgaataataattacgagcaccgacacacctcgcacctaggacacgctgttctgcctagcaacgcccgaggccctatcctgagcaggtcgacatcaacggggtccgctgcctcttctggaagtaatagctcggcaagctcagagcagggcctgctggggcgatccccacccacacgcccagtgcctgggcatcgatccgagagggccatacgcactcagccaaaacagctcatagttgatgacttgaagggaagtctcaaagaagatttgactcagcacaagtttatttgtgaacaatgtgggaagtgtaagtgcggtgaatgcacagcacctcggacactgccttcatgccttgcctgtaacaggcagtgtctctag

SEQ ID NO: 242355 - DNA, 108 bp, synthetic construct
  misc_feature 1..108: note = Description of Artificial Sequence: Synthetic coding sequence
  source 1..108: mol_type = other DNA
atggatccacagaaccagcacggttcaggaagttcactggtcgttattcagcagccctctctggactctcgacagagattagactacgagcgagaaatacagccctag

SEQ ID NO: 242356 - DNA, 948 bp, synthetic construct
  misc_feature 1..948: note = Description of Artificial Sequence: Synthetic coding sequence
  source 1..948: mol_type = other DNA
atggaagcccgtgcccagagtggtaacggtagtcaaccactgctccaaaccccacgagacggcggacgacaaaggggtgaaccagaccctcgggatgccctgacccaacaggtccacgttctgtctttggaccagattagggcaatccggaacaccaacgagtacaccgagggtcccaccgttgtgccaaggcccggacttaaaccagcccctaggcctagtacccagcataaacacgagagactgcatggcctgcctgagcacagacagcccccacgcctgcaacattcccaggtacattcctctgcgagggccccactaagtaggagcattagtactgtcagcagcggaagccgctctagtactaggaccagcacttcctcttcttcttccgaacaaagactcttgggctcctcttttagtagtggaccagtggccgacggaatcatccgcgtgcaaccaaagagtgagttgaaacctggtgagctaaagcctctttcaaaagaggacctcggcctgcatgcttatagatgcgaagattgcggcaagtgtaaatgcaaggagtgcacctatcctagaccacttccgtcagattggatctgcgataagcagtgcctctgttccgcccagaacgtaatcgattatggaacctgcgtgtgttgtgtgaagggcttattttatcactgctctaacgatgatgaggataactgcgcggataacccctgctcctgttcccagtctcactgctgtacgaggtggtccgcaatgggcgtcatgagtttgttccttccttgtctctggtgctacttgcctgcaaaaggctgtctgaagttgtgtcaaggttgttacgatagagtcaatcggcctggatgccgctgcaaaaattccaatacagtgtgttgtaaggttcccaccgtgcccccaaggaactttgagaaaccaacatag

SEQ ID NO: 242357 - DNA, 948 bp, synthetic construct
  misc_feature 1..948: note = Description of Artificial Sequence: Synthetic coding sequence
  source 1..948: mol_type = other DNA
atggaggccagagctcaatcgggaaatggttcacagcctttgctgcagacccccagagatggcggaaggcagaggggggagccagacccgagagacgccctgacacagcaggttcatgtcctgtcactggatcagatcagagcaattagaaacactaatgagtacaccgagggaccgaccgtggtccctcgtcctgggctgaagccggctcctcgcccatctacacagcataagcacgagcgcctgcacggcttacctgagcatcgccaaccacccaggttgcagcattcgcaggtccactccagtgctagggccccactcagtcgatccatttctacagtgagctccggcagtaggagttccaccagaacctccacgagctcaagctctagtgaacaaaggcttctcgggagtagtttttcctctgggcctgtcgctgacggaatcatcagagtgcagcccaaaagtgaattaaagccgggtgaacttaagccattatcaaaggaagacctcggactgcatgcttaccggtgtgaggattgcggaaaatgcaagtgtaaggagtgcacctatcccagaccactgccctccgattggatctgcgataaacagtgtctatgctccgcccagaatgtgattgattacggtacttgtgtgtgttgcgtcaaggggctgttttatcactgcagtaacgacgacgaagataactgtgctgacaatccatgctcctgttcccagtcacattgttgtacgcgctggtcagcaatgggagtaatgagccttttcctgccctgtttatggtgttacctcccggcaaaaggatgtctaaagctgtgccaagggtgttacgaccgggtcaatcgaccaggctgcaggtgtaagaattcaaacactgtgtgctgcaaggtccccactgtgcctcctcgaaacttcgaaaagcccacttag

SEQ ID NO: 242358 - DNA, 948 bp, synthetic construct
  misc_feature 1..948: note = Description of Artificial Sequence: Synthetic coding sequence
  source 1..948: mol_type = other DNA
atggaagccagggcacagtccggtaatggttcacaacctctcctgcagacaccaagggacgggggtcggcaaagaggcgaacccgacccccgagacgcattaacacagcaggttcacgtgttaagtctcgatcagattcgcgctatcaggaacacaaacgagtacaccgagggccctaccgtggtgccacggcctgggctcaaacccgctcccagaccctccacgcagcataaacacgaacgcctccatggcctgcctgagcaccgccagcccccaaggctccagcacagtcaggtccattcatctgcgcgagcgccactctctagaagcatatcaactgtgtcgtccggaagtagaagtagcacccggaccagcacatccagcagcagctccgaacagaggctgctgggcagcagcttttcatccggcccagtggccgacggcatcatcagggtgcagcctaaaagcgaactgaagccgggtgagctgaagccactgtctaaagaggacctgggcctgcacgcgtaccgctgcgaagattgcggaaagtgcaaatgtaaggagtgtacttacccaaggcctcttccaagtgactggatatgcgataagcaatgcctgtgtagtgcccagaatgtgatcgactacggtacctgcgtctgctgcgtgaagggactattttaccattgttcgaatgatgatgaagacaactgcgctgataatccatgcagctgctctcagtcccactgctgtacacgctggtcggcaatgggagtgatgtcactgttcctgccatgcctatggtgctacctcccggctaaaggctgcctaaaactgtgccagggatgttacgatcgggtcaacagacccggatgccgctgcaagaacagcaacacagtatgttgcaaagtgccaaccgtgcctccacgaaactttgaaaagccaacgtag

SEQ ID NO: 242359 - DNA, 1062 bp, synthetic construct
  misc_feature 1..1062: note = Description of Artificial Sequence: Synthetic coding sequence
  source 1..1062: mol_type = other DNA
atggaagcaagagcccagtcaggcaatgggtcccagcctctgctgcaaaccccaagggacggagggcgtcagagaggggagcctgatccccgagacgctctcacacagcaggtccacgttttgagtctcgaccagataagggccataagaaacactaacgaatataccgaaggcccaacagtcgttccaaggcccggtctgaaacccgcaccccgtccgagcacccaacacaaacacgagcgcctccacggcctgcccgaacacaggcagccacctcggctgcagcactcccaggtacacagtagtgctagagcccctctgtctagatcaataagtaccgtgagctcaggaagtcgctcttctactcgaacaagtacatcttctagcagttctgagcagagactgctggggtcttcgttcagtagtggtcccgtggctgacggaatcattcgcgtgcaacccaaatcagagctgaaacctggagaattaaaacccctgagcaaagaggacctaggcctgcacgcatatcgatgcgaggactgcggtaagtgcaagtgtaaggaatgtacctatccccgacccctgccttccgactggatctgtgacaagcagtgtctatgttcggcgcaaaacgtgattgactacggcacttgcgtctgttgcgtgaagggcctgttctatcactgcagtaatgatgacgaagacaattgcgccgacaacccttgtagttgttctcagtctcactgttgtacgcgatggtccgctatgggagtgatgtccctgtttctgccgtgtctgtggtgctacctccctgccaaggggtgtcttaaattatgccaagggtgttacgaccgagtgaatcgcccaggctgtaggtgtaagaactccaacacagtgtgttgcaaggtgcccactgtccctcccagaactttaaagaaccaacatagcattatcaatcaggagtattatagcaacgaagattttttcttcctttttctgatacatatctgcaaccagctgaatagctataaccttggcactgtcaatcgtaaggttggctag

SEQ ID NO: 242360 - DNA, 867 bp, synthetic construct
  misc_feature 1..867: note = Description of Artificial Sequence: Synthetic coding sequence
  source 1..867: mol_type = other DNA
atggacgcggctgttacagatgatttccaacaaattctgccgatcgagcaactgcgttcgactcacgccagcaatgactatgtggagagaccccctgccccatgcaagcaggccctgtcctccccatcattgatagttcagacacacaaatctgactggtctctggcaaccatgcccacatccctgcccagatcgctttcacagtgccaccagctacagcctctgccccagcatctttcccagagttctatcgcatccagtatgtcacactcgactactgctagcgatcagagacttctcgcctccataaccccgtccccctctggacagagcatcattagaacgcaaccaggggcaggtgtccatcccaaagcagacggtgccctgaagggagaagcagaacaatcagcaggccacccttctgaacacctcttcatatgtgaagaatgtggtcggtgtaagtgcgttccctgtactgcggctagacccttaccttcttgttggctctgcaaccaaaggtgtctctgctcggctgaatccctactggattatggaacgtgcttgtgctgtgtcaaagggcttttttatcactgttctaccgacgatgaagataattgcgccgatgagccctgctcatgtgggccatcaagctgcttcgttcggtgggctgctatgagtctgatttctctttttcttccttgcctctgctgctatttgcctaccaggggctgtctgcacctgtgtcagcaggggtacgattctttgaggcgcccaggctgccgatgcaaacgacacactaatacagtgtgccgcaagatctcttctggaagcgccccttttcccaaagcccaggaaaagtccgtgtag

SEQ ID NO: 242361 - DNA, 378 bp, synthetic construct
  misc_feature 1..378: note = Description of Artificial Sequence: Synthetic coding sequence
  source 1..378: mol_type = other DNA
atggacgctgcagtgactgacgatttccagcagatccttcccatcgagcaactccggtcaacccacgcaagtaacgattacgttgaaagaccaccggctccatgtaagcaagctttgagctcccctagtctgattgtgcagacccacaagtccgactggtctctcgccacaatgccaaccagtttgcctaggagcttaagccagtgtcatcaactccaacccctaccacagcacttaagccagagcagcattgctagtagcatgagccatagcacgaccgcctcaagcactacagccccactgatgatgaagacaacagtgctgatgtcccctgcattggtgggattggttcttgcgttgtccgctggtcagccttag

SEQ ID NO: 242362 - DNA, 969 bp, synthetic construct
  misc_feature 1..969: note = Description of Artificial Sequence: Synthetic coding sequence
  source 1..969: mol_type = other DNA
atgttgtcccccttaccaaccgggccacttgaggcctgcttctccgttcagagtcggacttcttctcctatggagccgcctatcccgcagagtgcacctctgaccccaaattcagtaatggtgcagcctcttctcgatagccgcatgtcacatagcagactccagcaccccctcacaattcttccgatcgaccaggtgaagactagtcatgtggaaaatgattatatcgacaacccatccctcgccctgactacaggcccaaaacgaacgcgtggcggagcacctgaattagcccctacccctgccaggtgtgaccaagatgtgacgcatcattggatctccttcagtggaagaccatcaagcgtttcctcttcgtctagcaccagctctgatcagagactgcttgatcacatggccccacccccagtggcagaccaggccagtcctagggcagtgcgaatccagcctaaagtggttcactgtcagccccttgatctgaagggaccagccgtgccacctgaactcgataaacattttctcctatgtgaggcctgtggaaaatgcaagtgcaaagaatgtgcttcacctcgcactctaccgtcgtgctgggtttgtaatcaggagtgcttgtgcagtgctcaaactcttgttaactacggtacctgcatgtgtcttgttcaggggatcttctaccactgcacaaacgaagatgatgaggggagctgcgccgatcatccttgctcttgctcacgaagcaattgttgtgcgaggtggtcatttatgggagccctgtcagtggtgcttccgtgcctgctgtgctacttaccagcaactggctgcgtgaaattggcacagcggggttacgaccgtctgagaagacctggctgccggtgcaaacatactaactctgtcatatgcaaggccgctagcggggacgccaagacatctcgcccagacaagccattctag

SEQ ID NO: 242363 - DNA, 321 bp, synthetic construct
  misc_feature 1..321: note = Description of Artificial Sequence: Synthetic coding sequence
  source 1..321: mol_type = other DNA
atggaacctccaattccacaatcagcccctttaactcctaacagcgtaatggtgcagcccctgctagacagtcggatgagtcactccagactccaacatcccctgacaattctgccaatagaccaggtgaaaacttcgcatgtcgagaacgactacattgacaatccctcattggctctgacgaccggccctaagcggacacgtggaggagctccagagctagcacctaccccggcaaggtgcgatcaggacgtcacacatcactggattagcttttctggtcggccttgtagtgctacctgcctgccacccgctgcctag

SEQ ID NO: 242364 - DNA, 900 bp, synthetic construct
  misc_feature 1..900: note = Description of Artificial Sequence: Synthetic coding sequence
  source 1..900: mol_type = other DNA
atggagcctcctattcctcagagtgccccattaacacccaattctgtgatggtgcaacccctgctcgattcacgaatgtcacactcaagacttcaacatcctcttactatactgccaatcgaccaggtcaagacttctcatgtggagaacgattacattgataatccatccctcgctttaactactggccctaaacggacacggggaggagcccctgagttagccccaactcccgcaaggtgcgatcaggacgtcacacaccactggatctctttctccggaagaccatccagtgtgtcttcctcatcatctacaagctccgatcagagactgctggaccacatggcgcctccaccagtcgctgatcaagcgagccctagggcagtccgtatccagcccaaggtcgttcattgtcaaccactagacctgaaaggacccgctgtgccccctgaactcgataaacacttcctgctgtgcgaggcgtgcgggaagtgcaaatgtaaagagtgtgccagccccagaacactccctagctgctgggtgtgcaatcaagaatgcctttgctccgcccagacactcgtaaattacggtacctgcatgtgtctggtgcagggcatcttttaccactgcactaacgaggatgacgagggatcctgtgccgaccacccatgttcatgtagccggtctaactgctgcgctcggtggtctttcatgggcgctctgtcagtggtacttccgtgcctcctgtgttatctgccggcaacagggtgcgtcaagctagcacagagagggtacgatcgtctgcgaaggccagggtgccgttgtaaacatacgaatagcgtgatttgcaaggccgcatccggggatgctaagacatcccgccctgataaacccttctag

SEQ ID NO: 242365 - DNA, 153 bp, synthetic construct
  misc_feature 1..153: note = Description of Artificial Sequence: Synthetic coding sequence
  source 1..153: mol_type = other DNA
atggaaccccctatcccacagagcgctcccttaacccctaattccgtgatggttcaacctctcctggactcccggatgtcccactccagactgcagcatccactcactattctgcccatagaccaagtcaagacatcccacgttgagaactag

SEQ ID NO: 242366 - DNA, 1335 bp, synthetic construct
  misc_feature 1..1335: note = Description of Artificial Sequence: Synthetic coding sequence
  source 1..1335: mol_type = other DNA
atgtccgaggaaactgcgacatcagacaatgacaactcctacgcgagagtgagagccgtcgtcatgactcgagacgattcgagtggcggttggctcccactcggcggatcagggctgtctagcgtaaccgtatttaaggtgccgcaccaggaagaaaacggctgtgcagatttcttcataaggggcgaacgcctgagagataagatggtggtgctcgagtgcatgttaaagaaggatctaatttacaacaaagtgacacccacattccatcactggaaaatagatgataaaaaattcggactgactttccagtctccagccgacgccagggcctttgaccgaggcatcaggcgggctatcgaggacatatctcagggatgtccggaatccaagaacgaggccgagggtgcagatgatctgcaggcgaacgaggaggactcgtccagctcccttgttaaggaccacctgtttcaacaagagactgtggttacgagtgaaccatataggtcatccaacatacggccaagcccattcgaggatctgaatgcccgacgcgtgtatatgcagagtcaggctaatcagatcacattcggacagccaggcttagacatccagagcagaagtatggagtacgttcaacgacaaatttctaaggagtgtggtagcctgaaatctcagaaccgcgtgcctctgaaaagtattcggcacgtgtcatttcaagacgaggacgagattgtccgcataaacccacgcgatattctaatcaggagatatgcggactatagacatccagacatgtggaagaatgacctcgagcgcgacgacgctgactccagtatacagttttctaaaccggactctaagaaatccgattatctgtactcttgcggtgatgagactaagctgtcatctcctaaagatagcgtcgtctttaaaacccagcctagctcactaaagatcaagaaatcaaaacgaagaaaggaagatggtgagcggtctcgttgcgtctattgtcaggaacgatttaaccatgaggaaaatgtccggggtaagtgtcaagatgcacctgacccaattaaacggtgtatatatcaggtttcgtgcatgctttgcgccgagtccatgctttaccactgcatgagtgatagcgaaggtgatttctctgatccatgctcctgcgacaccagtgatgataagttctgtctgaggtggttggccctcgtggcgctgtccttcatcgtgccttgtatgtgttgctacgttccattgcgaatgtgtcacaggtgtggagaagcgtgcgggtgttgcgggggtaagcacaaggccgcaggctag

SEQ ID NO: 242367 - DNA, 1257 bp, synthetic construct
  misc_feature 1..1257: note = Description of Artificial Sequence: Synthetic coding sequence
  source 1..1257: mol_type = other DNA
atgaccgaggagacccatccagacgacgatagctacatagttagagttaaagccgtcgtaatgacccgcgacgacagcagcggcggatggttcccacaggagggtgggggaatctcacgagtgggggtctgcaaggtgatgcatcctgaggggaatggcagatctgggtttttaatccacggtgagcgacagaaagataaacttgtcgttttggagtgctacgtgcgcaaggacctcgtttatacaaaggcaaatccaacgttccaccactggaaggtggataaccggaaatttggccttacatttcagtctccagccgacgctagagcctttgaccgaggagtgagaaaagccatcgaggatcttattgagggatccaccacaagcagtagtaccatccacaatgaggcagagctgggagacgatgacgtttttaccaccgcgaccgacagcagctctaattcttctcagaaacgcgagcaacccactagaacaatttcaagccctacaagctgcgagcatagaagaatttataccctggggcacctccacgactcgtacccaacagatcactatcacctggaccaaccaatgcctcgcccttataggcaggtctcgtttcccgatgacgacgaagaaattgtaagaatcaaccctagggagaagatctggatgactgggtatgaggattaccggcatgctccggtgcgcggaaagtaccctgatccatctgaggacgcggatagcagctatgtcaggttcgccaaaggcgaagtccccaagcacgattataactacccttacgttgattcctctgactttggtttgggcgaggacccaaagggtagggggggatctgtgattaaaactcagccatcgagaggcaagtcacgccgacgcaaagaggacggagagcgcagccggtgcgtgtactgtcgtgacatgtttaatcatgaggaaaataggaggggacactgtcaggacgctcccgactctgtgagaacttgtattaggagagtgagctgcatgtggtgtgctgacagtatgctgtaccattgcatgagtgaccccgaaggggactacaccgatccatgtagctgcgacacgtccgatgagaagttctgccttcgttggatggcccttatagctttaagcttcttggccccatgcatgtgttgctatctgcctttgcgcgcttgctatcattgtggggtaatgtgcagatgctgcgggggaaaacacaaggcggcagcatag

SEQ ID NO: 242368 - DNA, 351 bp, synthetic construct
  misc_feature 1..351: note = Description of Artificial Sequence: Synthetic coding sequence
  source 1..351: mol_type = other DNA
atgactgaagaaacccatccggatgatgactcgtatatcgtcagagtgaaagccgttgtgatgacacgcgatgacagcagcggcggttggttcccacaggagggaggcggtatctcacgtgtcggggtttgcaaagtgatgcaccccgaagggaatggcaggtcagggttcctgatccacggggaacggcagaaagacaaactggtcgtgctggagtgctatgtgcggaaagaccttgtgtacacaaaggcaaaccctacctttcatcattggaaggtagacaatagaaaattcgggctcacctttcagtctcctgccgatgctcgtgccttcgaccggggtgttcgttag

SEQ ID NO: 242369 - DNA, 1248 bp, synthetic construct
  misc_feature 1..1248: note = Description of Artificial Sequence: Synthetic coding sequence
  source 1..1248: mol_type = other DNA
atggcaagccccggaagcgattcctacatcgtccgcgtcaaagctgtagtgatgaccagagacgacagctcgggtggatggtttccccaggagggcggtggtatatcaagagtcggggtgtgtaaggtgatgcaccctgaagggaacggacgttccggtttcctgatacacggcgagcgtcagaaagataaactggtggtgttagagtgttacgtccggaaagacctggtgtacacaaaggccaaccccacttttcatcattggaaggtggataataggaagttcggtttgacatttcaatccccggctgacgccagagcctttgatcgcggagttagaaaagccatagaggacctgattgagggcagcaccacctcatcatctactatccataacgaagcagagctgggtgacgatgacgtctttactaccgccacggactcctccagcaactcctcccagaagcgcgaacagcccacacggacaatctctagccctacatcttgcgagcacaggaggatttatacattagggcacttacacgactcatatcctacagatcattaccatctcgaccagcctatgccacgcccatatcgccaagtgtcctttcccgacgatgacgaagagattgttcggatcaacccaagagagaagatatggatgacgggttatgaggattacagacacgctcctgtgcgcggaaaatacccagacccttcggaagacgcagatagttcgtacgtaagattcgcgaagggcgaagttcccaaacatgactacaattatccatacgttgactctagcgattttgggctaggtgaggatcccaagggtcgaggaggatcggttatcaagacgcagcccagcagggggaaatcccgccgacgtaaggaagatggagaacggtcacgatgcgtgtactgtagagacatgtttaaccacgaggaaaatagacgcggtcattgccaagatgcaccggactccgtgagaacttgcattcgtcgggtcagttgcatgtggtgcgccgactctatgctctaccactgtatgagcgatcctgaaggcgattataccgacccctgcagttgcgacacttccgacgagaagttttgcctccgatggatggctttgatagcccttagctttttggccccttgcatgtgttgctatctacccctgagagcttgttatcattgcggcgtgatgtgccgttgttgtggtgggaaacataaggccgctgcatag

SEQ ID NO: 242370 - DNA, 1233 bp, synthetic construct
  misc_feature 1..1233: note = Description of Artificial Sequence: Synthetic coding sequence
  source 1..1233: mol_type = other DNA
atggtgcgggtaagagccgtcgtcatggctcgggatgattcctctggtggttggctgccagtagggggaggcggtctcagtcaagtgagtgtttgccgggtgaggggtgctaggcccgaaggaggagcgaggcaaggacactacgtaatacatggcgagaggctgcgggatcagaaaacaacactggaatgcaccctgaaaccgggtctggtgtacaataaggtcaaccctatattccaccattggagtttgggagactgcaaattcgggctgaccttccagtctcctgctgaagccgacgagttccaaaaaagcctgttagccgctctagctgctctcgggcgtgggagtctgactcctagcagttcttcaagcagcagtagcccttctcaggataccgccgagaccccgtgtcccctcacgagtcatgtggattccgactcctccagcagccattctcgccaggagacaccgccaagtgcggctgccgcacccatcataactatggaaagtgccagtgggtttgggcctaccacacccccacaacgcaggcggtcctctgcacagtcttaccccccactgctcccctttacaggcattccagagccttctgaacctcttgcgggagccggaggactgggatggggtggaagggggtatgaagactacaggcgatccggtcctccagcccctctggcgctgtcaacttgcgtagttcgatttgcgaaaaccggcgcactcaggggcgcagccttgggaccacccgcagcccttcccgctcccttaaccgaggcagcccctcctgctcccccagctcgcccaccccctgggcctggcccatcaagcgcccctgctaaggcgagccccgaagcagaagaagcagccaggtgtgttcactgcagggctctgttcagacgcagggcggacgggaggggcggaaggtgtgcagaggcccctgaccccggtcgacttctcgtcaggcgtctctcctgtctttggtgcgccgaaagcctgctgtaccattgcctttctgacgctgagggtgatttcagcgacccatgtgcctgtgaacccggacacccccgacccgcagccagatgggccgctctggcagccctgagtctggccgtgccctgcctgtgctgttacgcccctctgcgcgcttgccactgggtggcagcgcgttgtgggtgcgccggttgtggcggtcggcatgaggaggctgcccgatag

SEQ ID NO: 242371 - DNA, 459 bp, synthetic construct
  misc_feature 1..459: note = Description of Artificial Sequence: Synthetic coding sequence
  source 1..459: mol_type = other DNA
atggttagagtgcgcgcagtggttatggccagagatgacagtagcgggggttggctgcccgtcggaggcggagggctgagtcaggtctctgtttgccgcgttcgcggtgcaaggcccgagggtggggctcggcagggccattatgtcattcatggcgaacggctgcgcgaccaaaaaaccacactagaatgtaccctgaagcctggcctggtgtacaataaggtgaacccaattttccaccactggtcattaggggactgtaagtttggtttgacatttcagagcccggcagaagcagacgaatttcagaaaagcctcctggccgcactagccgcattaggacggggatccctaactccttcctcaagctcatcctcatcaagtccttctcaggataccgccgagacaccgtgtccgttgacactctcacagtactttagacatatgctctgtccctag

SEQ ID NO: 242372 - DNA, 1725 bp, synthetic construct
  misc_feature 1..1725: note = Description of Artificial Sequence: Synthetic coding sequence
  source 1..1725: mol_type = other DNA
atgtggacatttctcggaatcgcaacatttacctatttctacaagaagtttggtgacttcatcacattggccaaccgcgaggtgctgctttgtgtgctggtgttcctcagcctgggactggtgttgtcatacagatgccggcacagaaacggtggtttgctgggcaggcagcagtcagggtcacaattcgccttatttagcgatattctgagtggactgcccttcatcggctttttttgggccaaaagccctcctgaatctgagaacaaggaacaactggaagcacgccgtcggagaaaaggcactaacatcagtgaaacatcattaattggtactgctgcttgcacaagcacaagtagccagaacgaccccgaggttatcattgtgggcgcaggcgtgttggggtcagctttagctgctgtactctcgagggatggcaggaaggtgacagttatcgagcgggacctgaaggagccggatagaatagttggtgaattcttgcaaccagggggttaccatgtgctgaaagatctcgggttaggggacacagttgagggcctggacgctcaggtcgtaaacggctacatgatacacgatcaggagagcaaatccgaagtgcagataccgtatcctctgtcagaaaacaaccaggtgcaatccggcagagcctttcaccacgggagatttatcatgagcctccgaaaggccgcaatggcggagcctaatgccaaattcatcgagggcgtcgtgctacaactgctggaggaagacgacgtggtgatgggcgtacagtataaggataaggagaccggcgacatcaaagagctccacgcccctttgacagtagtcgccgacgggctgttcagcaaatttcgcaagtcattagtttcaaataaggtgagcgtgtcttcgcacttcgtcggttttctcatgaaaaacgctccacagttcaaggcgaaccacgccgaactgatcctggcaaatcctagccccgtgctaatttatcagatcagcagcagtgagactcgagtgctcgtcgatataaggggagagatgccaaggaacctgagggagtatatggtggaaaaaatctacccacaaatacctgaccatctgaaggagccatttttggaggctaccgataattcccatctaagaagcatgcccgcttctttcctaccacctagctctgtaaagaagaggggcgtgctgctacttggggacgcttacaacatgcgacaccctcttacaggtggaggaatgactgtggcctttaaagatatcaagctgtggcgcaaattgcttaagggcatccctgatctttatgacgacgccgctatcttcgaggccaagaaatctttctactgggctcgcaagacttcccacagctttgtcgtcaatattctggcccaggccctgtacgaactattttccgcaactgacgactcgctccaccagctccggaaggcgtgttttttgtactttaagctcggtggggaatgtgtcgcgggtccagtcggcctgctttccgtactctcaccgaatcctctggtgctcattggtcatttctttgcagtggcgatttacgcagtgtacttctgcttcaagtctgaaccttggatcaccaagccacgggctctgctgtcctccggcgctgtgctttacaaagcctgctcagtgattttcccactcatctactcggagatgaaatatatggtccactag

SEQ ID NO: 242373 - DNA, 1440 bp, synthetic construct
  misc_feature 1..1440: note = Description of Artificial Sequence: Synthetic coding sequence
  source 1..1440: mol_type = other DNA
atgctgaggaggaagggcacaaacatttccgagacctcactgatcggtactgcggcttgtacttccactagctcccagaacgacccagaagttatcattgtaggtgcaggggtgttgggcagcgccctggcagcggtgctgagccgcgacgggaggaaagtcaccgtgatagagcgtgatttaaaagagcctgataggatcgtcggagagtttctgcagccgggaggctatcacgtgctgaaagacttgggcctcggggatactgtggaggggttggatgcccaagttgtgaacggttacatgatccacgatcaggagagtaaatccgaagtccaaatcccctatcccttgagtgagaataatcaggtccagtctggtagggcctttcatcatgggagattcataatgtccttaagaaaggcagccatggccgaacctaacgcaaagttcatagagggagttgtgctgcagctgcttgaagaagatgacgtggtgatgggcgtccagtacaaagacaaagaaacgggggacataaaagaactgcacgcacccctgacggtcgtagccgacggcctgttctctaagtttcgaaagtcactcgtgtcaaacaaagtttccgttagtagccattttgtggggtttcttatgaaaaatgcacctcaatttaaagctaaccacgcagagcttattcttgctaacccaagtcccgttctgatctatcaaatatcaagcagcgaaactagagtcctggtcgacatccgaggcgagatgccacgtaatctacgcgagtacatggtggagaagatatatcctcaaattcctgaccacctgaaagagcctttcctcgaggcaacagacaactcccatctgcggtctatgccagcatctttcctccctccttcatcggtcaagaagcggggagtgctgcttctgggtgacgcatataacatgaggcacccccttacaggaggcggtatgacagtcgcattcaaagacattaagttgtggcgtaaactcctcaaaggtatcccagatctgtacgatgatgcagccatattcgaagcaaaaaagtcattctattgggcacgcaaaacctcccactcttttgttgtcaatatacttgcacaggccttgtacgaactgttctcagccactgacgactcactgcaccagttaaggaaggcctgctttttatactttaagcttggtggcgaatgcgtagcgggtccagtcggcctgctatctgttttatcccccaaccctctcgtcctgatcggccacttctttgccgttgcgatttatgctgtctacttttgtttcaaaagcgagccttggatcacaaagcctcgcgcactcctctccagcggtgctgtgctgtacaaagcttgctcggtgattttccctctcatatactccgagatgaagtacatggtccattag

SEQ ID NO: 242374 - DNA, 1140 bp, synthetic construct
  misc_feature 1..1140: note = Description of Artificial Sequence: Synthetic coding sequence
  source 1..1140: mol_type = other DNA
atgatccacgaccaagaatccaaatctgaggtgcaaataccttaccctctcagcgagaacaaccaagtgcaatcgggtagggcattccatcacggccgtttcatcatgtccctacgcaaagcagccatggccgagcccaatgcgaaattcattgaaggggtggtgctgcagctgttagaagaggacgatgtagtgatgggcgtgcaatacaaggacaaagagacaggggacattaaagaactgcacgctccactgacggtggtggcagacggccttttcagcaaattccggaagtctctggtctcgaataaggtcagcgtgtcatctcactttgtcggcttcttgatgaagaatgccccacaatttaaggcgaaccatgccgaattgatcctggctaatccatcacctgtcctaatatatcagatcagttcttccgagacacgcgtccttgtagacatacgcggagaaatgccgaggaatcttagagagtatatggtggaaaaaatctacccgcagatccccgaccatctcaaagagccatttctggaagccaccgataattcccatctgcgcagcatgccagcgagttttctcccaccgagcagcgtgaagaaaaggggtgtacttttgctcggagacgcctacaatatgcgccacccccttactggcggaggcatgaccgtagcctttaaagacattaaactgtggaggaaactgctgaagggcatcccagacctctacgacgacgcagccatttttgaagccaaaaagagtttctattgggcacgtaagacatcccatagttttgtggtcaatatccttgcgcaggccctgtatgagttattcagcgcgactgatgattccctgcaccagttacgtaaagcctgcttcttgtacttcaaactaggcggagaatgcgtcgctggtccggtgggacttttgagtgtcctgtcaccaaatcccctggtgttgatagggcacttcttcgccgtcgcaatatatgccgtttacttctgcttcaagagtgaaccgtggattacaaaacccagggccctgctgagctcaggagccgtactttataaggcctgtagtgtgatatttcctctgatttactctgagatgaagtacatggttcactag

SEQ ID NO: 242375 - DNA, 822 bp, synthetic construct
  misc_feature 1..822: note = Description of Artificial Sequence: Synthetic coding sequence
  source 1..822: mol_type = other DNA
atgaaaaaaacccaaacgtggattttgacttgtatctatttgcagttgttactgttcaatccacttgtcaaaactgagggtatctgtcgcaaccgggtgaccaataatgtgaaggacgtgactaaattagtcgcaaatctacccaaagattatatgatcactctgaagtatgttccaggaatggatgtgctgcctagtcattgttggatctcagaaatggtggtccagctcagtgatagtctaacagacctcctagacaaattctctaatatcagtgaagggctgtctaattactctatcatcgataaacttgtcaatatcgtggatgacttggtggagtgcgtgaaggaaaattcgagtaaagacctgaaaaagagtttcaagagtcctgagccgcgactgtttacccccgaagaatttttcagaatttttaacaggtcgatcgacgctttcaaagactttgtcgtcgcctcagaaacctccgactgtgtcgtgtcatcaactctgagccccgagaaggatagtcgagtctctgtaaccaagccgttcatgctgccacctgtcgcagcatcaagtctcaggaacgattcatcgtcatccaatcggaaggctaaaaatccgccaggagactcttccctacactgggcagctatggcactgccagctcttttcagcctgatcattggttttgcgtttggtgctctctactggaagaagagacagccctcattgacccgggcagtggagaatatccaaatcaacgaggaagataacgaaatctctatgctacaggaaaaggaacgggaattccaggaagtgtag

SEQ ID NO: 242376 - DNA, 2100 bp, synthetic construct
  misc_feature 1..2100: note = Description of Artificial Sequence: Synthetic coding sequence
  source 1..2100: mol_type = other DNA
atgagactgaggcgcttagggcaggggggtaggtgttatcgcggactgtggccactgaggcatactcgcccatggagtagcccgggtgaatacgagtgggagtatgacgaagaggaggagaaaaaccaactggagatcgagcgcctggaggaacaattgtccatcaatgtctacgactacaattgtcacgttgatctaattcgcctgttacgtctggaaggagagctgaccaaggtgcggatggcaagacagaaaatgagcgagatttttcccctgacggaggaattatggctggaatggttgcacgatgagatctcgatggctcaggacggacttgatagagaacacgtgtacgatctgtttgaaaaagcagtaaaagactacatatgcccaaacatctggttagagtatgggcagtactccgtggggggaataggccagaagggcggtctggagaaagttcggtcagtattcgaacgagcactgtccagtgtggggctgcatatgaccaaaggactcgcgctgtgggaggcctatcgcgagtttgagtccgccatagttgaggctgccagattggagaaagtgcactcattgttcaggcgccaactggcaatccctctgtatgatatggaggccacctttgctgagtacgaggagtggtctgaggacccgatcccagaatctgtgatccagaactacaataaggcattacagcaactggaaaagtacaaaccctacgaggaggctctactgcaggcagaggcgccacggctggcggaataccaggcatatatcgactttgagatgaaaatcggcgacccagcacggatccagctgatctttgaaagggccctggtggagaactgtctcgtgcctgatctgtggattcgctacagtcagtatttagatcggcagctgaaggttaaagacctggtcctatccgtgcacaatagagcgatcaggaattgcccctggacggtcgctctatggtcacgctatctgctagccatggaacggcatggggtggaccaccaggtgatttccgtgacttttgaaaaagccctcaatgcagggtttatacaggcaactgattacgtggagatttggcaggcctacttggactacctcaggcggagagtggactttaagcaggactcctcaaaagagctggaggagctgcgcgctgcattcactcgcgctttagagtatctcaagcaggaagtggaggaacggtttaacgagtctggggatccatcgtgtgtgattatgcagaattgggctagaatagaggccagattatgcaataacatgcagaaggccagagaattgtgggacagcattatgacccgcggaaacgctaaatatgccaacatgtggcttgagtactacaacctggaacgcgcacacggagacacccagcattgcaggaaggccctccatcgcgcagtccagtgcacgtccgactacccagaacatgtgtgtgaagtgttattgactatggagcggactgaaggctctttggaagactgggatattgctgtgcagaaaacagagacccgtctggcacgagtgaacgagcaacgtatgaaggcagccgaaaaggaagcagctctggtacagcaggaggaagaaaaggcagagcagcgcaaaagagccagggcagaaaaaaaggctctgaagaagaaaaagaagattagaggaccagagaagcgcggagcagacgaagacgatgaaaaagagtggggcgacgatgaagaagcctttcaaacacagaagggtcgcgaacaacacccatgtagctggcgtaataccaagtgcaggagctcctctagagcgcgatgggagatgtgctgcaggcgctgtggcgctccgtttgaagcagagggagagggctcgcttcctgaggagggccacgctcagggagccgctaggcagcagcaaggtcaacaccacaggctgtgccagcagccggcactgcagcatgctggcgctggccacgaggcccaggccacactgcggggtctttggggcggaggccctgacccaacccacctgcaacagccatggggattccctcgtttattgctgcgaggggtctag

SEQ ID NO: 242377 - DNA, 2784 bp, synthetic construct
  misc_feature 1..2784: note = Description of Artificial Sequence: Synthetic coding sequence
  source 1..2784: mol_type = other DNA
atggcaaccgccgctgagacctcagcttccgagcccgaggccgaaagcaaggccggtcccaaagctgacggagaagaggatgaggtgaaagcggctcgcacccgacgcaaggtcttgtccagggccgtggccgctgcaacttacaaaactatgggaccagcctgggaccagcaggaggagggagtgagtgagtccgacggtgacgagtacgctatggcgtcaagtgctgagtcctcaccaggagagtatgagtgggaatacgatgaggaggaagagaaaaaccagttagagatagaacgcttggaggaacagttgagtatcaatgtgtatgactataactgtcacgtggacctcatcaggttactgcgccttgaaggcgagctgactaaagtgcgtatggccagacagaaaatgagcgagattttcccgctcaccgaggaactttggctggaatggctacatgatgaaatttctatggctcaagatggcctggacagagaacacgtatacgacctatttgagaaggccgttaaggactacatttgccccaacatttggctggaatacgggcaatacagcgtcggagggatcggccagaaagggggactagagaaggtgcgcagcgttttcgagcgcgctctctcctcagtggggctccacatgaccaagggcttggccctctgggaggcataccgtgagtttgaatcggccatcgtagaggctgcccgactcgaaaaggtgcactctctgtttcggagacagctggctattcctctgtacgacatggaggctacctttgctgaatacgaggagtggagcgaggaccctatcccagagagcgtgatccaaaattacaataaggccttacagcagctcgagaagtacaaaccatatgaagaggcattactgcaggcagaagcgcctcggttagcagagtaccaggcttatatcgatttcgagatgaagattggagaccccgcaagaattcaactaattttcgaaagagccttggtagagaattgcctcgtccctgatctctggatacggtattcacagtacctagatagacagctgaaagtcaaagatctggtgctgtcggttcataacagggcaatccggaactgtccttggacggttgcactgtggtctcggtacctcttagcaatggagcgccatggggtcgatcaccaagtgatcagcgactctagcaaggagcttgaggaactgcgggctgccttcacaagggcactcgagtatttaaagcaagaggtcgaagagcgattcaatgaaagtggggacccatcatgtgtcattatgcaaaattgggcccgaatcgaggcccgactgtgcaacaatatgcagaaggccagagaactgtgggatagtatcatgacacgtggcaacgctaagtacgcaaatatgtggctggagtattacaacctggaacgagcccatggtgatacacaacactgcagaaaagcattgcaccgtgctgtacaatgtacttctgactatccagaacacgtatgcgaagtcctgctgaccatggaaagaactgagggctcactggaggattgggatattgccgtgcaaaaaactgagaccagattagcgcgtgttaatgagcagcgcatgaaggccgctgagaaggaagccgctttagttcagcaagaggaggagaaagccgagcagcggaaacgagcaagggcagagaaaaaggccctgaagaagaagaagaagatccgcggacctgaaaagcggggagccgacgaggacgacgagaaagagtggggcgacgacgaggaagagcagcctagtaaaaggaggagagtcgagaactctattcccgctgccggagaaactcaaaacgtggaagtcgccgctggcccagctgggaaatgtgctgcggtggacgtcgagcccccttctaagcagaaggaaaaagctgctagcctcaagcgggacatgcccaaggttcttcatgattcgagtaaagacagcattacggtgttcgtctctaacctaccatattctatgcaggagcccgacacgaagctacggcctctgttcgaggcatgcggagaagttgtccagatcagaccaatcttttctaatcgcggagatttccggggatactgctatgtggaattcaaagaagagaaatccgctttacaggcgctggaaatggatcgcaaatcagtggaaggacggccaatgtttgtgtctccatgcgtagacaaatccaaaaatcccgactttaaagtattccggtattccacaagcctggagaagcataagctgttcatctcaggactgccattttcgtgtaccaaggaggagctggaggagatctgtaaggcccatggtacggtgaaggatctgcggttggtgactaaccgggctggcaagccgaagggtttagcatacgttgagtacgaaaacgagagccaggcttcacaggctgtcatgaagatggatgggatgactataaaggagaatatcattaaggtggcgatctctaacccgcctcagaggaaagtccccgaaaaacctgagactcggaaagctccaggtggaccaatgttgctgccacagacatacggggctcgcggaaaaggccgaactcagttgagccttctgcccagggcactgcaacgaccctccgcggctgcaccccaggctgagaacgggccagcggcagctcctgccgtggctgccccagcggcaactgaggccccaaagatgagtaacgctgacttcgctaagctttttctccgaaagtag

SEQ ID NO: 242378 - DNA, 1587 bp, synthetic construct
  misc_feature 1..1587: note = Description of Artificial Sequence: Synthetic coding sequence
  source 1..1587: mol_type = other DNA
atggaacgacacggcgtggaccatcaggtgatcagcgattcgtccaaagagctggaagaattgcgggctgcatttacacgagctttagagtatcttaagcaggaggtggaagagaggttcaatgaatcaggcgatccgtcttgtgttataatgcagaactgggcaagaatcgaggctaggctttgcaacaatatgcaaaaggcccgagaattgtgggacagcattatgacgagggggaacgcaaagtatgccaatatgtggctggaatactacaatttggagagagcccatggcgatacccagcattgcagaaaggctctgcacagagcggttcagtgtaccagcgactatccagagcatgtatgtgaggtgcttcttaccatggaaaggacagaagggagccttgaggattgggatatagccgtgcagaagaccgaaacgcgactggcacgggttaatgagcagcggatgaaggctgcggagaaagaagccgctcttgttcagcaagaggaggaaaaggccgaacaaagaaaacgcgctagagcagagaaaaaggcactgaagaaaaaaaagaagatacgaggacctgaaaagcgaggagccgacgaggatgacgagaaagagtggggcgacgacgaagaggaacagccgtccaaacgacgtagggtggagaattccatccccgcagcgggtgaaacccagaatgtcgaggtggctgccggacccgcaggaaaatgtgctgccgttgacgtcgagcccccaagtaagcagaaggaaaaggctgccagcctcaaacgcgacatgcctaaggttctgcacgatagcagtaaggactcaatgcaggaacctgatacaaagctgagacctctcttcgaggcatgtggcgaggtggttcagattaggcctattttcagtaatagaggtgatttccgcggatactgctacgtggagtttaaggaggaaaagtctgctctgcaagccctggagatggatagaaagagtgtggagggccgaccaatgttcgtgagcccttgtgtggataagagcaagaacccagatttcaaggtgtttcgctactctactagcctcgagaagcataaactgttcatctccggcctgcccttcagttgcaccaaggaagagttagaggagatttgcaaggcccacggcactgttaaggatttacggctcgtcactaatcgtgccggaaaaccaaaggggctcgcctacgtggaatacgagaatgaaagccaggcgtctcaggccgtgatgaagatggacggtatgacaatcaaggagaacatcatcaaagtggcaatttccaatccaccacagcgtaaggtgccagaaaagcccgaaacccgaaaggccccaggtggccctatgctcctgcctcaaacttatggtgctcggggtaaaggcagaacccagctctcactactcccacgcgctctacagaggccttctgctgccgcacctcaggccgagaatggccctgctgcggctcccgctgtggctgcaccggctgctactgaggctcctaaaatgtccaacgctgacttcgccaagctttttcttcgtaagtag

SEQ ID NO: 242379 - DNA, 390 bp, synthetic construct
  misc_feature 1..390: note = Description of Artificial Sequence: Synthetic coding sequence
  source 1..390: mol_type = other DNA
atggcaactgccgcagaaactagcgcctccgagccggaggcggagtctaaggccggaccaaaagcagatggggaggaagatgaggtaaaggcagcacgcaccaggcggaaagtgctctcacgagccgtagccgcagcgacctacaagaccatggggccagcttgggaccaacaggaggagggtgtctccgagtcagacggggatgagtatgccatggcttcctctgcagagagctccccaggtgaatacgagtgggagtatgacgaggaagaagaaaagaatcaactcgaaatcgaaagattggaagagcaggtcggccctggtgttggaagcgggcatctgcccgtctttcaggtgctggggagcccttgccctgggccacctccatag

SEQ ID NO: 242380 - DNA, 330 bp, synthetic construct
  misc_feature 1..330: note = Description of Artificial Sequence: Synthetic coding sequence
  source 1..330: mol_type = other DNA
atggccgcatcggccgcacgcggtgcggctgccttgagacgctccattaatcaacccgtcgccttcgttcgacgtattccttggaccgctgcatcaagccagctgaaggagcacttcgctcagttcgggcacgttaggcggtgcatcctgccattcgacaaggagaccggattccaccggggactagggtgggttcagttctcatccgaggagggcctgaggaatgccctgcaacaggagaatcatatcatcgatggcgtcaaggtgcaggtccataccaggagaccaaaattgccacaaacttcggatgacgagaaaaaggacttctag

SEQ ID NO: 242381 - DNA, 894 bp, synthetic construct
  misc_feature 1..894: note = Description of Artificial Sequence: Synthetic coding sequence
  source 1..894: mol_type = other DNA
atggcgaaatggctgaataagtattttagtttaggcaactccaagaccaagtcgcccccacagcccccaaggcccgactatagagaacaacgaagacgaggtgagcgtccctcccagccccctcaggcagtgccacaggcttcgtcagccgctagtgcttcatgtggacccgcaaccgccagttgcttttcagcctccagtggatctcttcctgacgatagcgggtctacctcagatttaattcgagcctacagggctcaaaaggaacgtgattttgaagatccctataatgggcctggctcatcccttcgcaaactgagggcaatgtgtcgccttgattattgtggcggttccggggagccagggggagtccaacgagcctttagcgcaagctctgcttcaggggcagccggttgttgttgcgcctccagcggggcaggcgctgctgccagtagtagctcctcatccggctccccccacctctatagatcaagtagtgagcgtcgacccgcaaccccagccgaagtgaggtatatttcacctaaacatagactcataaaagtagaatcagccgcaggcggtggagccggtgatcctttaggaggcgcttgcgcaggaggccgtacttggtctccaaccgcatgcggtggcaagaagttactcaacaagtgcgccgcatccgcggctgaagaaagtggagcagggaaaaaagataaggtgaccattgccgatgattatagcgatccctttgatgctaaaaatgaccttaagtccaaggccggtaaaggggagtccgccggatatatggagccttacgaggctcaacgcattatgaccggcctgcaagaagcatggagacactctcccagcggctgcttccccgtcggcccttag

SEQ ID NO: 242382 - DNA, 1530 bp, synthetic construct
  misc_feature 1..1530: note = Description of Artificial Sequence: Synthetic coding sequence
  source 1..1530: mol_type = other DNA
atggccaagtggcttaacaaatatttcagcctgggaaattcaaagactaaatcgcctccacagccaccacgaccagattacagagaacagagaagacgcggagaacgtccttcacagccccctcaggcggttcctcaagctagttctgcagcctctgcaagctgtggccctgctacagccagctgtttctcagcatccagcggcagtctcccagacgactccgggtcgacgagtgatttaattagggcctacagagcacagaaggagcgggacttcgaagacccttacaatggccctggttcgtcacttagaaaacttcgcgctatgtgccggcttgactactgtggcggaagtggtgaacccggaggcgtccagcgcgctttctcggcttcttccgcaagtggggctgccggttgttgctgtgcatcttcaggagcgggtgcagccgctagctcatctagctccagtggtagtccgcacctgtatcgaagctcatctgaaagaagaccagctacacctgccgaggtccgatatataagtcctaagcacagactgattaaggtcgagagtgccgctggtgggggagcaggggaccccctaggcggagcctgtgctggcggaaggacatggagccctacagcttgcggtggtaagaagctgcttaacaagtgcgccgcaagtgcggcagaagagtccggggctggaaaaaaagacaaagtgactattgcagatgattactcagatcccttcgacgctaagaatgacctcaaaagcaaggcaggaaagggggagtccgctggttacatggagccctacgaggcccaaaggatcatgaccgagttccagcgacaggagtcggtccgtagccagcacaaaggtatccagttgtatgacacaccatatgaacctgaggggcagagtgtcgactctgactctgaaagcacggtaagcccccgtttaagggaatcgaaattaccccaggatgatgaccggcctgccgacgagtacgatcagccgtgggagtggaatagagttaccatccctgccctggccgctcaattcaatgggaacgagaagaggcaatcgtccccatccccctcgcgtgaccgcaggcggcagttgcgcgcacccggaggcggatttaagcctatcaaacacggctcgcccgaattttgcggtatccttggagagagagtggatcctgcagtgcccttggaaaagcagatttggtaccacggagcaatatctcggggagacgcggagaacttactgcgcctctgcaaagagtgtagttatctagttcgcaatagccaaacgtcaaaacatgactatagcctgtccctaaggtctaaccagggattcatgcacatgaaactggcgaagaccaaagagaaatatgtccttggccagaatagcccaccattcgactctgtccccgaggtcatccactactatacgaccaggaaattaccgatcaagggtgctgagcatctgtcgttactttacccggtagctgttcggacactttag

SEQ ID NO: 242383 - DNA, 1080 bp, synthetic construct
  misc_feature 1..1080: note = Description of Artificial Sequence: Synthetic coding sequence
  source 1..1080: mol_type = other DNA
atgcaggcagctgctctacctgaagaaattcggtggctcctggaagatgccgaagagttcctcgctgagggtctgcgtaatgaaaacctgagtgcagtagcacgtgatcaccgcgaccacattctccgaggctttcaacagatcaaagctcgctactactgggatttccagccccagggcggagatattgggcaagacagtagcgatgacaatcacagtggtacattaggcctcagtttgactagtgatgcccctttccttagtgattatcaggacgaaggcatggaggatattgtcaagggagctcaggaattggataacgtgattaaacagggctacctagagaagaagagcaaggaccattctttttttgggtcagagtggcagaaacgctggtgtgtcgttagcagaggcttgttctattattatgcgaatgaaaagtccaaacagcccaagggcactttcctgattaagggctatggcgtgcgaatggcaccacacctccggagagactcaaagaaggagtcctgtttcgaacttacttctcaagatcggcgtagctacgagttcacggcaacaagccccgctgaggctcgggactgggtggatcaaatttcattcctgctaaaagatctgagctcactgaccattccctacgaggaagatgaggaggaggaagagaaggaggagacgtatgacgatattgacggcttcgatagtccctcttgcggctctcaatgtaggcctacaatcctgcccggatcagtgggcatcaaggagcctacagaggagaaggaggaagaggacatttacgaggtgctgccagacgaggagcacgatctggaggaagacgagtccgggacccgaagaaagggggtggactacgctagctattatcaaggcctatgggactgccatggcgaccagcctgacgaactttcctttcagagaggtgacttgatccggatactatctaaggagtacaacatgtatgggtggtgggtaggtgagctgaactccctggttggcatcgttcctaaagagtaccttactactgcctttgaggtcgaagaacgatag

SEQ ID NO: 242384 - DNA, 831 bp, synthetic construct
  misc_feature 1..831: note = Description of Artificial Sequence: Synthetic coding sequence
  source 1..831: mol_type = other DNA
atgggcaattctatgaaatccactcccgctcccgctgaacgtcccctcccaaatcctgaaggattggacagcgactttctcgccgtgctgagtgattacccttcccctgatattagcccccctatcttccgcaggggagagaaactgagggtgatcagcgacgaggggggatggtggaaagcaatttccttgtccacgggacgggaaagctacatcccaggtatctgcgtggctcgagtataccatggttggttgttcgaagggctcgggagggacaaggcagaagagcttcttcagcttcccgatacgaaagtgggatccttcatgattcgtgagagtgagacaaagaagggcttctacagcttgtccgtcagacaccgtcaggtaaaacattaccgaattttccggttgcctaataactggtattatatatcccctcggctgactttccagtgcttggaggatttagtcaaccattacagtgaggtcgctgacggactgtgttgcgtactgacaaccccgtgcctaacgcagtcaaccgccgctcccgcagttcgcgcttccagcagccccgtgaccctgagacagaagacagtggattggagacgggtgtcacgtctgcaggaggatccagagggtactgagaaccctctgggcgtggatgaatctcttttcagctatgggctccgcgagtccatcgcatcatacctctctctgaccagcgaggataatacctccttcgatcgcaaaaaaaagtctatttctctcatgtatggaggtagtaagagaaagagctcatttttcagcagccccccatatttcgaggactag

SEQ ID NO: 242385 - DNA, 882 bp, synthetic construct
  misc_feature 1..882: note = Description of Artificial Sequence: Synthetic coding sequence
  source 1..882: mol_type = other DNA
atgctgcatcggctttgggcgtcccccgctgcgcctggcaaaaaaaaagaaatgggcaattcaatgaaatccacccccgctcccgctgagcgtcctctgcctaaccctgagggactggactctgacttcctggcagtcctgtccgactatccaagtcctgacatttcccccccaatttttagacgcggtgaaaaactgagggtgatcagtgatgaaggaggctggtggaaggccattagtctatccaccggcagggaatcctacatcccgggaatctgtgtggccagggtgtaccacggatggctctttgaagggttggggagggacaaggcggaggaactgcttcagctgccagacacaaaagttggcagtttcatgatccgtgaatctgaaaccaagaagggcttctatagcctaagcgtccgtcacagacaagtaaaacactaccggatattcagattgcctaacaactggtactatatttccccacggctcacatttcagtgcctggaagacctggttaatcactacagcgaggtcgctgacgggttatgctgcgtactgaccactccgtgcctgacccagtcaaccgcagcacccgcagttcgggcatcctccagcccagtgacgctacgccagaagacagtggattggcgacgggtgagcagactgcaggaggaccccgagggcactgagaaccccctgggcgtggatgagagcctcttttcatatggacttcgggagtcaattgcttcgtatctttctctgacatcggaagataatacctctttcgacagaaaaaaaaaatctatatccctcatgtatgggggttccaagcgcaagtcaagttttttctccagtcctccctattttgaagactag

SEQ ID NO: 242386 - DNA, 951 bp, synthetic construct
  misc_feature 1..951: note = Description of Artificial Sequence: Synthetic coding sequence
  source 1..951: mol_type = other DNA
atgctgagtaaattagggcacagtcctctaggcggtctcagagctcggctgacattcccggtgtgcctgctgtaccaccgcctatgggcctcccctgcagccccaggcaaaaaaaaagagatggggaatagtatgaagtctacacctgctcctgctgaaagacccctgccgaacccagagggtcttgattcagattttctcgcagtcctgagcgattaccctagcccagatatttcaccgcctatttttcgacgtggagagaaacttcgggtcatcagtgacgagggaggatggtggaaagccataagcctgtctaccggacgtgaaagctatatccctggtatctgcgtcgcaagggtgtaccacgggtggctcttcgaaggcctgggccgtgataaggctgaagagctcctgcagctccccgacactaaagttggatcattcatgataagagaaagcgagactaagaaaggattttacagcctgtccgtcaggcaccgacaggtgaagcactataggatctttcggcttcccaataactggtactatatctcccctaggctgaccttccagtgtctggaggacctagtaaaccactattctgaggtcgctgatggcttgtgttgtgtgttgacaactccgtgcctcacacagtccactgccgcacctgccgtgcgggcttcctcaagcccagtgaccctgcgccaaaaaacggttgactggaggagggtgtctcgactgcaggaggatcccgagggcaccgagaatccactaggagttgacgagagcttgttttcgtacgggctgagagaatctatcgcctcctaccttagcctgacatccgaggacaatacatcttttgaccgtaagaaaaagtcaatctctttgatgtacgggggttctaagcggaagtcgtcgttctttagttccccaccttacttcgaggactag

SEQ ID NO: 242387 - DNA, 276 bp, synthetic construct
  misc_feature 1..276: note = Description of Artificial Sequence: Synthetic coding sequence
  source 1..276: mol_type = other DNA
atgggtaattctatgaagtccacccctgcaccggcagagcgacccctgcctaacccggaggggctggactctgacttcctcgctgttctgtctgactacccttcaccagacatcagcccgccaattttcaggagaggcgaaaagttgcgcgtgatctcagatgaggggggatggtggaaagcaataagtctctccaccggcagagagtcttatattccaggtatctgtgtcgcacgggtgtaccatggatggctgttcgaaggactggggcgttag

SEQ ID NO: 242388 - DNA, 45 bp, synthetic construct
  misc_feature 1..45: note = Description of Artificial Sequence: Synthetic coding sequence
  source 1..45: mol_type = other DNA
atgggcaacagtatgaaatccacgcccgcacccgctgaaagatag

SEQ ID NO: 242389 - DNA, 150 bp, synthetic construct
  misc_feature 1..150: note = Description of Artificial Sequence: Synthetic coding sequence
  source 1..150: mol_type = other DNA
atggggaattcaatgaaaagtactcctgcccctgcagaaagaccccttcccaatccagagggactggattccgacttccttgcggtcttgtccgactaccccagccctgacatatcccccccaatcttccgcaggggcgaaaagctgtag

SEQ ID NO: 242390 - DNA, 477 bp, synthetic construct
  misc_feature 1..477: note = Description of Artificial Sequence: Synthetic coding sequence
  source 1..477: mol_type = other DNA
atgggaaattccatgaagagcactccagcccctgccgagcggcctttgccaaaccccgaaggcttggactcagatttcctggctgtgctgagtgattacccttctcctgatattagcccgccaatcttcaggcgaggagagaaactcagagtcattagcgacgaaggaggttggtggaaggcgattagtctgtctacagggagagaatcatacatcccagggatatgtgtggccagagtctatcacgggtggttattcgaaggcctggggagggataaggctgaagagctattgcagttaccagacactaaagtgggatcattcatgattcgcgagtctgagaccaaaaaagggttctattcgttgagtgtgcggcacagacaggtgaaacactatcgtatatttaggctccctaacaattggtattatatctcacctagactcactttccaatgtctcgaggacttggtgaactag

SEQ ID NO: 242391 - DNA, 123 bp, synthetic construct
  misc_feature 1..123: note = Description of Artificial Sequence: Synthetic coding sequence
  source 1..123: mol_type = other DNA
atggggaattcaatgaagagcaccccggcacctgcagaacggcctcttcccaatcctgaaggcctggattctgactttctggcagtcctgtctgattatccttcccccgatattagtccgtag

SEQ ID NO: 242392 - DNA, 786 bp, synthetic construct
  misc_feature 1..786: note = Description of Artificial Sequence: Synthetic coding sequence
  source 1..786: mol_type = other DNA
atgggaagtctgccttcaaggaggaagagcctgccttccccaagccttagctccagtgtgcaaggacagggacccgtcaccatggaggcagaacggtcaaaggccacggccgtcgccctcggatccttccccgcaggcggtccagccgaactcagtcttaggctcggggaaccgctcaccatcgtctctgaggacggtgattggtggaccgtgctgtctgaggtgagtggcagagagtataacattccatccgttcatgtcgctaaggtcagtcatgggtggttatacgaggggctcagcagggaaaaggcagaggaacttctgctgctccccggtaaccccggtggcgcattcctgatcagggagtcacagactcgtcggggtagttacagcttatctgtgcgtttgtctcgccctgcctcatgggatcggataaggcattaccgtattcactgtctggacaacgggtggttgtatatcagtcccaggctcactttccccagtctccaagcgctagtcgatcattattctgaattggccgacgatatctgttgtttgctcaaggagccatgtgttctgcagagggctgggcctttgccaggaaaagacataccgctccccgttaccgtgcaaagaaccccactaaattggaaggagctcgattcatcccttctcttctcagaagcggcaacaggcgaagaatcattgctgagcgaagggctacgcgagtctctctctttttatataagcctgaacgatgaggctgtgtctttagacgacgcttag

SEQ ID NO: 242393 - DNA, 633 bp, synthetic construct
  misc_feature 1..633: note = Description of Artificial Sequence: Synthetic coding sequence
  source 1..633: mol_type = other DNA
atgggaagtctacccagtcgcaggaaaagtctcccctccccaagtctgtccagctccgtccaggggcagggtcctgtaacaatggaagccgaaaggtcaaaggcgactgcggtggctctcgggagctttcccgctgggggaccagccgagctctctctgcgccttggtgagccgctgaccattgtgagcgaagacggggattggtggacagtcctttctgaggtctctgggagagaatataatattccctctgtgcatgtcgcaaaggtaagccacggatggctgtatgaaggattgagtagggagaaagctgaggagctactcttgctccctgggaatcccggaggcgcattcctgatacgggagtctcagactcggagaggaagctacagcctatccgtgcggctttcccgcccagcctcatgggatcgtatccggcactaccgcatccattgtctcgataacgggtggctgtacatttcacctcgcttgacatttcctagccttcaagccctggtcgaccactattctgagggttggccagccccttggcagggttatacccctacctgtgattgtgcagaggatactacacagttggaaagagcagggcagctgcctcccgtcttctag

SEQ ID NO: 242394 - DNA, 3840 bp, synthetic construct
  misc_feature 1..3840: note = Description of Artificial Sequence: Synthetic coding sequence
  source 1..3840: mol_type = other DNA
atgacattgaccgagagactgagagaaaagatcagccgggcattctataaccacggcctgctctgcgcaagctaccccatccccattattctcttcactggattttgtatcctggcctgctgttaccctttactgaagctgccattacctggaaccgggccagtcgaatttaccacacccgtcaaggattattcaccaccccctgtggactcggaccggaaacagggcgagcccactgagcaacctgagtggtatgtcggggcaccagtagcatatgtgcaacagatattcgtcaaaagctcggtgttcccatggcataagaacctgctggctgttgacgtgtttagatcaccactttctcgcgcattccagttggtggaggaaattcgcaaccacgtactgcgcgactctagtggaattcggagcctggaggaattatgcctccaggtgaccgatctcctgccgggtttgcgaaaattgcgcaacctgcttccggagcacggctgtctgctgcttagcccaggtaacttttggcagaacgactgggagaggtttcacgctgatcccgacatcattggaaccatccatcaacatgaacccaagaccttgcagactagtgccactctcaaggacttattatttggggttccaggcaagtactcaggagtaagcttgtatacccgaaaacgcatggtgtcctatacaattacactggtattccagcattatcacgcaaagtttctggggtctttaagggccagactgatgcttctccatccaagtcctaactgctccttgcgcgcagagtccctggtccatgtccacttcaaagaagagatcggcgttgccgagcttattccactcgtcactacttacattatcctgttcgcatacatctacttcagcactcgcaagattgatatggtaaaatccaagtgggggctggccctggctgccgtcgtgacagtgctgagcagcctcctcatgtcagtgggcctctgcactctatttggcctgactcctacactcaacgggggtgagatttttccgtatctagtcgtcgtcattggcctggaaaatgtcctggtgctgactaaatccgtcgttagcactccagtggatctggaagtcaaactacggatcgctcaaggtctgtcctccgagagctggtccattatgaaaaacatggctaccgagctggggatcatcctgattggatacttcactctcgtgccagccatccaagaattctgcctgttcgcggtggtaggtctcgtgtctgacttcttccttcaaatgctgttctttacgaccgtccttagtattgacatccgacgcatggagctagctgacctgaataaacgccttcctccagaggcctgcttgcccagcgccaaacccgtgggtcagccaacaagatacgagcgccaactggcagtgcgtccttcaacccctcacaccataacattgcaaccgtcttcgtttcgcaacctgcgactgcccaaacggctacgcgtggtgtacttcctggccaggactcggttggcccagcggttgattatggcaggcacagtggtctggatcggtatccttgtttacacggatcccgctggcctccggaattatttggctgcccaggttaccgaacagtcaccgcttggggaaggagcacttgcaccaatgccagtccctagcggcatgcttcctccctcccatcccgaccccgcattcagtatatttcctccagatgctcctaagctacccgagaaccagactagtccgggtgaaagccccgagagaggaggccctgcagaggtcgttcatgatagtcccgtccctgaggtgacatggggacccgaggacgaggaactgtggaggaaattgagtttcaggcactggccaaccctcttctcttactataatataacattagcaaaacgttacatttctttgctgcccgttatcccggtaactttgcggctgaacccccgtgaggcccttgagggacgtcatccacaggatgggcgaagcgcgtggcctccacctggaccaattcccgcaggccattgggaggccggtccgaaagggccaggaggagtccaggcccatggagatgtcacgttatacaaagtcgccgctctcggactggcgaccgggattgtcctggtgctgctgttgctgtgtctgtatcgggtgctgtgtccacgtaattacgggcaattgggtggcggaccaggcagacgcaggcgaggagagcttccgtgcgacgactacggctacgcccctccagaaacagagatcgtccctctggtgctacgcggtcatctcatggacatagagtgcttggccagcgatgggatgctcttagtaagctgttgtctagcaggacatgtgtgtgtatgggacgcacagaccggggactgcctaactcggatcccacgtcccggacgtcaacgacgggattctggagtgggcagcgggctcgaagcacaggagtcgtgggaacgcctgagcgatggaggcaaggctggacccgaagagcccggtgactctccacctctcaggcacagaccccgaggacccccaccaccttctctgtttggtgatcagccagaccttacttgtttaattgatactaactttagcgcccagcctcgatccagccagccgacccagcccgagcctcggcatagggccgtctgtggcagatcaagggactctccagggtacgattttagctgcctggtccaaagagtgtatcaggaagagggattggctgccgtgtgcacgcccgcattaaggccaccttcacccggacctgtcctgtcacaagcccctgaggatgagggaggctcccccgaaaaaggaagcccaagcctcgcgtgggcgccttctgccgagggatctatctggagcctggagttacagggtaaccttattgtggtgggccgatctagcgggaggctcgaagtttgggatgccatcgaaggagttctttgttgctcgtcggaggaggtgtcatctggcataaccgccctggtcttcctcgataaacggattgttgccgctcgcctgaatggcagcctggatttcttctcactcgagacccacaccgctttatctccactccaatttagggggacacccggtcggggttcaagtcccgcatccccggtctattcttcaagcgacacggtggcctgtcacctcacgcacaccgtgccctgtgcacaccaaaagcccattaccgccctgaaagccgcagcgggacggttggtgactggaagccaagaccataccttgcgcgtgttcagacttgaagactcttgctgtctcttcactctccaggggcacagcggcgcaattaccaccgtctacatcgaccagactatggtgctggcctcgggcggacaggatggagcaatctgtctgtgggacgtgctcacaggatcccgagtgagccacgtgtttgcccatcgaggcgatgtgacatctctcacctgtacaacctcatgtgttattagcagtggcctggacgatcttatctccatctgggatcgctcgaccggaattaaattctatagtatccaacaggacctaggctgtggagctagccttggagtgatctcagataatttactcgttactggcggacaaggctgtgtgagcttctgggatctgaactatggagaccttcttcagactgtgtatctgggcaagaacagtgaagcacagcccgcaaggcagatcctggtcctggataacgcagctatcgtgtgcaactttggctcagagctcagcttggtgtacgttccttcagtgttagaaaagctggactag

SEQ ID NO: 242395 - DNA, 2316 bp, synthetic construct
  misc_feature 1..2316: note = Description of Artificial Sequence: Synthetic coding sequence
  source 1..2316: mol_type = other DNA
atgacgttgaccgaaagactccgagagaaaatctccagagccttttacaatcacggactgctgtgcgcctcttaccccatcccaatcattctctttaccgggttctgtatcctggcttgctgctaccccttactgaaactcccattacccggaaccggcccagtggagtttaccacgccagttaaggactactctcccccaccagtggattcggacaggaagcagggagagccaactgagcaacccgagtggtatgtaggcgcacccgtggcttacgtgcagcagatatttgtgaaaagctctgtgtttccttggcacaagaacttgctagctgtagatgtcttccgcagtccactgtccagggctttccagttagtcgaggaaataaggaaccatgtgttgagagactcctcaggtatccgttccctggaagagctttgtcttcaggtgacagatttgctgcctggcttgagaaaactgcgaaaccttctgcccgaacatggctgcctcctgctgtcgcctggaaatttttggcagaatgattgggagcgctttcacgcagaccccgacatcattgggacgatccaccagcacgagcccaaaacgctacaaacttctgccacactcaaagacctgctattcggcgtccccggaaaatactccggagtcagtctctatacacgcaaaaggatggtgtcctatacgatcaccttggtgttccagcattatcatgcaaaatttctcggctctctgcgtgcacggctgatgctgttgcaccctagccccaattgttcattgcgtgcagagagtctggtgcacgtgcatttcaaagaggaaatcggggtggctgagttgatcccgctggtcacaacctatattatcctgttcgcatacatttatttctcaacccgcaaaattgacatggtgaaatcaaaatggggactggcactggccgctgttgttacggtgctgagctctttactgatgagtgtggggctatgtacgctctttggtctcaccccaacattgaatggcggagagatctttccctatttggttgtcgtgatcggcttggaaaacgtgcttgtgttaactaaaagcgtggtttctacacccgtagatctggaagttaagttgcgaatcgcccagggtctatccagtgagagctggtccatcatgaagaatatggctactgagctgggcattatattgatcggctacttcacgctggtccccgctatccaggagttctgtctcttcgccgtggttggtcttgtctccgacttctttcttcagatgctgttctttaccaccgtgttaagtattgatattcgacgtatggagctggctgacctgaacaaaaggctccctcctgaggcttgcttgccctcagccaagcctgtaggtcagccaactcggtacgaaagatcttccggcaggctcgaggtgtgggatgctatcgagggcgtgctgtgctgcagcagtgaggaggtgagtagcggaatcacagcccttgtttttctggacaagcggattgtggcagccagactgaatggaagtttggattttttctccctggagacacatactgccctgagtcctttgcagtttcgcggaacgcccggtcgcggttcatctcccgcttcccctgtgtactcatctagcgacacagttgcttgccatctcacgcacacagtaccatgcgcccaccaaaaacccatcaccgctttgaaagcggctgcaggtaggctagttacaggatcacaggatcatacgcttagggtcttcaggctggaggactcttgttgccttttcacattgcaggggcattctggggcaatcactacagtctacattgaccagacaatggttctggcgtccggcggacaggatggcgcaatttgcctctgggacgttctcacaggctctcgcgtctcccacgttttcgcccaccgtggggatgtgacatcattgacgtgcaccacttcctgtgtaatcagcagcggtttggatgacttgatcagtatatgggacaggtcaaccggcatcaagttttactcaattcagcaggacctgggctgtggggcatcccttggtgtgatcagcgataacctcttagtaaccggcggacaggggtgcgtgtcattctgggacctgaattatggagatctgttgcagaccgtttacctggggaagaacagcgaagcacagccagcccgacaaattctggtcctggataatgccgctattgtgtgcaacttcggctcggagctctcactagtttacgttccttctgtgctggagaagttggattag

SEQ ID NO: 242396 - DNA, 2718 bp, synthetic construct
  misc_feature 1..2718: note = Description of Artificial Sequence: Synthetic coding sequence
  source 1..2718: mol_type = other DNA
atgacactcaccgagagattgagggagaagatatccagagcattttacaaccatggtctcttgtgtgcctcttaccccattcctataattttgatcggttacttcactttggttcccgctatccaggagttctgcctatttgctgtggtgggcctggtaagtgatttttttttgcagatgctcttttttaccaccgttctgtcgatagacattagacggatggagttggccgacctcaacaagagattacccccagaggcgtgtctcccttctgcaaaacctgtgggccagcccacgagatacgagcgccagctcgccgtgaggccctctacaccgcacacaatcaccctgcagcccagctcgtttcgtaatctgcgcctgcctaagcgtttacgcgtcgtgtacttccttgctagaacccggctggcgcaacgactgattatggccggaaccgtggtgtggataggaattctggtctataccgacccggcaggtcttcgcaactacttggctgcccaggtgactgaacagtctcctctcggcgaaggagctctcgcacccatgccggtcccaagtgggatgttaccaccatcacatccagaccctgcattcagcattttcccacctgatgcacctaagctcccagagaaccagaccagtccaggtgaaagtccagaaaggggagggccagcagaagtggtccatgactcccccgtgccggaagtgacctgggggccagaggacgaagagctgtggcggaaattatcctttaggcattggcccacacttttttcatactacaatatcaccttggcaaagcgttacatttctctgctcccagtcatacctgtaacgttgcgtttgaatcctcgagaagccctggaaggacgccacccccaggatggtcgatctgcatggccccctccaggacccatcccagctgggcattgggaagcgggacccaagggacctgggggtgtgcaggcgcatggtgatgtgactctgtacaaagtcgccgcactggggttggccaccggtatagtgttggtcctcttgttgctgtgtctctacagggtgctgtgtccacgcaattacggtcaacttggaggtggcccaggcagacgccgtcgaggtgaactgccgtgcgacgactacggctatgcgcctcctgagacggagatcgtgcctttggtgctgaggggccatctcatggatattgagtgtctggcgagcgacggcatgttgctggtgagctgctgtctggccggacatgtttgtgtctgggatgcgcaaaccggggactgcctaaccaggattcccagacccggacagcgcagagattccggcgtcgggagtggtcttgaggcgcaggagtcttgggaaagactctccgatggcggaaaggctggcccagaggagccaggcgactcgccacctctgagacatagacctaggggcccacctcctccaagcctgttcggagaccaacccgacctcacgtgtctgattgacactaatttttcggcacagccaagatcatcacagcctacccagcctgaacctcgtcaccgcgctgtttgcggacggagccgcgactcaccaggatatgacttttcctgcctggtccagcgagtgtatcaggaagaaggcctggcagcggtgtgtacacccgcattgcggccacctagtcctggtccagttctttcacaggcgccagaagatgagggagggagcccggaaaagggcagtcctagccttgcttgggcccctagcgcagaaggaagtatctggtccctggagcttcagggcaatttgatcgtggtgggtagatcatctgggaggctcgaagtgtgggacgctattgaaggcgtcctatgttgtagttcagaagaggtcagctcagggatcactgcgttggtattcctggacaaaagaatcgtcgccgctcgcttgaatgggtccctggatttttttagcctagagacccacacggcactttccccactccagttcaggggcaccccgggtcgtggaagttccccagcctcgcccgtttactccagcagcgataccgtggcctgccatctgacccatacagttccatgcgcccaccagaagcctatcactgcgcttaaagcagctgccggacgcctcgtgaccgggtcccaggaccacacgctgcgcgtatttaggctggaggacagctgctgcttgttcaccctgcagggtcacagtggcgctatcacaacggtctacatcgaccaaacaatggttttagcatcaggaggacaggatggagcgatttgtctgtgggatgtgttgacagggtcccgcgtctctcatgtctttgcgcaccgcggagatgtgactagtctcacctgcacaacctcatgcgttatcagcagcgggctggacgacttgatctctatttgggatcggagcactgggataaaattttactccattcaacaagacctgggctgtggggcttcactgggagtcattagtgataatctgctagttaccgggggacaaggttgcgtatctttctgggatctgaattatggggacctgctacaaacagtgtacctgggtaagaattccgaagcccagccggctagacagatccttgtattggacaacgcggcaatcgtgtgtaattttggttcagaactgtctctcgtttatgtgccctctgtgttagagaaattagactag

SEQ ID NO: 242397 - DNA, 1059 bp, synthetic construct
  misc_feature 1..1059: note = Description of Artificial Sequence: Synthetic coding sequence
  source 1..1059: mol_type = other DNA
atggtcaaatctaagtggggccttgctttggccgcagtcgtgaccgtgctttcgagcttgctgatgagtgtagggctctgcacattgtttggccttacccctaccctgaacgggggagagattttcccgtacctcgtggtggtgattggccttgagaatgttctggttttaacaaaaagcgtggtgagtacccctgtggatctggaggtgaaactgcggatcgctcagggcctgtcttccgagtcctggagtattatgaagaacatggcgactgagcttggaattattctgattggctattttaccctggttcccgctatacaggagttttgtcttttcgccgtggtcggactggtgagtgacttcttcctgcagatgctattcttcaccacggtcttgtctatcgacatccggagaatggagttagccgaccttaataagcggctgcctcccgaggcgtgcttgccctctgcaaaacctgtcgggcagcctacaagatatgaacgccagttggccgtgcggccatcgactccacacacgatcacattgcaacctagtagctttaggaaccttcgccttcccaagcggcttcgggtcgtgtattttctagcccctacaggagcgcacacctgttgggccttgggatccagaacgcaaggcccaagatggggagccggaccttggcggcgacatgccgtgcaggggggtggggctggacccggacacaggcaccggcttggggctgccgcagcactgccattaccaagagctatgcctgctcagcttagggccgcagggtggtgggccagggctgcggaagccaggggggctgcgttaaggcgtctgagattgtgcgctactcgcgacggtgaccgcgcagcctgtgccgctcgtccgcctcacggtcaccgagtcccgggacagagaaggcacgctgccggtgaactccttcctggtagacctagacttagagttggcagagctgacaggggtctgccaaatgcccactcagccccaaggcaagcggcaccagggcagtggaggggacaacgtgcatag

SEQ ID NO: 242398 - DNA, 411 bp, synthetic construct
  misc_feature 1..411: note = Description of Artificial Sequence: Synthetic coding sequence
  source 1..411: mol_type = other DNA
atgactctgactgaacggctgagagagaagataagccgagccttctacaaccacggtctactttgcgcatcttacccgatcccgatcatcctgttcaccggattctgtatcctggcatgctgctatccgcttttgaagctaccactgccgggaaccggacccgtggagttcactactcctgtcaaagactactctccccctcccgttgatagcgatcgtaagcaaggagaacccacagagcaaccagaatggtatgttggggctcctgtcgcctatgtgcagcagatcttcgtcaaatccagtgtgttcccttggcataagaatctccttgcggtggacgttttcagaagccctctcagccgcgctttccagctcgtagaagaaattcggaatcatgtcttgcgggactag

SEQ ID NO: 242399 - DNA, 3072 bp, synthetic construct
  misc_feature 1..3072: note = Description of Artificial Sequence: Synthetic coding sequence
  source 1..3072: mol_type = other DNA
atgctgctgcacccctcccccaattgcagtctgagagccgagtcgctggtgcacgtccactttaaggaggaaattggcgtagccgagctcatccccttggttactacttacattattctgttcgcttatatctacttctctaccagaaaaatcgatatggtaaagtccaaatggggcctggcgttggcagccgtggtgacagtgttatctagccttctgatgtccgtaggtctgtgcaccctattcggactcacacccaccttgaatgggggtgaaatcttcccatacctagtagttgtcatcgggttggagaacgtgcttgtcctcacaaaaagcgtggttagcactccagtagatctggaggtcaaattacgcattgcccagggcttaagcagcgagtcgtggtcaatcatgaagaatatggccacagaattagggataatactgatcggttatttcactctggttccggctatccaggagttttgcctgtttgccgttgtcggtctggtctccgatttctttttgcaaatgcttttttttaccacggttctgtctattgacattaggagaatggaacttgccgacctcaacaagcggctgcctccagaagcatgccttccttccgcaaaaccagtggggcaacctactcgttacgaaagacaattagctgtgcgcccaagcacgccccatacaatcaccctgcaacccagcagcttccggaacctgcgtttaccaaagcgattacgagtggtgtatttcctggcacggacaagactggcccagcgcttgattatggccggtaccgtcgtgtggatcggtatcctcgtctacaccgatccagccggactgcggaattaccttgcagcccaggtcacggagcagagtccacttggcgagggcgcactggctcccatgccagtgcctagtggaatgctgcccccttcccatccagaccccgctttttcaattttccctcctgacgcacctaagctgcctgagaaccagactagccctggggagagtccagagcggggaggacccgcagaggtggttcacgacagcccagttcccgaggtgacgtgggggcctgaagacgaggaactttggagaaaacttagctttaggcactggccaacactgttctcctactataatatcaccctggccaagcgctacatctccctgttacccgtaataccagtcacgcttcgtttgaaccctcgcgaggcactggaggggaggcacccacaggatggtcgcagcgcctggcctcctcccggaccaatacctgccggtcactgggaagccggtcctaaaggaccagggggagtgcaggcgcacggtgatgttacactgtataaagtcgcagctctcggcctggctactgggattgtgctagttctgctcctcttgtgcctatatcgagtcctttgtcctcgtaactacgggcaattaggaggcggacctggcagacgccgacgaggggagttgccttgtgacgactacggttacgctccaccagaaactgaaattgtgccactcgtgttgcgtggccacttaatggatatcgaatgcttagcttccgacggaatgctgctcgtctcgtgctgtctagccggtcacgtctgcgtctgggatgcacaaactggggactgtctcaccagaattccacggccaggccagcgcagagacagcggggtgggatctgggctcgaggctcaggagagctgggaacggctctcagatggcggaaaggcaggtccagaagaacccggagacagtcctccactgcgacaccggccacggggacccccacctccctctctcttcggtgatcaacccgatctcacttgtctgattgatacaaatttcagtgcacagccccgatcctctcagccgacccaacctgaaccccgtcatagagctgtctgcggaagatcgcgtgactcccctggttatgatttttcttgcctcgtacaaagagtgtatcaggaagagggtttggctgccgtttgcacgcccgcactccgacctccctccccaggaccagtgctctcgcaggccccagaggatgaaggtggttcacccgaaaagggcagcccttcactcgcctgggctcccagtgctgagggaagtatttggtccctggaactgcagggaaatctgatagtggtgggtcgctctagcggccgtctggaagtgtgggacgcaattgagggagtactgtgctgtagcagcgaggaggtgtccagcgggattacagcactggtgtttttagataaacggatcgtagctgcaaggctgaacggatcgcttgatttcttcagcttggagacccacacagccctctctccgcttcaattcagaggcactcctggtcgcggttcttctcccgcatccccagtgtacagtagcagcgatacggttgcatgtcaccttactcacacagtgccatgtgcccatcagaaaccgattacagcccttaaggctgcagcagggaggctggttaccggttcccaggaccataccctgcgtgttttccgactagaagatagctgttgtctcttcaccctgcagggccactccggagccattactaccgtctacattgatcagaccatggttttggcctctggcggacaggatggagcaatatgtctatgggacgttcttacaggttcacgggtgtcacatgttttcgcccaccgtggggacgtgacttctcttacttgtactacgtcatgtgtaatatcaagtggtctagacgatttgattagtatttgggaccgaagcacaggaataaagttttattcaatccaacaggatctcggctgcggagctagccttggagtgatctccgataatctgctggtgacaggcggacaaggctgcgtcagcttctgggatttgaactatggggatctgctgcagacagtgtatttgggtaagaattccgaggcccagcctgccaggcagattttggtgctcgataatgcagctattgtttgcaactttggatcagaactctcgctcgtatacgtcccttcagttctcgagaagctcgactag

SEQ ID NO: 242400 - DNA, 267 bp, synthetic construct
  misc_feature 1..267: note = Description of Artificial Sequence: Synthetic coding sequence
  source 1..267: mol_type = other DNA
atgaccctgactgaaagactgcgggagaagataagcagggccttctataaccatggccttctgtgcgcgtcttaccctattcccatcatacttttcactggtttttgcatccttgcatgttgttaccccctgttgaaactgccactcccgggtaccggtcctgtggaatttaccaccccagtcaaggactactccccgccaccagtagactctgatcggaaacagggagagccaaccgagcaacccgaatgggtgggcactcgctag

SEQ ID NO: 242401 - DNA, 399 bp, synthetic construct
  misc_feature 1..399: note = Description of Artificial Sequence: Synthetic coding sequence
  source 1..399: mol_type = other DNA
atgaccctgactgagcgcctcagagaaaagatctctcgtgccttttacaaccatggcctgctttgtgctagttaccccatccccataatactgtttactggcttttgcatactggcttgctgctacccactgttgaaattaccattgcccggaacaggaccagtggagttcaccacccctgtcaaagactactcacctcccccagtggacagtgaccgaaaacagggtgagccgaccgagcagcccgagtggtacgtgggtgctcccgtagcttacgtccagcagattttcgttaaatcgagcgtgtttccatggcataaaaacctgctcgctgtcgacgtcttcagaagccctctgtcccgagcctttcaattggtagaggaaattcgcaatcactag

SEQ ID NO: 242402 - DNA, 2661 bp, synthetic construct
  misc_feature 1..2661: note = Description of Artificial Sequence: Synthetic coding sequence
  source 1..2661: mol_type = other DNA
atgaagaacatggccactgagctgggtatcatcctaatcggatacttcactctcgtccccgctatacaggaattttgcttgtttgcagtggtgggacttgtaagtgatttttttctccagatgctattttttactacagtgctgtccattgacatccggaggatggaattggcggatttaaacaagcgtcttccgcctgaggcgtgcctgccgtctgccaagcctgtagggcagcccacccgatatgagaggcagctggcagtccgcccaagcactccccacactataacactacaaccttcctcttttagaaatctcaggctgccgaagagactccgtgtggtctacttcctggccaggaccaggctggcacagaggctgataatggcaggcacagtggtctggattggtattttagtctataccgaccctgctgggttaagaaattatctggccgctcaggtgacggagcagagtcctctgggcgaaggtgccctagcccctatgcccgttccctctgggatgctgccgccatcccatcctgatccagcattctccatctttccaccagatgcacctaaactgccagaaaaccaaacaagtcccggagaatcacctgagaggggaggccctgctgaggtggtgcacgatagccccgtgcctgaggtcacgtggggacccgaagacgaagagctgtggcgaaagctcagtttcagacactggcccaccctctttagctactacaacatcactttagcgaaacgatacatatctctgctgcctgttatcccagtgaccttgcggctcaatccaagggaggccttggaaggcaggcacccccaggacggtagatccgcttggcctccaccaggcccaattcctgctggccattgggaagccggacctaaaggccctgggggtgttcaggcccacggagatgtaacactgtacaaggttgccgcactcggactcgccacaggaattgtgctggtgctcctgctgttatgcttgtaccgcgtgctgtgccctcgcaactacggccagctcgggggaggccctggtcgacgtcggcgtggagagcttccatgcgatgactacggatacgcccctcccgagactgagattgtgccattggtgctccgaggccatttgatggatattgagtgccttgccagcgacggtatgctcctcgtcagctgctgtcttgctgggcacgtatgcgtgtgggatgcgcaaactggggactgtctgactcgaatcccaagacccggacaaaggagggacagcggcgtggggtctggacttgaggcgcaggaaagttgggaacgactcagtgacggcggtaaggcaggccctgaggagcccggagacagccctcccctgcggcataggcccaggggtcctccacccccatcattgttcggggaccaaccagacttgacctgcctgattgatactaacttcagtgctcagcccagatctagccagcctactcaacctgagccccgacatcgcgcagtgtgtggtcggagtcgcgacagccctggctacgatttttcatgcctggttcagcgtgtctaccaggaggaaggcctggccgctgtatgcactcccgcactaagacctcccagccccggtcccgtgctgtctcaggcgcctgaggacgagggcggtagccccgaaaaaggatcccccagcctggcgtgggccccttcagccgaagggtctatctggtcgttagagctgcagggcaatctaattgtggtaggaaggtcaagcgggaggttggaagtgtgggacgccattgagggtgtgctgtgctgttcatcggaggaggtatcctccggcattactgccctggtgttccttgacaaacgcattgtggctgcaagactgaatgggtcccttgacttcttctcactggagacacatacggccttaagtcctctgcagtttaggggcactccaggtagaggctcctctccggcaagtccagtttacagcagttctgatactgtcgcctgtcacctgacacacaccgtgccctgcgcccatcagaaacctatcaccgcccttaaagcagccgcagggaggttggtgaccggctctcaggatcataccctcagggtgttccggctggaggacagttgctgtctgttcacactgcaaggccactccggcgctattaccactgtctatatagatcaaactatggttctcgcaagcggtgggcaagacggcgcaatttgtctgtgggacgtgctgacaggctcccgggtgagtcacgtattcgcacatcggggagatgtcacaagcttaacctgcacaacttcatgcgtgatctcgtcaggactggacgacctcattagtatttgggataggagtactggtatcaaattctactccatccagcaagatttggggtgtggggcttcgcttggcgtgatcagcgataacctgctcgtgacgggaggacagggttgcgtgagtttctgggatctgaattacggggatctccttcaaacagtgtatctcggtaaaaactctgaagcccagccagcccgacagattctggtgctggataacgcggcaatcgtttgtaactttggaagcgaactgagcttggtctatgtgccctcggtcctggaaaaactggactag

SEQ ID NO: 242403 - DNA, 792 bp, synthetic construct
  misc_feature 1..792: note = Description of Artificial Sequence: Synthetic coding sequence
  source 1..792: mol_type = other DNA
atgctgttagcctgggtgcaggctttcctggtgtctaacatgcttttggccgaggcttacggtagcggtggatgtttctgggataatggacacctctaccgcgaggaccagacttccccagcccctggcctgaggtgtttaaactggctggacgcccagtccggacttgcgtcagctcccgtgagcggcgcaggcaaccattcctactgccgtaaccctgacgaggaccctcgcggtccttggtgctatgtgagtggggaggccggagtccccgaaaaacgaccctgtgaagacttacgatgtccggagaccaccagtcaggcgctgccggcttttaccaccgagattcaagaggccagcgagggtccaggagcagacgaagttcaagtttttgctcctgctaacgccctgcctgccaggtctgaggctgccgcagtgcagccggtgatcggaatctctcagagagtcaggatgaactccaaggagaagaaggaccttggaactttgggatacgtgctgggcattaccatgatggtcataatcattgctattggcgctgggatcattcttgggtattcttacaagaggggcaaggacttaaaggaacagcacgatcagaaagtctgcgagcgggagatgcagagaattacattgccattgagcgcttttactaatccgacctgcgagatcgtagacgaaaagactgttgtcgtacacacaagtcaaacacccgtggacccgcaggagggaacaactcccctgatgggtcaggcaggcacccctggagcatag

SEQ ID NO: 242404 - DNA, 1176 bp, synthetic construct
  misc_feature 1..1176: note = Description of Artificial Sequence: Synthetic coding sequence
  source 1..1176: mol_type = other DNA
atgtactctatgatgatggagaccgacctgcactctcccggaggggctcaggctcctaccaacctgtcaggaccggcaggagctggcggaggcggtggcggagggggaggaggcggaggcggaggaggcgcaaaagccaaccaggatcgcgttaaaaggcccatgaatgccttcatggtctggagtaggggccagaggcgcaaaatggctcaggagaatcctaagatgcataacagcgagatttctaagaggctgggggcagagtggaaggtgatgtccgaggccgagaagaggccgttcatcgatgaggccaagcggctccgggctctgcacatgaaggagcatccagactacaaatatcgcccacggaggaagaccaagaccttgctaaaaaaggataagtattcactggcgggtggtctccttgcggcaggggcaggaggcggtggggcagccgtagctatgggagtcggtgttggagttggtgctgctgctgtgggccagcgcctggaaagcccgggtggagcagctggagggggatacgctcacgtgaacggctgggcaaacggcgcttatcctggatctgttgccgcagccgcagctgccgcagccatgatgcaagaagctcagctcgcttatggccagcaccctggcgcagggggagctcatccacatgcccacccagcacatccacatccgcaccacccacatgcccacccgcataacccgcagcctatgcaccgctacgacatgggcgctctgcagtactctcctatttccaactcccagggatatatgtccgcttccccgtcaggctacggcggtctgccatacggggctgccgctgccgcagctgctgcagctggcggagcgcatcaaaactctgccgtagctgcagccgcagctgccgcagccgcttcctccggtgccctgggtgcacttggttctctggttaaatccgagccatccggatcgccacccgcaccggcacactccagggcgccttgccccggtgatttacgggagatgattagtatgtatctgccagcaggcgagggaggtgatcctgcagctgcggctgcagccgctgcacaatctcgtctgcactctctgccacaacattaccagggcgctggggcaggagttaatggcacagtcccccttacccatatatag

SEQ ID NO: 242405 - DNA, 1326 bp, synthetic construct
  misc_feature 1..1326: note = Description of Artificial Sequence: Synthetic coding sequence
  source 1..1326: mol_type = other DNA
atggtgcaacaagcagagtcactggaggccgaatctaatctgcccagagaagccttagacactgaagagggtgaatttatggcctgctcacccgtcgctctcgacgagtctgatccagattggtgtaagacagcctccggacatataaagaggcccatgaacgcttttatggtgtggtccaagatcgaacggagaaaaataatggagcaaagtcccgacatgcacaatgctgagatttctaaaaggctggggaaacggtggaaaatgcttaaggattcagaaaagatacccttcatacgcgaggccgagagactgagactcaagcacatggcagactatccagactataagtacagacctaggaaaaagcctaaaatggacccatctgccaagccatctgcctcccagtctccagagaagtctgcagcagggggagggggtggctccgccggaggcggagccggaggcgctaagaccagtaaaggtagctcaaaaaaatgcggaaaactcaaggctccggcagcagcaggagccaaggcgggagctggaaaagccgcacagtctggtgattatggaggggctggagacgactacgtgttgggctctcttcgcgtgtccggctctgggggaggcggtgctggtaagacggttaagtgtgtctttttggatgaggacgacgacgacgatgacgatgacgatgagctgcagcttcagattaagcaggagccggacgaggaagatgaagaacccccacaccaacagctcctccaaccccctgggcagcagccatctcagctcctcaggcgctataacgtggctaaggtgcccgcaagccctacgctcagctccagcgctgaatcgcctgagggcgcttccttgtatgacgaagtacgagccggagccacatccggagcgggtggaggtagccgcttgtactattcgtttaaaaacatcactaaacagcatccaccaccactggcacaaccagcactgagcccagcatcctctaggtcagttagcacatcttcgagcagcagctctggttcaagcagcgggagcagcggtgaggacgcagacgatctcatgttcgatctctcgctcaatttctcacaaagtgcccacagcgccagtgagcagcagttaggcggaggggctgcagctggtaacctcagtctgagcctcgtggataaagatctggactctttcagtgagggctcgctcggaagccacttcgaatttcctgactattgcacgcctgagctgtccgaaatgattgcaggtgactggctggaggccaatttcagcgacttggtctttacctattag

SEQ ID NO: 242406 - DNA, 948 bp, synthetic construct
  misc_feature 1..948: note = Description of Artificial Sequence: Synthetic coding sequence
  source 1..948: mol_type = other DNA
atggttcagcagcgaggagccagagccaagcgagatgggggtcccccacctccaggacccggacctgcagaggaaggagccagggaacctggctggtgcaaaactccttctgggcatattaaacgcccaatgaacgcatttatggtatggagccaacacgaacgccgtaagattatggatcaatggcctgacatgcacaacgccgagatcagcaaacgactgggcagacgctggcagctgcttcaggattccgagaagattcccttcgtccgggaggctgagcggctgcggctgaaacacatggcggactatcctgactataagtataggccacgcaagaagagcaaaggcgctcccgcaaaagcgagaccccgtcctccaggagggtctggtggcggaagtcggcttaagccaggtcctcagctgcctggacgtggaggcaggagggcagcgggaggccctcttggtggaggggcagctgctcccgaggatgacgatgaggacgatgatgaggagctgctggaggtcaggcttgttgagacacccggacgcgaactttggaggatggtccctgcagggcgagcagccaggggccaggccgaacgggctcagggtccttccggggagggcgctgctgccgctgcagcagcgtcacccacaccgtctgaggacgaagaaccagaggaggaggaagaggaggcggcagcagcggaagagggtgaggaagaaactgtggcatcaggcgaagagtctcttggatttctatcaaggcttccacctggtcccgctgggctcgactgtagtgcactggatcgcgacccagatctgcagcctccgagcggcacttcacactttgaatttccagattactgcacgcctgaagtcacagaaatgattgcaggtgactggagaccctcctctatcgccgatctggttttcacgtactag

SEQ ID NO: 242407 - DNA, 948 bp, synthetic construct
  misc_feature 1..948: note = Description of Artificial Sequence: Synthetic coding sequence
  source 1..948: mol_type = other DNA
atggtccagcagcggggagccagggcaaaacgagacgggggaccccctccccctggacctggacctgctgaggagggcgctcgggagcctggatggtgtaaaacccctagcggccacataaaacgcccaatgaatgcattcatggtgtggagccagcacgagaggcgaaaaataatggatcagtggcccgacatgcacaatgccgaaataagtaagcgtcttgggaggcggtggcaactccttcaggactccgagaagattcccttcgtcagagaggctgagcgcctccgcctcaaacacatggcagactatcctgattataaatacaggcctaggaaaaaaagcaaaggagcgccagccaaggcgcgaccccgtccaccaggcggaagtggtgggggatctagactgaagcctggccctcaactgcctggtagagggggtagaagagccgcaggtggcccactggggggtggcgctgccgctccagaggatgatgacgaagacgacgacgaagagctcctggaagtgcgccttgtggagactcctggccgagaactatggcgcatggtccctgccggtcgggcagcgagagggcaggccgagagggcccagggacccagcggcgaaggagctgccgcagctgcggcagccagtcctacccctagtgaggacgaggaacccgaggaggaggaagaggaagcagccgcagctgaggagggcgaagaagaaaccgtcgctagtggcgaggaatccctcgggttcctgtctcggctgcctccgggacctgccggtctggattgctcggctctggatagagatcccgatttacagcccccatcagggacatcgcatttcgaattcccagattattgtacacctgaggtcacggagatgatcgcgggagattggcgtccatcttctattgccgacctggttttcacctattag

SEQ ID NO: 242408 - DNA, 1869 bp, synthetic construct
  misc_feature 1..1869: note = Description of Artificial Sequence: Synthetic coding sequence
  source 1..1869: mol_type = other DNA
atgtcaatgcgaagccctatctcagcacagctagcattagacggagtgggcaccatggtcaattgcaccataaagtcagaggaaaaaaaggagccttgtcacgaggcaccccagggtagtgcaactgccgctgagccacagcccggagatcccgcacgggcttcccaggattcagctgaccctcaggccccagcgcagggtaacttccgagggtcatgggattgcagtagccctgagggcaacggctcccccgaacctaaacggcctggggtgtccgaagcagcctctggatcccaggagaaacttgatttcaacagaaacctcaaggaggtcgttcccgctattgaaaaactattgagctcggactggaaggagcggtttctgggcagaaacagcatggaagccaaggacgtcaagggaacacaagaatccctggccgaaaaagaacttcaactcctggtgatgatacatcagctcagcacattgcgcgaccagctcttaactgctcactctgagcagaaaaacatggctgcaatgctgtttgagaagcagcaacagcagatggagctcgccaggcagcagcaagagcaaattgctaagcagcagcagcaactgattcaacagcagcacaagattaacctgctccaacagcagatacagcaggtcaatatgccttatgtgatgattcccgctttcccccctagccaccagccgctgccggtgacccccgacagccagcttgctcttccaattcaacccattccttgcaagccggtcgagtatccacttcaactgttgcattccccccctgctccagtggtaaaacggccaggtgccatggccacccaccaccctctgcaggagccttcccagcccctgaatctcacagctaaacctaaagcacccgagctgcccaatacttcaagttctcctagcttaaagatgagtagctgcgtgcctaggcctccttcacatggagggccaactagggacctgcagagctctccgcctagccttcctctcgggttcctcggagaaggcgatgcagtcacaaaagcgatacaggatgcgcgtcagctgctgcactcccacagcggggcacttgacggttcccctaacacccctttccgcaaggaccttatctctcttgatagttccccagccaaagagcgcctcgaggacggttgcgtccatccactcgaagaggccatgcttagctgcgatatggatggaagtcgtcacttcccagaatcaagaaactcttcccacatcaaaagacccatgaatgcgttcatggtgtgggcaaaggacgaaagacgaaaaatcttgcaagcattcccggacatgcacaactcctcaatcagtaagattctgggctccaggtggaaatccatgacgaaccaagaaaagcagccttattatgaggagcaagctaggcttagtcggcagcacctcgaaaagtaccctgactacaagtacaaaccaagacccaagcgtacctgcattgtggaagggaagcgcctgcgagttggcgagtataaggctctgatgcggaccagaagacaggatgccaggcagagctacgtgatacccccacaggcagggcaggtgcagatgtcttcttctgacgtgctgtatcctagagccgctggcatgcctctggcccagcctcttgtggagcactacgtgccccgaagccttgaccccaacatgcctgtgatcgtgaacacctgcagtctccgcgaagaaggggagggtacagacgatcggcactcagtggctgatggggaaatgtatagatattcggaggacgaggattccgagggagaagaaaaaagcgatggtgagctggtggtcctcacagattag

SEQ ID NO: 242409 - DNA, 174 bp, synthetic construct
  misc_feature 1..174: note = Description of Artificial Sequence: Synthetic coding sequence
  source 1..174: mol_type = other DNA
atgagcatgcggagccccatatcggctcagctggcccttgacggcgtgggaacaatggtgaactgtacaatcaagagcgaggaaaaaaaggagccctgtcatgaggccccacagggtagcgctaccgccgctgaaccccagccaggcgaccccgcacgtgcctcgcaggattag

SEQ ID NO: 242410 - DNA, 543 bp, synthetic construct
  misc_feature 1..543: note = Description of Artificial Sequence: Synthetic coding sequence
  source 1..543: mol_type = other DNA
atgtcaatgaggtccccaatttcagcccagttagctttggacggtgtggggaccatggtgaactgtaccatcaaaagcgaggaaaaaaaggagccgtgccatgaggcaccacaggggtcagcaacggcagcggaaccccaaccaggggacccggcacgggcatcccaagacagcgctgacccccaagccccagcacaagggaattttcgcggttcatgggactgtagctcacctgagggaaatggcagcccggaaccaaagcgcccaggagtgagtgaggctgcctcaggatcccaggaaaagcttgatttcaatagaaatttaaaggaagtggtcccagcaattgagaaactgctatcttcggattggaaagagcgttttctgggcaggaatagcatggaggccaaagatgtgaaggggacccaagaatcactcgccgaaaaggagcttcagcttcttgttatgatccaccagctgtcgactttgagagaccaattacttaccgcgcactcagagcagaagaacatggcagctatgctgtag

SEQ ID NO: 242411 - DNA, 723 bp, synthetic construct
  misc_feature 1..723: note = Description of Artificial Sequence: Synthetic coding sequence
  source 1..723: mol_type = other DNA
atgagcaagcctagcgatcacataaagcggccaatgaatgcatttatggtatggtcccgcggtcaacgaagaaagatggcccaggagaaccctaagatgcacaattctgaaatcagtaagaggcttggggctgaatggaagctgcttagcgaggcagagaagcggccatacattgacgaggcaaagaggctccgagctcagcacatgaaggaacacccagattataagtaccgccctcgcaggaagccaaagaacctgctgaaaaaggaccgctacgtgtttcccctgccttacctcggcgataccgatccactgaaggctgctgggctgcccgtgggcgcaagtgatggtctcctgagtgcaccagagaaggctcgtgccttcctgcccccagctagcgctccatactccctcctggatcctgctcagtttagctcctccgccatacagaaaatgggcgaagtgccccacacactcgccaccggcgctctgccttatgcatctaccctggggtaccagaatggagcatttggttccctgtcctgcccatctcagcacacccatacacacccatcacctacaaacccgggttacgtggtcccatgtaactgcactgcttggtctgcgagtacactgcagccccctgtcgcgtatatcctgttccctggaatgacgaagaccggaatcgacccttatagctctgcccacgccaccgccatgtag

SEQ ID NO: 242412 - DNA, 702 bp, synthetic construct
  misc_feature 1..702: note = Description of Artificial Sequence: Synthetic coding sequence
  source 1..702: mol_type = other DNA
atggcccttccaggcagcagccaggatcaggcttggtccttagagccgccagctgcgacagctgccgcatcttcatcctctggccctcaagaaagggagggagccggatcccccgctgcccctggaaccctccctttggaaaaagtgaagagaccaatgaatgccttcatggtctggagtagcgcacagcgcaggcagatggctcaacagaaccctaagatgcacaacagcgaaatcagcaagaggctgggcgcacagtggaagctgcttgacgaggatgaaaaacggcctttcgtagaggaggcaaaacgactccgcgcacggcacctacgcgattatcccgattataaataccgccctcgcaggaaagctaagagcagtggcgcaggtccatcaaggtgcgggcagggaaggggcaacctggcttccggaggcccactctggggccctggctacgccaccacacaaccatcccgtggttttgggtatcgtcctccatcctatagtaccgcatatctacctggtagttacgggagcagccactgtaagctggaggctccaagcccatgcagcctcccgcaaagcgatccacggcttcaaggggagctgctccctacctacacgcattacttaccccctgggtcaccaaccccgtataatcctcctctcgccggagccccaatgccgctgactcacctttag

SEQ ID NO: 242413 - DNA, 702 bp, synthetic construct
  misc_feature 1..702: note = Description of Artificial Sequence: Synthetic coding sequence
  source 1..702: mol_type = other DNA
atggcgctgcctggatcaagccaggaccaggcttggagtctggagccccctgcggctacagctgccgctagttcatcctccgggccacaagagcgggagggcgctggaagccctgccgctcccggaactcttcctctcgagaaggtaaagcgcccaatgaacgcttttatggtctggtcttccgcgcaaaggcgacagatggcccagcagaaccccaagatgcacaattcagaaatttccaagcgactgggcgcacagtggaaactactcgacgaggacgaaaagcggcctttcgttgaggaagcgaagcgtcttcgggcacggcacctccgcgactaccccgactacaagtataggccacgcaggaaagccaagtcgagcggcgcaggcccatcacggtgcggccagggtcggggtaacctggcttctggtggaccactatgggggccagggtatgccacaacccagccctcccggggttttggctataggcctcccagttactctaccgcctacctgccgggatcctacgggtccagccattgcaaactcgaggctccaagcccttgctctctccctcagtccgatcctagattacagggcgagctacttcccacatacacacactatctgccaccgggaagccccacgccgtacaacccaccactcgcaggggcacctatgcccctgacccatttatag

SEQ ID NO: 242414 - DNA, 1245 bp, synthetic construct
  misc_feature 1..1245: note = Description of Artificial Sequence: Synthetic coding sequence
  source 1..1245: mol_type = other DNA
atgtcttctcccgatgcaggctacgctagcgatgatcagtcacagactcaatcagccctccctgcggttatggctggacttggaccctgtccttgggcagagtccctgtcaccaatcggtgatatgaaggtcaaaggcgaggcacccgcaaatagcggtgcaccagccggtgctgccggaagagctaagggagaatccaggataagacgccctatgaacgcctttatggtgtgggccaaggacgaacggaagagactcgctcagcagaaccctgacctgcataatgcggaattgagcaagatgttgggaaaatcctggaaagccctcacactcgcagagaagaggccatttgttgaggaagcagagagactgagggtgcagcatatgcaggaccaccctaactataagtatcgcccaagaagaaggaagcaggtgaaacgtctgaaaagagttgaaggaggctttctccacggtcttgctgagccccaggcagctgccctggggccagagggcggaagagtggcgatggacggcctcggccttcagttcccagagcaaggcttcccggcagggcctccactcttgccaccgcacatgggtgggcactacagggattgccagagcttgggcgcaccccctttggacggctaccctttgcccactcccgacacaagcccgctcgatggagttgacccggacccggctttctttgccgctcccatgccaggtgattgccccgcagcgggaacctacagttatgcccaggtgtcagattatgcgggacctcctgagccaccggcaggtccaatgcatccacgtctcggacctgagccggctggaccatccatccccggtctactagcccctccctcagccctgcacgtgtactacggagccatgggctcacctggggctgggggtggtcgcggttttcagatgcagccccagcatcagcaccagcaccaacaccagcatcatccaccaggtccaggccagcctagtcctccccctgaggcactgccttgtagggatggcactgatccaagccagcctgcagagttgctgggagaggttgacaggactgaatttgagcagtatctccattttgtgtgcaaaccggagatgggactgccataccaaggtcacgattctggggtgaaccttcccgatagccacggcgctataagtagcgtagtgagcgatgcatcctctgcggtgtattactgtaattacccagatgtgtag

SEQ ID NO: 242415 - DNA, 1155 bp, synthetic construct
  misc_feature 1..1155: note = Description of Artificial Sequence: Synthetic coding sequence
  source 1..1155: mol_type = other DNA
atgcagcggtctcctcctggctatggagctcaggatgatcctccagctcgtcgcgactgcgcatgggcccctggacacggagcggctgcagacacacgcggtctggccgctggcccagcggcattggctgcaccagcagctcccgcatctccgccaagccctcagagatccccccctcgctcccccgagccgggtcggtatgggctgtcccctgctggccgaggcgaacgtcaggccgctgacgaatcaaggattcgccgtccaatgaacgccttcatggtgtgggctaaggacgagcgcaaacggctggcacaacagaatccagacctccacaacgcagtcttatctaagatgcttgggaaagcttggaaagagctgaatgctgctgaaaaaaggcccttcgtggaagaggcggaaagactgcgggtgcagcacctccgagatcacccgaattataagtaccgacccagaaggaaaaagcaggctaggaaggctcgaagattggaaccaggtctcttattgccagggctcgccccaccccagccaccccctgagcctttcccagctgccagcggatccgctagagcttttcgggagttgccgccactcggtgcagagtttgatgggcttggcctgcccacccccgagcgcagccccctcgacggcctcgaacccggagaggctgcattttttccaccccctgctgctcctgaagattgcgccctacgaccatttagagcaccctatgcccctacagagctgtccagagaccccggaggctgctatggcgcacctctggcagaagccttgcgcaccgcgccaccggctgctccgttagccggactgtactacggtaccctggggaccccaggaccatatccaggccctctgtcgcccccacctgaggctccccctctggagtcagccgagcctctgggaccagcagccgacctctgggcggacgtggacctaaccgaatttgaccagtacctgaattgttctcgaactaggccggatgcacccggtctcccttatcacgtggctctcgccaagctcgggccacgtgctatgtcatgtccggaagaatcatctctgatctcagctctgtccgatgctagttctgccgtctactactcagcatgcatcagcggttag

SEQ ID NO: 242416 - DNA, 831 bp, synthetic construct
  misc_feature 1..831: note = Description of Artificial Sequence: Synthetic coding sequence
  source 1..831: mol_type = other DNA
atgtctaaaccagtcgatcacgtcaaacggccaatgaacgcattcatggtctggtcgagagcacagagaaggaagatggcacaggaaaatcccaagatgcacaacagcgagatatcaaaaaggctcggcgctgagtggaagttgctcacagagtctgaaaagagacctttcatcgacgaagcaaagcgcctccgggcaatgcacatgaaagaacaccctgactataagtatcgccctcgtcgcaaaccaaagaccctcctaaaaaaagacaaatttgccttcccggtgccctatggcctaggcggagtagcagatgcggagcatccagccctcaaggccggagctggcctgcacgcgggagcaggcggaggcctggtgccagagtccttgctcgctaatcccgaaaaagccgctgccgctgcagccgctgcagccgctcgggtctttttcccacagagtgccgcagctgccgctgcagcggctgcagctgccgcagctggctccccttatagtcttctggatctcggctctaagatggccgaaatctcttccagtagctcaggtcttccttacgcctcttcgctcggataccccaccgcgggtgcgggtgcttttcatggcgcagcagccgctgccgctgccgcagccgctgccgcagggggacacacacactcacacccatcgcccggaaatccgggatacatgattccctgcaactgtagtgcctggccttctcccggacttcaacccccacttgcctatatcctgctgccaggtatggggaaaccacagctggatccttatccagctgcctacgctgcagcactttag

SEQ ID NO: 242417 - DNA, 1341 bp, synthetic construct
  misc_feature 1..1341: note = Description of Artificial Sequence: Synthetic coding sequence
  source 1..1341: mol_type = other DNA
atgagacccgttcgcgagaactcatcgggggctcggagtccacgggttcctgcagacctggcgaggagcatcctaatttcccttccattcccgccagactctctggctcacaggccaccatcttcagcgcctactgaatcgcagggcctgtttacagtagcagcccctgcaccaggggctcccagtcctcccgctaccctcgcccacctgctgcccgcacccgcaatgtactccttgctagagacagaacttaagaaccccgtcgggactccaacccaagcagcgggtacaggcggaccagccgcacccggaggcgctgggaaatccagtgctaatgcagcgggaggcgctaactccgggggaggttcctctggaggggcttcaggtggtgggggtggtacggatcaggaccgcgtcaaacgaccgatgaacgcttttatggtctggtcaagagggcaaagaaggaaaatggctcttgagaatcccaagatgcacaattcggagattagcaaacgtctgggggcagattggaagttgttgaccgacgctgaaaaacggccattcatcgacgaagccaaacgccttagggcagtgcatatgaaggagtacccggattataaatacaggccaaggaggaagacaaaaactctcttaaagaaagacaaatacagcttgccctccggcctcctgcctcccggagccgcagcagctgccgctgcggctgccgctgccgctgcagccgctagcagtccagtcggggttggacagagactcgatacttacacgcacgtgaatggctgggccaatggtgcctatagtttagtgcaagaacagctgggttacgctcagccaccctcgatgtctagccctccaccgccacccgctcttccacccatgcaccggtatgatatggctggcctacaatatagccctatgatgcccccaggggcacagagttacatgaacgtcgcagccgcagccgcagctgcttctggatatggtggcatggcaccatcagcaactgccgctgctgcagccgcttacggacaacagcccgctactgccgctgctgccgctgctgccgctgctgcgatgagtctgggaccaatgggaagtgttgtgaagtccgaaccatcaagccccccaccggcaatcgcaagtcactcccagcgggcttgtcttggagacctacgagacatgatatctatgtaccttccacccggaggagacgcagcagatgccgctagccctctgccaggagggagactgcacggggttcatcaacattaccagggggctggtactgcagtcaatggaacggtcccccttacccacatttag

SEQ ID NO: 242418 - DNA, 2253 bp, synthetic construct
  misc_feature 1..2253: note = Description of Artificial Sequence: Synthetic coding sequence
  source 1..2253: mol_type = other DNA
atgtccagcaagaggcccgcttctccctatggcgaggcagacggcgaggtggccatggtaacctcgagacagaaggtggaggaagaggagtccgatggactgccagcatttcacctgcctttacacgtgtcctttcccaacaaaccacattcagaggaattccagcctgttagtctactgacacaggaaacttgcggccatcgcacacctacttcccagcataatactatggaggtcgacggaaacaaggtcatgagtagctttgcccctcacaattccagtacttcacctcagaaagcagaagagggtggacgccaaagcggcgagagtctgtcatctacagctttgggtaccccagaacgcagaaaaggcagtctggctgacgtcgtggataccctcaagcagcggaagatggaggagctcattaagaatgaaccagaagaaacgccatccattgaaaaactgctgtcaaaggactggaaggacaagcttctcgccatgggatcaggcaatttcggtgagataaagggaacaccagagtccctggctgagaaagagcgccagcttatggggatgatcaatcagctgaccagtctgagggaacagttattagcagcgcacgacgaacaaaaaaagctggccgcaagccaaatcgagaagcaaagacagcagatggagctggcgaagcaacagcaggaacagattgccagacagcagcaacaactccttcagcagcagcacaaaatcaatctgctgcagcagcagatccaggtgcaagggcagctcccccctttaatgatccccgtgttccctccagatcagcgcacactggcagctgcggctcagcagggcttcctgttgccgcctggctttagctataaagcaggctgttctgacccttatcccgtgcagctcattcccaccactatggccgctgctgcagctgcgacacctggcctcggacccttgcaactacagcagctgtacgctgcccagctcgcagctatgcaagtttcacccggaggcaagctcccgggtataccacagggcaatcttggagctgctgttagcccaacgtccatacatactgataagtcaaccaacagtcccccacccaagagcaaggacgaagtggctcagccactgaatctgtccgccaagccaaagactagcgatggtaaatctccaacctccccgacatccccccacatgcccgcactgaggattaactctggcgcaggacccctgaaagcatccgtgccagccgcactcgccagcccttccgcaagggtctctactatcggttaccttaatgaccatgatgccgtgaccaaagccatccaagaggcaagacagatgaaagagcagctgcggagagagcagcaggttctagacggaaaagtggctgtagtcaacagtctgggactgaacaactgccgcactgaaaaggaaaagacaacattggagtcattaactcaacagctcgccgtcaagcaaaatgaggagggcaagttcagccacgcgatgatggatttcaatctttctggcgacagtgatggtagtgccggagtaagtgaaagccgaatatatagggagagtagaggaaggggctcaaatgagccccatattaagaggcccatgaacgcctttatggtgtgggcaaaggatgagcgaagaaagattctgcaggcttttcctgacatgcataacagtaacataagtaagattctgggatcacgttggaaggccatgactaacctggagaaacagccctattatgaagagcaagccagactatccaaacagcacctagaaaagtacccagactataaatataagccacggcctaagcggacgtgtttagtagacgggaaaaagctgagaattggagaatacaaggcaatcatgaggaatcgacgacaggaaatgcgccaatactttaatgtgggccagcaagcccaaatccctatcgcgaccgccggtgtggtttaccctggcgctatcgcgatggccggaatgcccagcccccatttgccgtctgagcactcgtctgtgtcaagttcccctgagcccggaatgccagtcatacagagcacctatggtgtgaagggagaggagccacatatcaaagaagagattcaggcggaggacattaacggggagatctacgacgaatacgatgaggaagaagatgaccccgatgtggactacggttcagacagcgagaatcacattgcgggacaggcgaactag

SEQ ID NO: 242419 - DNA, 1929 bp, synthetic construct
  misc_feature 1..1929: note = Description of Artificial Sequence: Synthetic coding sequence
  source 1..1929: mol_type = other DNA
atgagtagcaagagaccagcgtccccgtatggtgaggcagatggtgaggtggccatggtaacctctcggcagaaggttgaagaagaggagtctgacggcctcccagcgtttcacctgccgctgcatgtctccttccccaataagccccactctgaagaatttcagcccgtaagtctgcttacgcaggagacgtgtggacaccgaacaccaacatctcagcataacaccatggaggtagacggtaataaggtgatgagctcttttgcgccacacaattcatccacttctccccaaaaagcagaagagggcggacggcaatctggtgagtctctgtcttccactgctctcggcacccctgaacggaggaaagggtccctggccgacgtagtggatactctgaagcagaggaaaatggaggagcttatcaagaatgagcccgaagaaacgccttccatcgagaagctgttgagcaaggactggaaggataagttgctggccatgggctccgggaattttggggagatcaaagggacaccagagagtctcgctgagaaagaacggcaactgatgggtatgattaaccagctgacttccctccgggagcaattgctggcagcccacgatgaacagaagaaattagccgctagtcagatagaaaagcaacgtcagcagatggaactggctaagcagcaacaggagcaaattgctaggcaacagcaacaactgcttcagcagcagcacaagatcaacttgctgcagcagcagatccaggtgcagggtcagcttcccccactgatgatccctgtcttccccccagaccagagaaccttggcagccgctgcgcagcagggcttcctcctaccgccagggttctcttacaaggctggctgtagcgacccctaccccgtgcagctcattcccaccactatggcagccgctgctgccgctacccccggacttggcccactccagcttcaacagctctatgccgctcagctagccgctatgcaggtcagtcctggtgggaaactgcctggcatcccccagggcaacctgggggctgccgtctctccaacatcaattcacaccgacaaaagcacgaattctccgccacctaaaagtaaggagaaaacaacactggagagcctgactcagcaattggccgtgaagcagaatgaggaggggaagttcagccatgctatgatggatttcaacctgagcggcgatagcgatggctcagctggtgtgtccgaaagcaggatttaccgcgaatcccggggaagaggtagtaatgaaccgcacattaaaagaccgatgaacgctttcatggtatgggctaaagacgagaggagaaagattctgcaggcgtttccagacatgcataattccaatatctcaaaaatcctcgggagtcggtggaaggctatgacaaacctcgagaaacagccttactatgaagagcaggcccgattgtccaaacagcacttggagaaatatcccgattataaatacaaacctcgccctaaacggacctgcctggtggacggaaagaaactgcgcattggagaatacaaagccatcatgcgaaaccggcgacaagaaatgcgtcaatactttaatgtcgggcagcaagcgcagattcccatagccacagcaggcgtggtctatccaggcgcaattgcaatggcagggatgccatccccacatctgccatctgagcacagctctgtgagttcctcgccggagccaggaatgcccgtcattcagtcaacctatggcgtgaagggagaggagccacacattaaggaggagatacaggccgaagacataaatggcgagatctatgacgagtacgatgaagaggaggacgaccccgatgtggactacggctccgactcagagaaccacatcgccggacaggccaattag

SEQ ID NO: 242420 - DNA, 1134 bp, synthetic construct
  misc_feature 1..1134: note = Description of Artificial Sequence: Synthetic coding sequence
  source 1..1134: mol_type = other DNA
atgcatgatgaggtcgcccaaccactcaacttgagcgccaagcctaaaacgagcgatggcaaaagcccaacatctcctacgagccctcacatgccagcactccggataaactccggagctgggccactgaaagctagcgtccccgctgcattggcttctccatccgcgcgagtttcaaccatcggctacctgaatgatcacgacgccgttacaaaagccatccaggaggcacggcagatgaaggagcagctgcggcgagaacagcaggtgctcgatgggaaggtggcggtggtaaatagcctaggacttaataactgccggacagagaaggagaagactactctggagtcactcactcagcagctggccgttaaacagaacgaggagggcaaattcagtcacgccatgatggactttaacctgtccggagactccgatggctcggctggggttagcgagagccggatttacagagagagtagagggagggggtccaacgagccacatattaaacggcctatgaacgcttttatggtttgggctaaggatgagaggagaaagattctgcaagcatttcctgatatgcacaactcgaacataagcaaaatacttggctcccgatggaaggctatgacaaacttagagaaacagccctattatgaagaacaggcccgactgtccaaacagcatctcgagaaatacccggattataagtacaagccacgccctaagaggacctgtctggtggatgggaaaaaacttagaatcggcgagtacaaagccattatgcggaacaggagacaggagatgcggcagtattttaatgtggggcagcaggcgcagattccaattgctactgcaggcgttgtctaccctggcgcaatagccatggccggaatgccaagtcctcacctgccttctgagcattccagcgtatcaagctctccagagcccggaatgcccgtaatccaatctacatacggagtgaagggagaagagccacatatcaaggaagaaatccaggcagaagacattaacggcgagatttatgatgagtacgatgaggaagaggacgatccagatgtcgactacgggtctgacagtgagaaccatattgcaggtcaggctaattag

SEQ ID NO: 242421 - DNA, 1764 bp, synthetic construct
  misc_feature 1..1764: note = Description of Artificial Sequence: Synthetic coding sequence
  source 1..1764: mol_type = other DNA
atgtcaagtaaacgcccagcatcaccttatggggaggccgatggagaagtcgccatggtaacctcaaggcaaaaggtcgaagaagaagaaagcgatggattgccagcattccatctccctctgcatgaagttgacggcaacaaagtgatgtcctcctttgcgcctcacaactcatcaactagcccccagaaggccgaggagggtggcagacagtccggcgagagtctaagctccaccgccctgggaactccggaaaggcggaagggaagtcttgcagatgtcgtggacactctcaaacagagaaagatggaagagcttatcaagaacgagccggaggagacaccctcgatagagaagctgttatccaaagattggaaggacaagctactcgctatgggtagcgggaactttggggaaataaaggggacgccagagtcgctagcagaaaaagagaggcagttgatgggaatgataaaccagctgacaagtttaagagagcaactgctggcagcccatgatgagcagaaaaaactggcggctagccagatcgagaagcagagacaacaaatggaactggccaaacagcagcaagagcaaatcgccagacagcaacaacagcttctgcagcagcaacacaagatcaatcttttgcagcaacagatccaggtacagggccagttgcctcccctcatgatcccagtgtttccaccggatcagagaactctcgctgctgctgcccagcaggggttcctcttgccgccagggttcagctataaggccggatgcagtgatccatatcctgtgcagctgataccaacgacaatggccgcagctgctgctgccactccaggcctcggtccgctgcagcttcagcaactgtatgcagcacagctggccgctatgcaggtttcaccgggtgggaagctccccggaattccacaggggaatctaggggctgctgttagtccaacctcaatccacacagataaaagcaccaacagccccccaccaaaatccaaggatgaggtggcccaaccattgaacctgtctgctaaaccgaagacctcagacggaaagtccccaacatcccctactagcccacacatgccagcactgagaatcaacagcggagcgggacccctaaaggcatcagtcccggcagcccttgcctctcccagcgctagggtcagcaccatagggtaccttaatgaccatgacgccgtgacgaaggccatccaggaggctagacaaatgaaggagcagctcaggagagaacagcaggtgttggacggaaaagtcgccgtcgtgaatagcctgggcctcaacaattgccggactgaaaaggagaaaactaccctagaaagcctgacccagcagctcgccgtaaagcagaatgaggagggtaagttctcccacgccatgatggattttaacctgtcgggcgacagcgacggcagtgccggagtctccgaatctcgtatctatcgcgaatctcggggtcgaggctccaacgaacctcacattaaaaggccaatgaatgcttttatggtttgggccaaagacgaaagaagaaagatattgcaggcctttccagacttgggattcctgtgcgtatgtatgtatgtaataatggtgcttattataggaatcaccctcgatcactgtgagctcaatccccatctcgggatgaaatctcacatcttaccatctgactggagccggaacaacctggacctggattttgcgctgcagatgacaacttag

SEQ ID NO: 242422 - DNA, 2292 bp, synthetic construct
  misc_feature 1..2292: note = Description of Artificial Sequence: Synthetic coding sequence
  source 1..2292: mol_type = other DNA
atgctgacggaccctgatctgccccaggaatttgaaaggatgtccagcaagagacccgctagcccctacggcgaagccgatggcgaagtggccatggttacaagcaggcagaaagtagaagaggaagagagtgatgggctcccagcctttcatctgccattgcacgtgtcctttcccaataaaccgcattctgaggaattccagcctgttagtctgctgacccaggagacatgtggccatagaacccctacgtcgcagcacaataccatggaagtggacggtaacaaggtgatgtcatctttcgcaccccacaattcgtctacttcaccccagaaggcagaagaagggggaagacagtctggcgaaagtctatcctcaaccgcattgggcacccccgaacggagaaagggctcacttgcggacgtcgttgacactctcaaacagcgaaagatggaggaactcatcaagaacgagcctgaggagaccccttccatcgaaaaattactctctaaagattggaaggacaaactcctggccatgggcagcgggaacttcggggagataaaagggacacctgagtctctggccgagaaggagcgacaactgatggggatgattaatcagctgactagcctgagagagcagttgttggccgcacatgacgaacagaagaagctcgcggcaagtcaaatcgaaaaacagcgacaacagatggagctggcgaagcagcagcaggaacagatcgccagacagcaacagcagctgctgcagcagcagcacaagataaacttactgcaacaacagatccaggtgcaaggccaactgcctcctctgatgattccagtcttcccgccagatcagcgcaccctagccgctgccgctcagcaaggttttttgcttcccccaggcttctcttacaaggccggttgctctgacccttaccctgtgcagctgatcccaacgacaatggctgccgctgctgctgccacgcctggactgggccctctgcagttacagcagttgtacgccgctcagcttgccgctatgcaggtgagtccaggaggaaaactacccggaatcccacagggcaacctgggagcggctgtgtctccaacgtccatccacacggataaaagcaccaattcaccacctcccaaatcaaaggacgaagtagctcagccgcttaatctcagtgcgaagccaaagacttctgacgggaaaagcccaacttccccaacctcaccccatatgccagccctgagaatcaattccggcgctggacccctgaaggcttcagtacctgctgcactcgcatcacctagtgcccgtgtgagcacaatcgggtacctcaacgaccatgatgcggtgacaaaggccatacaggaagccaggcagatgaaggaacagttgcgacgcgagcagcaggtactggacgggaaggtagctgtcgtaaattcgctggggctcaataactgccgcactgaaaaagagaagactaccttagaatcacttacccagcaactggccgtgaagcagaatgaggagggcaaattttctcacgcaatgatggatttcaatctgtcaggagactccgatggaagcgctggagtcagtgaaagtcgaatctatagggagagcagggggagaggtagcaacgagccgcacatcaaacggccaatgaacgctttcatggtttgggctaaagatgagagacgcaagatcctgcaggcatttccggatatgcataattcaaatatcagtaagatacttggctccagatggaaggctatgacaaacctggagaaacagccctactacgaggagcaggccagactcagtaaacagcacctcgagaagtatcctgactacaaatataagcctcgcccaaagcgcacgtgtctggtggatggaaaaaaactgcgcatcggagaatacaaggcgatcatgaggaaccggcgtcaggagatgcgacagtacttcaatgttggccagcaggcacagatccctatcgccacagctggggtggtttacccaggcgctattgcgatggctggaatgccaagtccacacttgccctccgaacattcctcggtttccagctccccagaacctggtatgccagtaatacagtcgacctacggtgtgaaaggggaagaaccacacattaaagaggagatccaggccgaggacataaatggagaaatctatgatgaatacgacgaggaggaagacgaccctgacgtcgattacgggagtgactcagagaaccacatagccggacaggctaactag

SEQ ID NO: 242423 - DNA, 1929 bp, synthetic construct
  misc_feature 1..1929: note = Description of Artificial Sequence: Synthetic coding sequence
  source 1..1929: mol_type = other DNA
atgtcctccaaacggccagcgagtccctatggtgaggcagatggtgaagtcgctatggtgacatcccgtcagaaagtggaggaagaggagtccgacggcctgccagcatttcacctgcctctgcacgtttcctttcccaacaaaccacatagcgaggaatttcagcccgtgagcctacttactcaggaaacatgcgggcaccggaccccaacaagtcagcacaataccatggaagtggatggcaataaggtcatgagctcctttgctcctcataacagttccaccagcccccagaaggccgaagaggggggtcgacagtccggcgaaagtctaagcagcacagccctcggaacccctgaaagaaggaaaggaagcctcgccgacgttgtggacactctgaagcagaggaaaatggaagaactaataaagaatgagccagaagagactcctagcattgagaagctcttaagtaaggactggaaagataagctcctcgcaatggggtcaggcaactttggcgaaattaaagggacgcccgaaagtctggcagaaaaagaaagacagctgatggggatgatcaatcagctgacttcacttagagaacaactgcttgcagcacacgacgaacagaaaaagctcgcggcttcccagattgagaaacaacggcaacaaatggagctggccaaacagcaacaggaacagatcgcacggcagcagcagcaactgctgcaacagcagcataagatcaatttattacaacagcagatccaggtgcagggtcagcttccacccttaatgatacccgtcttccctcccgaccagcgaaccctggcagccgctgcacagcagggctttttgcttcccccagggttctcctataaagctgggtgtagtgacccatacccagtgcaactgattccaaccaccatggccgcagccgctgcggctacccctggcttgggccctttgcaactgcaacagctctacgcggcacagctggccgctatgcaggtgtctcccggaggaaagcttccaggaatcccacagggcaacctgggtgcagcagtgtcacctacctctatccatacagataagtccactaactctcctcccccaaagtctaaggagaaaaccactttggagtcccttacccagcagcttgccgtcaaacagaacgaagagggtaagttttcccacgccatgatggacttcaacctgagcggtgatagtgacgggagtgctggtgtgtcagagagccgaatctaccgtgagagtcgaggacggggaagtaacgagccccatattaagaggccgatgaatgccttcatggtgtgggccaaggacgaacgacgaaaaattctgcaggcgttccccgatatgcataacagcaatatctccaagattctgggtagcagatggaaggccatgactaatctcgagaagcaaccctactatgaagaacaggcccgtctgtccaaacaacatctggagaaataccccgattacaaatacaagccacgcccaaagcggacgtgcttagtggacggaaagaagctgagaatcggtgagtacaaggccatcatgcggaacaggcgccaggagatgcggcaatatttcaacgtgggccagcaggctcagattcctatagcgactgcaggggttgtgtatcctggtgccattgctatggctggcatgccaagcccccatctgcccagcgagcacagctccgtctcgagcagccctgagcccggaatgcctgttattcagtcaacctacggggtcaaaggggaagagccccacattaaagaagagatccaggccgaggacattaatggagagatctatgacgagtatgacgaggaagaggacgatccagatgtggactacggatccgactccgagaatcacattgctggacaggctaattag

SEQ ID NO: 242424 - DNA, 2253 bp, synthetic construct
  misc_feature 1..2253: note = Description of Artificial Sequence: Synthetic coding sequence
  source 1..2253: mol_type = other DNA
atgtccagtaagcggcctgcctcaccatacggagaagccgacggtgaggtggcaatggttacaagtcgccagaaagtcgaggaagaagagagtgacggacttccagcctttcatttgcccttgcacgtgtcatttcctaataaaccccacagcgaagaattccagcccgtgtctttgcttactcaggaaacctgcgggcaccggacacccacctcacagcacaacactatggaagtagatggaaataaagtcatgtcaagtttcgccccacataactccagcacatcgcctcaaaaggcagaagaggggggaagacaaagcggcgaatccctcagcagcacagctctgggaacccccgagcgtagaaagggatccttggcagacgtggtcgacacccttaaacagagaaagatggaggagttgataaagaacgagcctgaggaaaccccaagcatcgagaagctgctgtcgaaggactggaaagataagctgctggccatgggcagtgggaacttcggcgagattaagggaaccccagagtctctggcagagaaggaaagacaacttatgggtatgataaaccagctcacaagcctccgcgagcaactgttggccgctcatgatgagcagaaaaagctcgccgcatcgcaaatcgaaaaacagcgtcagcagatggagctggcaaagcagcagcaggagcagatcgcccgtcaacagcagcaactgctgcagcagcagcataagatcaatcttctgcagcaacagatccaggttcaggggcagctgccgccactaatgattcccgtattccccccagaccagcggaccctcgccgcagcggctcagcaggggtttctgttgccgcctggtttcagttataaggcgggatgttcagatccataccccgtgcagcttatccccacgaccatggccgctgcagccgcagctactcctggattgggacccctacaattgcagcaactttacgcggcacaacttgccgctatgcaagttagtccgggaggcaagttacccggaatccctcaggggaacttaggtgcggctgtgagccctacatctatccacaccgacaagtcaacaaacagtcctccccctaagtccaaggatgaagtggcacaaccacttaacctgagcgccaagccaaagactagtgatggcaaatcacctacttctcctacaagtccccacatgcctgcactgagaataaacagcggagctggtccactgaaggcatctgtgccagcggctcttgcaagcccatccgcaagagtgtctaccattggatacctgaatgatcatgacgccgtcactaaggcgatccaagaagccagacaaatgaaagagcaattacggagagagcagcaggtgttggacggcaaggtagctgtggtcaacagtttggggctaaataattgccgcacagagaaagaaaagacgactttggagagcctgactcaacagctcgcagtgaagcagaacgaggagggtaagttttcccacgccatgatggactttaatctctcgggggattccgacggatcagcgggagtctccgaatcaagaatttaccgggaaagtaggggcagaggatctaacgaaccccatatcaagcgacctatgaacgctttcatggtatgggcgaaggacgagcgtcgaaaaatcctgcaggcttttcctgatatgcataacagcaacatatccaaaatacttggctccagatggaaagcaatgactaacctcgaaaagcagccatactacgaggagcaggcccgtctgtcaaagcaacatctggaaaagtacccagactacaaatataaacccaggccaaaacggacttgcctggttgatggcaaaaagctgaggataggtgagtacaaggctattatgagaaaccggcgacaggaaatgcggcagtacttcaatgttgggcagcaggcccaaattccaatcgccactgcaggagtcgtgtatcctggcgcaatagccatggcgggtatgcctagcccccatctgccaagtgagcattcgtcagtgtcaagcagtccggaaccaggcatgcctgttattcagtcaacttacggtgtgaaaggggaagaaccacacatcaaggaagagatacaagccgaagacatcaacggtgagatctatgacgaatacgatgaggaagaggacgatcccgacgttgattatggctcagacagcgaaaaccacattgctggacaggcgaattag

SEQ ID NO: 242425 - DNA, 2427 bp, synthetic construct
  misc_feature 1..2427: note = Description of Artificial Sequence: Synthetic coding sequence
  source 1..2427: mol_type = other DNA
atgagtagcaagcaggcaaccagtccttttgcatgcgctgccgatggcgaggatgcaatgactcaggatctaacttcccgggagaaagaggagggctcagatcagcacgttgcttctcatcttcccctccaccccataatgcacaataaacctcactctgaagaattgcctactttggtgtccaccatacagcaagatgctgattgggattccgtcctgagcagccagcagaggatggagagcgaaaacaataagttgtgctccctctatagcttccggaacacaagtacaagtcctcacaaaccagatgagggaagtagagaccgcgagattatgaccagcgtcacatttggcacacctgagaggcgaaagggatccctggctgacgtggtggatacactgaaacagaagaagctcgaggaaatgacccgcaccgagcaggaagacagtagttgtatggagaaactgctctcgaaggattggaaggagaaaatggagaggttgaacactagcgaattgctcggtgagatcaaaggaacccccgagtcattggctgaaaaagaaaggcaactctccaccatgattacacagttgatctcactcagagaacaattactggccgctcacgatgagcagaagaagttagccgcttcacagattgagaagcaaaggcagcagatggaccttgctcgacaacagcaagagcaaattgctcggcagcagcaacagctgcttcagcagcagcataaaattaatctgctgcaacagcagatacaggtccaaggccatatgccccctctgatgattccgatctttcctcacgatcagaggacattggctgcggcagctgccgctcagcagggatttctctttccccctggcataacctacaagcccggagacaattatccagtccaatttattccatctaccatggccgcagctgctgcatccggcctctcacctctccaactccagaagggccacgtttcccacccacagatcaaccaaaggttgaagggcttgagcgaccggttcgggaggaatctggacacctttgaacacggaggcggtcactcctataatcataagcagatagagcagctgtacgcagcccaactggccagcatgcaagtatcccctggagcaaagatgccctctacgcctcagccacccaataccgcgggtacagtatcccccaccgggatcaaaaatgagaagagggggacctcccctgtaactcaagtcaaggacgaagccgcagcccaacccctgaacctgtcctctcgtcctaagactgctgagcccgtgaagtcacccacttcaccgacccagaatctttttcctgcgagcaagacatcccccgtaaatttgccaaataaatcctccatcccgtcccccatagggggttccctgggacggggttcctctctggatatactatcttctctcaacagccccgctctcttcggggatcaagacaccgtgatgaaggccatccaggaggctaggaagatgcgcgagcagatccagcgggagcagcagcaacagcaacctcacggcgtggacggaaaactgtctagcatcaacaatatgggtctgaattcgtgtcggaacgagaaggagcgaacccgcttcgagaatctggggccacaactgacaggtaagagcaatgaagatggtaaactgggtccaggtgtcattgacctgacacggcctgaagacgccgagggaggagcaactgtggccgaggcgcgtgtgtatcgtgatgcacggggaagggcgtccagcgaaccccacataaagcggcctatgaatgcttttatggtatgggcgaaagacgagaggagaaagatcctccaagctttccctgatatgcacaatagcaatatctccaaaatactgggcagccggtggaagagcatgagtaaccaggaaaaacagccgtattacgaggaacaggcgagactgagcaaaatccacctggaaaaatacccgaactacaaatacaagcctcggcctaagcgaacgtgtatagttgatggcaaaaaacttaggatcggcgagtacaaacaactgatgcggagcagaagacaggagatgcgacagttctttacagtggggcagcaaccacagatccctatcaccacaggcaccggggtggtgtaccctggggctattacgatggcgactaccaccccaagcccgcaaatgacctccgactgcagtagcacctccgcctcgccagagccctctttgcctgttatacaatcaacctatggcatgaagaccgacggcggatctctggccggaaatgaaatgatcaacggcgaggatgagatggaaatgtatgacgattacgaggacgatcctaagtccgattattcatccgagaacgaagcgccagaagccgtgtccgctaactag

SEQ ID NO: 242426 - DNA, 2487 bp, synthetic construct
  misc_feature 1..2487: note = Description of Artificial Sequence: Synthetic coding sequence
  source 1..2487: mol_type = other DNA
atgtcttctaagcaagcaacctccccgtttgcatgcgccgctgatggggaagatgccatgacgcaggaccttacctcgagagagaaggaagaaggcagtgatcagcatgtggctagccacttgccactgcaccctatcatgcacaacaagccccactccgaagaactgcccactctggttagcacgatccagcaggacgcggattgggactccgtcctaagctcacagcagaggatggagtcagagaataataagctctgctccttgtattcattcaggaacaccagcacatcgccacataaaccggacgagggcagccgcgaccgcgaaataatgacgtccgttaccttcggcacccccgagaggcgtaaggggagcctggcagacgtggtggatactctgaagcagaagaagctcgaagagatgacacgaactgagcaggaggatagttcctgcatggagaagctgctatcgaaggactggaaggaaaaaatggagcgactcaatacgtcggaactgttaggagaaattaagggaacccctgagagccttgctgaaaaggagagacaattaagtacaatgattacccagttgatttccctgcgggagcagcttctcgctgcacacgacgagcagaaaaaacttgctgcgagccagattgaaaaacaacgtcagcagatggatctagcaagacagcagcaagagcagattgccaggcagcagcagcagctgctgcaacagcaacataagataaatttgctccagcagcagatccaggttcagggtcatatgcccccattgatgattcccatctttccacatgaccagaggaccctcgctgctgccgcagccgcacagcaagggtttctgtttcccccagggatcacatacaagcctggagataattatcctgtgcaattcatcccgtcgacaatggcagcggcagcagcatctggtctcagcccactccagctgcagaaagggcacgtcagccacccccagatcaaccaacgactcaagggcctcagcgaccgattcgggagaaacttggacacatttgagcacggtggaggtcactcttataaccataaacagatcgagcaactctatgctgcccagttagcctccatgcaggtgagccctggcgcaaaaatgccttctacgccacaacccccaaatactgcagggacagtcagtcccacgggaattaagaatgagaaaagaggaacctcaccggtcacacaagtgaaagatgaggccgctgcccagcccttgaacctttcctctcggcctaagactgcggagcccgtgaagtcccctactagccccacccagaacttattccccgcaagtaaaacatcccctgtcaacctgccaaataaatcgtctatcccatcacccatagggggtagtctgggtagaggatcaagtctcgatattctatcatccctgaattccccagctttgtttggcgaccaggacacagtgatgaaggcgattcaagaggctcggaagatgcgagaacagatccagcgggaacagcagcagcagcagccacacggagtggatggcaagctgtcatctatcaacaacatgggcttgaatagctgtaggaatgagaaagaacgaacgaggtttgagaacttgggcccacagcttaccgggaagtccaacgaggatggcaagctgggcccaggagtgattgacttgactaggcctgaagatgccgagggtagcaaagccatgaatggcagcgctgccaagctgcagcagtattactgctggcccactggaggggctacagtggccgaagcccgagtgtaccgggacgccaggggcagggccagttccgagccacacatcaagaggcccatgaacgcattcatggtctgggcgaaagacgagaggcggaagattttacaggctttcccggacatgcacaacagtaatatctcaaagatcctcggtagccggtggaagtcaatgtccaaccaggagaagcagccctactatgaagagcaagccaggctgagcaaaatccatctggagaagtacccaaattacaagtataagccaagacctaaaaggacctgtatcgtcgatgggaagaagctgagaataggcgaatacaaacagctcatgcggtcacggcgacaagagatgcgtcagttttttactgtggggcagcagcctcaaatacccatcacaactggaacaggggtggtctacccaggtgcaataactatggcaactaccacccccagtccccagatgacgagcgattgcagctccacgtcagcgtctcctgagccttcactacctgtgatccaatcaacatatgggatgaagaccgatggcggtagcctggctggaaatgaaatgataaatggagaggatgagatggaaatgtacgatgactatgaggacgaccccaagtcagactacagcagtgagaatgaggcacccgaggccgtctctgccaactag

SEQ ID NO: 242427 - DNA, 2427 bp, synthetic construct
  misc_feature 1..2427: note = Description of Artificial Sequence: Synthetic coding sequence
  source 1..2427: mol_type = other DNA
atgtcctctaaacaagcaacctccccctttgcatgtgccgcagacggagaggatgctatgacccaggacctcacatcccgcgagaaagaagagggctctgaccagcacgttgcctcccatctcccactgcacccgattatgcacaacaaaccccactctgaagagctgcctaccctggtctcaaccatacagcaagatgctgactgggacagcgtgctgtcatcgcagcagcgtatggaatctgaaaataacaagctgtgctcgctctacagttttcgtaacactagtaccagcccccacaaacctgatgaaggtagtcgggacagagagatcatgacatcggtcacctttggcacgcctgaaaggagaaaagggtcacttgccgacgtggttgatacattgaaacagaaaaagctcgaggaaatgacccgaaccgagcaggaggactcatcctgtatggagaaactgctgagcaaggattggaaggaaaaaatggagcgactgaatacttcggaactgttgggagaaattaaaggcacaccggaatcactagctgagaaggagcgtcagctgtccactatgattactcagctgattagtcttagggagcaattgctcgccgcacacgatgagcagaaaaagcttgcggcaagtcaaatcgagaaacagagacagcagatggacctggcgagacagcaacaggaacagatcgccagacagcagcagcagttgcttcaacaacagcataagattaatcttctgcagcagcagattcaggtgcaaggccacatgccacccctaatgattccgatctttccgcacgatcagaggaccctggcagctgccgctgcggcacaacaggggtttctgtttccgcctggaatcacttataaacccggtgacaattatccagtgcaatttatccctagcacgatggccgcagcagccgcatccggcctatctccattgcagttgcaaaagggccatgtcagtcaccctcagatcaatcagcgtctgaaaggcttaagcgataggttcggacggaatttagatacattcgagcatggcggtggccatagctataaccacaagcaaatcgagcagttatatgctgcccagctcgctagcatgcaagtttcaccaggggctaaaatgccatctacacctcagccgccaaatactgcaggtaccgtctcccccaccggtattaaaaacgagaagaggggtacctcaccagttacacaggttaaagatgaggccgcagctcagccactcaatctctcttccagacccaagacagctgaacctgtcaagagccccacgagccccactcagaacctattccccgcttctaagacttcacctgtgaaccttccaaataagtctagcatcccatctcccattgggggatcgttgggcaggggatctagcctggacatcctgagttcgctgaacagccccgcactgtttggagaccaggatactgtgatgaaagcaattcaggaagccaggaagatgcgggaacagatacagagagagcagcagcaacaacagccccacggggtggatggaaagctttctagcattaacaatatgggcctcaacagttgccgcaatgagaaagagcggacccgttttgagaatttgggaccccagcttacaggcaagtctaacgaagacggcaaactgggacccggagtgattgacctcactcgtcctgaggatgccgaagggggagccactgtggctgaggctcgagtgtacagagatgcacgtggacgggcttcctccgagcctcacataaagagacccatgaatgctttcatggtgtgggctaaagacgaaagaaggaagattctgcaggcattccccgatatgcataattctaatatctctaagattttgggcagtagatggaagtctatgagcaatcaggagaaacagccttactacgaggagcaggctaggctcagtaaaattcacctggaaaagtacccaaattataagtacaagcctcgccctaaaagaacctgcattgtcgacgggaagaaattgcggatcggtgaatacaagcaattgatgaggagcaggcgccaagagatgcgccagtttttcacagttggccagcagcctcagatccctatcacgacaggtaccggtgtcgtctatccaggagccatcacaatggccacaaccaccccatcacctcaaatgacaagtgactgtagcagcacctccgcctcccctgaaccaagtttgccagtcattcaaagcacttatggcatgaagaccgatggcggaagcttagccggtaatgaaatgattaacggagaggatgaaatggagatgtatgacgattacgaggacgacccaaaaagcgactattcttctgaaaacgaggccccagaggccgtttccgcaaattag

SEQ ID NO: 242428 - DNA, 420 bp, synthetic construct
  misc_feature 1..420: note = Description of Artificial Sequence: Synthetic coding sequence
  source 1..420: mol_type = other DNA
atgagttcaaagcaagccacttcccctttcgcctgcgcggctgatggtgaggacgccatgacccaggaccttacctcccgcgagaaggaagagggaagcgaccaacacgtcgcttcacatttgccccttcatcccattatgcataataagccacacagtgaagaactgccgaccctggtgtcaaccattcagcaggacgcggattgggattcagtcctgtctagccagcaaaggatggagtccgagaataacaaattgtgcagcctgtacagcttccggaatacatccacatcacctcacaagccagatgagggttccagagaccgcgagatcatgaccagcgtgacctttgggactcctgaaagacgaaaagggtcgctagcggacgtggtggacacattaaaacagaaaaaattatag

SEQ ID NO: 242429 - DNA, 2406 bp, synthetic construct
  misc_feature 1..2406: note = Description of Artificial Sequence: Synthetic coding sequence
  source 1..2406: mol_type = other DNA
atgagcagcaagcaagcaacatctcccttcgcctgcgccgcagatggcgaagacgccatgacccaggatttgacaagccgtgagaaagaagagggatccgatcagcacgtagcatcacatctgccactccatcccattatgcacaacaagccccattccgaagagctgccgacattagtgtctaccattcagcaggatgcagactgggacagcgtcctgtccagccagcagcggatggaaagtgagaacaacaagctgtgcagtttatactctttccgaaataccagcacctccccgcacaagccagatgaaggtagccgcgatcgagagattatgacttctgtgaccttcggaactcctgagaggaggaagggttccctggctgatgtggttgatacattgaagcaaaagaaactggaggaaatgacacggacagaacaggaggactcctcctgtatggagaagttgttaagcaaagattggaaagaaaagatggagcggttgaatactagtgagctgctgggcgagatcaagggtacacctgagagcctggcagagaaggaaaggcagctgtcaacgatgataacccagttgatctcacttcgagaacagctccttgccgcacacgatgaacagaaaaaactcgcagcctcccagatcgagaaacagcgccagcagatggacctggcgaggcagcaacaggagcagatagctcggcagcagcagcagctgctgcagcagcaacataaaattaacctcctacagcagcaaatacaggtgcagggccacatgccgccactgatgatacctatctttcctcacgatcaacggacacttgccgcagccgcagcagcccagcagggattcttatttcctcctgggattacctacaagcccggagacaattacccggtgcagtttattcctagtactatggcagcagcggctgcttcaggattgagtcccttacagctgcagcagctttatgccgcacagctggcctcaatgcaggtgtccccgggtgccaagatgccctcaactccccagccacctaacacagcagggacggtgagtccaacgggaataaaaaatgaaaagcgcggtacatctcctgttacacaggttaaggacgaagccgcagctcaacccctaaacctctcctctagacccaaaacggccgaacctgtgaagtccccaacctcacccacgcagaatctgttcccagctagtaagaccagccctgttaatctacctaacaagagctccattccatctcccattgggggttcactggggagagggtcaagtctggggaagtggaagtcacaacaccaggaggaaacgtacgaactggatatcctttcatctctgaattcgcccgcactgttcggagatcaggacaccgtgatgaaagccattcaggaggcacggaaaatgagggaacagatccaacgcgaacagcagcagcagcagccgcacggcgtcgacggaaagctgtccagtattaacaatatgggcctgaactcttgcaggaatgagaaggaaaggacaaggttcgaaaacctcggcccacagcttacaggcaagagcaacgaggacggaaagcttgggccaggggtcattgatcttacaaggcctgaagacgccgaggggagcaaggccatgaatgggtccgcggctaagctacagcagtattattgttggccgaccggcggtgcaacagtcgctgaagcgagagtttatcgggacgcgcgtgggcgagcctcttctgagccccatattaaacgcccaatgaacgcttttatggtgtgggcaaaggatgaacggagaaaaatcctgcaggcatttccagatatgcataattcaaatatttcgaagatcctgggtagccggtggaagagtatgagcaaccaggaaaaacaaccatattacgaggagcaggctcggttgtcaaagatccacctggagaaatatccaaactacaaatataagcccaggccaaaacgaacttgtatcgtggacggtaaaaagcttcgaatcggcgagtataagcagttaatgcggtcgcgtcgtcaagaaatgcgtcaattcttcaccgtggggcagcaaccccagatccccatcaccactggcactggtgtggtgtatccgggagcgattaccatggcaaccaccaccccatcaccgcagatgaccagcgactgctcttcaacttctgcctcgccagaaccatcattacctgtgatccagtctacgtacgggatgaaaacagatggcggatccttggctggcaatgaaatgattaatggtgaggatgagatggagatgtacgacgactacgaggacgaccccaagtcagattacagctctgaaaacgaagctcccgaggctgtgtccgccaattag

SEQ ID NO: 242430 - DNA, 2487 bp, synthetic construct
  misc_feature 1..2487: note = Description of Artificial Sequence: Synthetic coding sequence
  source 1..2487: mol_type = other DNA
atgtcaagcaaacaagctacctctccattcgcctgtgcggctgatggggaagatgcaatgactcaggatctgacttctcgcgaaaaggaggaggggagcgaccagcatgtagcttctcatctccctctccacccaattatgcataataaaccccattccgaggagctcccaaccttggtgagcaccatccaacaagacgcagactgggacagcgtgctgagttcacagcagcgtatggagagcgaaaataacaagctgtgttccctgtatagctttcgaaatacttcaacctctccccacaagccagatgagggctcaagggatcgcgagattatgacatccgtcacttttggaactcctgagcgacgtaaaggtagtttagctgacgtagtggataccctcaagcagaaaaagttggaggagatgacccggaccgagcaagaggactccagttgtatggagaaactcttatccaaagactggaaagaaaagatggagcgcctcaatacatctgagctcctgggagaaatcaagggcactccggagagcctagctgaaaaggaacgccagctcagcaccatgattacccagctcataagcctgcgggagcaactgctcgcagctcatgatgagcagaaaaaactagcggcttctcaaattgaaaaacagcgccagcagatggatcttgcccgtcaacagcaagaacagatagccagacagcagcagcaattactgcaacagcagcacaaaatcaacctgctccagcagcaaatccaggtgcagggccacatgccacccctgatgatcccaattttcccacacgaccagcgtaccctggcagctgccgcagccgcacagcaaggctttctgtttcctccagggatcacttacaagcccggtgacaactaccctgtccagttcattccgtcaacaatggccgctgctgccgcatccgggctctcccctctacaactccagaaaggtcacgttagtcatcctcaaattaaccagcggcttaagggactttccgatcgcttcggcagaaatttggacactttcgagcacggcggaggccattcatacaaccacaaacagattgaacagctgtacgccgctcagctagccagcatgcaggtgagccctggagccaagatgccttctactcctcaaccccctaacactgccggaactgtctcccctaccggtattaagaatgaaaaacgaggaactagcccggtcacccaggtgaaagacgaagcggctgctcagcctctaaatctctcaagccgcccaaagacggctgagccagtgaagagtcctaccagcccgacgcagaaccttttccccgcatcaaaaaccagcccagttaaccttccaaataaaagctcaataccatctccaattgggggttcactgggccgaggaagttccttggacattctttcaagtctgaatagccccgctttattcggcgaccaggacaccgtgatgaaggccatacaggaagctaggaaaatgagggaacagatccagcgcgaacagcagcagcagcagccacacggagtcgatggaaaactctcttctataaacaacatgggcctgaactcatgccgaaacgaaaaagaaagaactcgcttcgagaacttagggcctcagctgacaggaaagagcaacgaggatgggaaactgggtccaggggttatagacctgacacgtcctgaggatgctgaggggtctaaagcaatgaatggctccgctgctaaactgcagcagtactactgctggccgaccggaggggctacagtcgctgaagcgagagtctacagagatgcacgcggacgggctagtagtgagccgcacattaagagaccaatgaatgcattcatggtgtgggcaaaagacgagcggcgaaaaattttgcaggcatttcccgacatgcacaatagcaacatttctaaaatcttggggagccggtggaagtcgatgagtaaccaggaaaagcagccatattacgaagagcaggctcgattgagcaagatccatttggagaagtaccccaattacaaatacaaacccagacccaagaggacctgcattgtcgatggcaaaaagctcagaatcggagagtacaagcaattgatgagaagtcggagacaagagatgagacagttctttaccgtgggtcagcagccccagattcccataaccaccggcaccggggtagtttatcccggtgccatcacaatggcaactacaacaccctcaccacagatgaccagcgattgtagttcgacctccgcctcacccgaaccatcactccccgttattcagagtacctacggcatgaaaaccgatggtggctctttggccggtaatgagatgatcaatggcgaggacgagatggagatgtacgatgactacgaagacgatcctaaatccgactactcgagcgaaaacgaagccccagaggctgtatctgccaattag

SEQ ID NO: 242431 - DNA, 240 bp, synthetic construct
  misc_feature 1..240: note = Description of Artificial Sequence: Synthetic coding sequence
  source 1..240: mol_type = other DNA
atgagttcgaaacaggccacctcccccttcgcgtgtgccgcagacggggaagatgctatgactcaggatctaacttctcgcgagaaagaggaggggtccgatcagcatgtggcctcccacctcccgcttcatcctatcatgcataataaacctcactccgaagagcttcctaccctcgtgagcactatacagcaggacgccgattgggatagcgtcctcagcagccaacaaaggatgtag

SEQ ID NO: 242432 - DNA, 480 bp, synthetic construct
  misc_feature 1..480: note = Description of Artificial Sequence: Synthetic coding sequence
  source 1..480: mol_type = other DNA
atgtcttccaaacaagccactagccccttcgcatgcgccgctgacggggaggacgccatgacgcaggatctcacatcacgggaaaaggaggaaggttccgaccagcatgtggcaagtcatttgcctttacatcccatcatgcataacaaacctcactctgaagaactgccaaccttggtttcaactatccagcaggatgctgactgggactcggtgctgtcctcacagcagagaatggaatcagagaataacaagctctgttcactgtacagctttcggaatacttccactagcccgcacaagcccgacgagggttcccgtgatagggagatcatgacgtcagtcactttcggcacgccagaacggaggaaaggctctttggcagatgtggtggatacactaaagcagaagaagctcgaagagatgacacgcaccgagcaggaggacagcagttgcatggagaaactcctgtccaagtag

SEQ ID NO: 242433 - DNA, 2415 bp, synthetic construct
  misc_feature 1..2415: note = Description of Artificial Sequence: Synthetic coding sequence
  source 1..2415: mol_type = other DNA
atgggaagaatgtcttctaagcaagctacttcccccttcgcttgtgctgctgatggagaggatgcaatgacgcaagacctcactagcagagaaaaggaggagggcagtgaccaacatgtagcctcccacctccccctacatcctattatgcataataaaccgcattccgaggagctccccacactggtatccactattcagcaggatgcagactgggactctgtactaagttcacaacaacgcatggaaagcgagaataacaagttatgttccctctacagcttccgaaacacaagcaccagtccacacaagcctgatgagggtagccgggaccgggaaattatgacttccgtcacttttggtactcctgaaagacgtaaaggctcgcttgccgacgtggtggacaccctcaagcagaagaaactggaagagatgaccaggaccgaacaggaagattctagctgcatggagaagctgctgtcaaaagactggaaggaaaagatggagaggttgaacaccagcgaactgctcggcgagatcaagggaaccccggagtccttggctgaaaaggaacggcagctttccactatgatcactcagctcatttcactgcgggagcagctcttggcagctcatgacgaacaaaagaagctcgcagcttcccaaatcgaaaaacagcgccaacagatggatctggctcgtcagcagcaggaacaaatcgccaggcagcagcagcagctactgcaacaacagcacaaaatcaatctgcttcagcagcagattcaggtgcaggggcatatgccaccactcatgattccaatattccctcatgaccaaaggacactggctgcagcagcggctgcccagcagggattcctatttcctccgggaattacctacaaacctggggacaattaccctgtgcaatttattcccagcactatggcggctgcagctgcctccggcctgagtccgctgcagctgcagcagttgtatgctgcacagcttgcctcaatgcaggtgtcccccggtgccaagatgccttcgacacctcaaccacccaatacagccggaactgtttctccaactgggatcaagaacgaaaagagagggacctctccggtgacccaagtgaaagacgaagctgcagctcagccactcaatctttctagcagacccaagactgctgagcctgtgaaatcgcctacaagtcccacccagaatctcttccccgcatctaaaacaagcccggtcaaccttcccaacaagtcctccatccccagccccatcggcggatctctgggtagagggtcaagtttgggcaaatggaagtcacagcatcaggaagagacttatgagctggacatcctcagctccttgaattcccctgctcttttcggcgaccaggataccgtcatgaaggcgatccaggaggccagaaagatgagggagcaaattcagcgtgaacaacagcaacagcaaccccacggggtggacggtaaactgagcagtatcaacaacatggggctaaacagctgtcggaacgagaaggagaggacccggttcgaaaatctcggacctcagctcactggtaagtccaatgaggacggcaagttaggacctggggtcatcgatctcacaaggcctgaggacgcagaaggctcaaaggccatgaacggttctgccgcaaagctgcagcagtactattgctggccaacaggaggtgcgaccgtcgccgaagctcgggtttatcgcgacgccagaggaagggcttcaagtgagccacatatcaaacgtcccatgaacgcgttcatggtttgggccaaagacgaaagaagaaaaatcctgcaggcttttccagacatgcacaactcaaatatttcaaagattttgggctcgagatggaagtccatgtcaaatcaggaaaaacagccttattatgaggagcaggcccgtctgtctaagatccatctggagaagtatccaaactacaagtacaaaccaaggcccaagcgtacctgcattgtggacggaaaaaagctgagaattggcgagtataaacagctcatgcgtagccgccgacaggagatgaggcagttcttcacggtggggcagcagccccagatccctattaccactggcacaggagtcgtgtatcctggcgctataacaatggctactacaacgccaagccctcagatgacctcagactgttcatcaacatccgcgagcccagagccaagcttgcccgtcattcagtcaacatatggtatgaaaaccgacgggggaagcctggcgggtaacgagatgataaatggggaagatgagatggaaatgtatgacgactatgaagatgatcctaaaagtgattattcctctgaaaatgaggcccctgaagccgtcagcgccaactag

SEQ ID NO: 242434 - DNA, 1167 bp, synthetic construct
  misc_feature 1..1167: note = Description of Artificial Sequence: Synthetic coding sequence
  source 1..1167: mol_type = other DNA
atggcttccctgctgggcgcttatccttggcctgaaggcctggaatgtcccgcactcgatgcagaactgagcgacgggcaatcccccccagccgtgcccagacccccaggcgataaaggctctgagagtaggatccggagacctatgaacgctttcatggtgtgggccaaggacgagcgcaaacgtttagctgtgcagaaccccgacctccataacgcagaactcagcaagatgctcggcaagtcttggaaagcactgacgctatctcagaaaagaccttatgtggatgaggcggaaaggctcaggcttcaacatatgcaggactacccaaactataaataccgtcccaggcgtaaaaaacaggcaaagcgcctatgcaaacgggtcgatccaggatttcttctgtcatccctgagtagagaccagaacgctttgcccgaaaagcggtccgggtccaggggcgctctcggagaaaaagaggaccgcggagaatatagtccagggaccgctttaccttctttgcggggatgctatcacgaagggcctgccggagggggtggtggcggaaccccatcttcagtggatacctatccctatggtctccccacaccccctgagatgtcccctttggacgtgctcgagcccgagcagacatttttctcgtctccttgtcaggaggaacatgggcatccccgtaggatcccacatttaccaggacatccttattcccctgagtatgcaccctccccactgcactgttcccacccgcttggttctctcgctctgggtcagtcacctggagtgtctatgatgtcccccgtccccggatgtcccccatctcctgcctactactccccagcaacttaccaccccctacattctaacttgcaagctcatttgggccagttgagcccaccgccagagcacccaggatttgatgcgttggaccagctgagccaagtggagttgctcggagacatggaccgcaacgagttcgaccagtatctgaatacccctgggcatccagacagtgcgacaggtgcgatggcactgtctggacatgtccccgttagtcaggtgactccaactggaccgactgaaacaagtttgatatccgtcttggctgacgcgacggccacatactataattcttatagcgtgagctag

SEQ ID NO: 242435 - DNA, 1323 bp, synthetic construct
  misc_feature 1..1323: note = Description of Artificial Sequence: Synthetic coding sequence
  source 1..1323: mol_type = other DNA
atgagcatgctagcagaacggcgtcgcaagcagaaatgggcggttgaccctcagaacactgcgtggagtaatgatgactctaaatttggacaacggatgctggaaaaaatggggtggtccaagggcaagggactgggcgctcaggagcagggggcaaccgaccatataaaagtacaggtgaagaacaatcacctgggactgggagctacgataaacaatgaggataattggatcgcccaccaggatgattttaatcaattgttagccgagctcaatacatgtcacgggcaagaaaccacggatagtagtgacaagaaagaaaagaagagtttttctctcgaggagaaaagcaagatctctaaaaacagagttcattacatgaaattcacaaagggcaagagctggaaggccttaacattgagtcagaaaagaccatatgttgatgaagcggagcggctccggctgcaacatatgcaggactatccaaattataagtatcgacccagacggaaaaagcaagctaagcgtctgtgcaagcgcgtggatcccggatttctgcttagcagcctttctagggatcagaatgcattgcccgaaaaaaggtcaggctcacgtggggctcttggggagaaggaggatcgcggagaatactccccaggcaccgcattaccctccttgcggggatgttaccatgagggccctgcgggtggtggcggtggaggtaccccatcctccgttgacacatacccctatggactgccaacacccccagagatgtctcccctggacgtgctggagcctgaacagactttttttagcagcccctgccaggaggaacacggacaccccagaagaattcctcacttacccggtcatccatactctcccgagtacgcaccgtcacctttgcattgttcacatccactgggaagcctggctctaggacaaagccctggcgtctccatgatgtctcccgtcccaggatgtccgccaagccccgcttattactcacccgctacgtatcaccctctccacagcaacctgcaggcccacctcggccagctctctccacctcctgagcaccctggctttgacgcccttgatcagctgtctcaagttgagctgctgggcgacatggataggaacgagtttgatcaatacttaaacacaccaggccacccggactccgctactggcgctatggccctctccgggcacgtgcccgtgagccaggtaacacctactggtcctacggaaactagcctaatcagcgtgctagctgatgctaccgcaacgtattataactcctacagcgtgtcatag

SEQ ID NO: 242436 - DNA, 1341 bp, synthetic construct
  misc_feature 1..1341: note = Description of Artificial Sequence: Synthetic coding sequence
  source 1..1341: mol_type = other DNA
atgctcgacatgtcagaggccaggtctcagcccccatgcagcccatcaggcaccgccagcagcatgtcgcatgtggaggattccgacagcgatgcacctccaagtcccgcaggaagtgaggggttgggtcgcgcaggggtggcggtggggggtgctagaggcgaccctgccgaggccgcagatgagcggtttcccgcatgtattcgcgacgctgtgtctcaggtactcaaaggttatgattggtcactagtccctatgccagttcgtggcggaggaggcggtgccctaaaggctaagccacacgttaaacggcctatgaatgccttcatggtgtgggctcaggcagcgcgaaggaagctcgcggaccagtatccacacttgcacaatgccgaactcagcaaaactctgggaaaactttggcggctgttgtccgaaagcgaaaaacgtcccttcgtggaagaagcagaacggctcagggttcagcacaaaaaagatcacccagactacaagtaccaacctcgaaggcgcaagtccgcgaaagctggccatagcgacagcgatagcggtgctgagctgggcccacatccaggaggcggagcagtgtacaaagctgaggccggactgggggacggccatcatcatggggaccacactggccagactcacggacccccaaccccccctaccactcccaaaactgagctgcagcaagcaggagcgaaacccgagctgaagttggaagggagacgccctgtggattccggaagacagaacatagatttcagcaacgttgatatctccgaactaagctctgaggtgatgggaaccatggacgcttttgatgtacacgaattcgaccagtaccttccactcggtggccctgctccaccagagccaggccaggcatatggcggagcatactttcatgctggtgcatccccagtgtgggctcataaatccgcgccttccgcttccgcttctccgaccgagacaggacctcccaggccacatatcaaaacagagcagccctctccgggacactatggagatcagcctagaggcagtcctgactacgggagctgttctggtcagagttcggccactcctgcagcgcctgcaggtcctttcgcagggagccagggggactacggagacctacaggcttcgtcctactacggggcttaccctggttacgcccctgggctgtaccagtacccctgtttccatagtcccaggaggccctatgccagccccctccttaatggacttgctctgccccctgcacatagtcctacctcccactgggaccagcccgtctacactacactgacgaggccctag

SEQ ID NO: 242437 - DNA, 1530 bp, synthetic construct
  misc_feature 1..1530: note = Description of Artificial Sequence: Synthetic coding sequence
  source 1..1530: mol_type = other DNA
atgaatctactcgaccctttcatgaaaatgacagatgagcaggaaaaaggactttccggcgctcctagtcccaccatgagcgaagatagtgccggatcgccatgtccgtccgggtctggaagcgataccgaaaacacccgccctcaggagaacacgttcccgaagggggagccggatctcaagaaggaaagcgaggaagacaaatttccagtatgtattagggaggccgtgtcgcaggttctgaaaggttacgattggaccctcgtaccaatgccggttagggtgaatggatcgtctaaaaataaaccccacgtcaaaaggcctatgaatgcgtttatggtgtgggcacaagctgctcggcgtaaactggcagatcagtatccgcacttgcataacgccgaactgagcaagaccctcgggaagctgtggagactgctgaacgaatccgaaaagaggccatttgtggaggaggctgagcgtctgagagtacaacacaagaaagatcaccccgattacaagtatcagccaaggcgtcgcaaaagtgtcaagaacggacaggctgaagctgaggaagccacagagcaaacccacatttcacccaatgccatctttaaagctcttcaggccgattctcctcatagtagttccggcatgtccgaggttcattctccgggtgagcacagcggccaatcccaaggtccgcctaccccaccaactacaccaaagaccgatgtccagcccggaaaggctgacctgaagcgggagggcagaccattgcctgaaggcggtcgccagcccccaattgattttcgtgacgttgatatcggcgagctctctagtgatgtaatcagcaatatcgaaacctttgatgtgaacgaattcgatcaatacctgccacccaatggtcaccctggcgttccagctacccacggacaggttacctacacagggtcttacggcatcagctctaccgctgcaacaccagcaagtgcaggacatgtctggatgtccaaacaacaagcccctccccctcccccacagcagcccccacaagcaccgcctgcccctcaagcgcctccacagccacaggccgcaccaccacagcagcccgcagcaccacctcagcagccgcaggcgcacacgctgactacgctgtcttccgagccaggccagagccagcgtacacatatcaagaccgaacagctaagcccttcacactatagtgagcagcagcagcattcccctcagcagatcgcgtattcaccattcaatttacctcattatagccccagctaccccccaatcacacgctctcagtacgactatactgaccaccagaatagctcctcctactattctcatgccgctggccagggcacagggctctactccacattcacctacatgaacccagcacagagacctatgtacaccccaattgctgacacgtcaggcgtgcctagcatccctcagacccattctccccagcattgggagcagcccgtatatacacagttaacccggccttag

SEQ ID NO: 242438 - DNA, 1338 bp, synthetic construct
  misc_feature 1..1338: note = Description of Artificial Sequence: Synthetic coding sequence
  source 1..1338: mol_type = other DNA
atgaatctgcttgacccatttatgaagatgactgatgagcaggaaaaggggctgagtggggcaccctctcccaccatgtccgaggactccgctggctccccttgtccttcaggatccggctcggataccgaaaacacccggccacaagagaataccttcccgaagggagaacctgatctgaagaaggagagtgaggaggacaagtttcccgtgtgtatccgagaagccgtttctcaggtcttaaagggctacgattggactctcgtgcccatgcctgtgcgcgttaatggatccagcaagaacaagcctcatgttaagcgtccaatgaacgctttcatggtgtgggcacaggcagcacggaggaagctggccgaccagtatcctcatttacacaacgccgaactgtctaaaactctgggcaagctatggcgtctgctgaatgagtccgaaaagcggccttttgtggaggaagctgagagactgagggtgcagcacaagaaggaccacccagattacaaatatcaacccagacgtagaaagtcggtcaaaaacggccaagccgaggctgaggaagcaacagaacagacccacattagccctaacgccatctttaaggccctgcaggcagattccccccacagtagttcggggatgtccgaggtgcacagtcccggagagcacagtgggcagagtcaaggtccacccactcctcccaccactcctaagaccgatgtccaacccggtaaggccgatcttaaacgggaagggaggcctctgccagaaggaggtcggcaacctcccatagactttcgtgacgttgacattggagagttgtcaagtgacgtaattagcaatatcgaaacatttgacgtgaacgagtttgatcagtacttgccacccaacggccacccaggagtgccagctacccacggtcaagtgacctatacaggctcatacgggatcagctcaacagccgctacccccgcatcagcagggcatgtgtggatgagcaaacagcaggcccctccacctccaccccagcagcattctccacagcagattgcatactctccattcaacctcccccattactccccctcctaccctcctataactcgttctcagtatgattataccgaccatcagaactctagttcttattactcccatgcggctggtcagggcacaggcctctattctactttcacctacatgaaccccgcacagcgcccaatgtatacccctatcgcagacaccagcggcgtgcccagtatccctcaaacccacagcccgcagcactgggagcagcctgtgtacacccagttgaccaggccatag

SEQ ID NO: 242439 - DNA, 273 bp, synthetic construct
  misc_feature 1..273: note = Description of Artificial Sequence: Synthetic coding sequence
  source 1..273: mol_type = other DNA
atgcgcggatatctcgtcgctatttttctttcagcagtatttctgtactacgtgctgcattgcatcctgtgggggactaacgtctattgggtggcacctgttgaaatgaaaagacgcaacaagatccaaccatgtctctctaaacccgcatttgctagccttctctcccagtcatcggcttacatcttgagaaaaggtatagaggagctgaatcaaacgtctatccttttcactcaggtgtcttcagtcagcccgttcagcgtctgcgggtag

SEQ ID NO: 242440 - DNA, 273 bp, synthetic construct
  misc_feature 1..273: note = Description of Artificial Sequence: Synthetic coding sequence
  source 1..273: mol_type = other DNA
atgcggggttatctcgtcgcaatcttcctctccgcagtcttcttatattatgttctgcattgcattctgtggggaacaaatgtttattgggtagcccctgtcgagatgaagagaagaaacaaaatccagccatgcttaagtaagccagccttcgctagcctgctcagtcaatctagcgcttatatccttcggaagggaatagaggaattaaatcaaacatctatcctgttcacccaagtctcctcggtgtctcccttttcagtctgtggctag

SEQ ID NO: 242441 - DNA, 1335 bp, synthetic construct
  misc_feature 1..1335: note = Description of Artificial Sequence: Synthetic coding sequence
  source 1..1335: mol_type = other DNA
atgggattgctggtgtttgtgagaaacttactcttggcgctctgtttgtttcttgtgctgggctttctttactacagtgcctggaaactacatctgctccagtgggaggaagatagtagcaagtactcccattccagtagtccccaagagaaacccgtggctgattcagtggtattgtctttcgactcagcgggacagaccttaggcagtgagtatgataggctcgggtttctgctgaatctggatagcaagttgagtcctcggaccctgtgtactgtcgtgtttggattagattgtatcctggagagcccgggtgagccgaaaaagttactcatgcctgccagccacccgctggagatattgaaatcactttcagaggacactgctttcgctttgggctttctgaaactgccaaggccagcagaactggctaccaagtacgccaacttctcagagggagcatgtaagcccggttacgcatcggccctgatgaccgctatatttccaagattttctaagcctgccccaatgtttctggatgatagcttcagaaagtgggctagaatcagggaattcgtccccccattcggcattaagggccaagacaatctaattaaagctatcctctcagtgacgaaggagtacagactgactcccgcactcgattctctgcgatgcaggcgctgcataatagtggggaatggtggagtcctcgccaacaagtctctgggcagccggattgacgattatgatattgtagtgaggctgaacagtgctccggtgaaaggattcgagaaagatgtgggatcaaagactactcttaggattacctaccccgaaggcgctatgcagcgcccagagcagtatgagcgggattctctgtttgtgctagctggctttaaatggcaggacttcaagtggctgaagtatatagtatataaagagagagtgagtgcgtctgacggtttttggaagtccgtagcaacacgtgtgcccaaggaaccaccagagatcagaatcctgaacccttatttcatacaagaggctgcctttactcttattggcctgccctttaataacggcctaatgggacgtggcaacattcctacactcggttccgttgccgtcaccatggcactgcatggatgcgacgaggtcgcagtggctggttttggttatgatatgagcactcccaacgccccactgcattactatgagacggtgcgcatggcagcaattaaagagtcatggacgcacaacatacagcgtgaaaaagagttccttcgcaaattggttaaagctagggtgatcactgatctctcatccggcatttag

SEQ ID NO: 242442 - DNA, 468 bp, synthetic construct
  misc_feature 1..468: note = Description of Artificial Sequence: Synthetic coding sequence
  source 1..468: mol_type = other DNA
atgggactcctggtcttcgttagaaatctgttgttggccctgtgcctgtttctggtgcttggctttctgtactatagtgcatggaagctgcaccttctgcagtgggaggaagactcaaactcggtggttctaagtttcgactccgcaggtcagacactgggctctgagtacgataggctgggatttcttctaaatctggactctaagctcccagctgaattagctaccaagtacgctaacttctcagaaggggcttgcaaaccaggatatgcttccgccctgatgacagccatttttccgaggttcagcaagccagccccaatgttcctcgatgatagcttcagaaaatgggcccgaatccgggaattcgtgccgccatttggtatcaaaggccaggtattagatgcccagtatccagctcgagaaagagtgtccgccgaagccggagagtcaagccgtcatcattag

SEQ ID NO: 242443 - DNA, 1035 bp, synthetic construct
  misc_feature 1..1035: note = Description of Artificial Sequence: Synthetic coding sequence
  source 1..1035: mol_type = other DNA
atgggcctgttggttttcgttcgaaatcttctcctcgcactttgcctctttctggttctgggatttctctactattccgcttggaaactgcacctgctgcagtgggaggaggatagtaactccgtcgttctgtcatttgattccgccggtcagaccctcggatccgagtatgacaggcttggcttcttgctaaacctggacagtaaactgttctcgaagcccgctcccatgttcctcgatgatagttttcgtaaatgggcccgaatacgcgagtttgtacctccgtttgggataaaaggtcaggacaatttgattaaggccattctgagtgtcacaaaggagtacaggctgaccccagccttggactccctcaggtgccggagatgtatcattgtgggaaacggcggtgtgctggcaaacaaatctctagggtccagaatagacgactacgacatcgtcgttcgcctgaatagcgcacctgtaaaaggtttcgaaaaagacgtagggagcaaaaccacattaagaatcacatatcctgagggggctatgcagagaccagagcagtacgagagagacagtctgttcgttctggcagggttcaagtggcaggattttaagtggctgaaatacattgtgtataaggaacgggtgagcgcctcagacggattttggaaatcagttgccactagagtgccaaaggaaccgccagaaattagaattctcaacccgtatttcatacaagaagctgcctttactcttatcggcctccccttcaacaacgggctgatgggacgcggtaacattcctaccctcggctccgttgccgttaccatggccctgcatggctgcgacgaggtggctgtggctgggtttggctacgacatgagcaccccaaacgctcccctacattattacgaaaccgtccgcatggctgccatcaaagagtcatggacacataatattcagcgggagaaggagtttctgaggaagctggtgaaggccagggttataactgatctgagttctggcatttag

SEQ ID NO: 242444 - DNA, 687 bp, synthetic construct
  misc_feature 1..687: note = Description of Artificial Sequence: Synthetic coding sequence
  source 1..687: mol_type = other DNA
atgggacttctcgtcttcgtgcgcaacctcctgttggccctatgtcttttcctggtgctgggcttcctatactacagtgcttggaagcttcacctactccagtgggaagaggactccaagtacgatcgcctcggcttcctgctcaatttggactccaagttgcccgcagaacttgcaacaaaatacgcaaactttagcgagggagcctgcaagccaggctacgcatccgcgctgatgactgccattttccctcggttctcgaagcctgccccaatgttcctcgacgacagcttccggaaatgggcacggatccgggaatttgttcccccttttggcatcaaagggcaggacaatttgattaaggccatcctcagtgtcaccaaagaatacagattaacgcctgctctggatagtttacgctgccggcgatgcatcattgtcggcaatggcggagtattagctaataaatcactgggctctaggatagacgattacgacatcgtggtgagggttcatagaatggcaagcgggaacctttggcctctcgagtgtccccgttctcccctgaggtttgagtcttctacccacatctcttccagaaggccgcctagcccatctcttgcatgtccctccaccatggcctcatgggctggtggtacttcgttgcccctggccgtttggcaatag

SEQ ID NO: 242445 - DNA, 1173 bp, synthetic construct
  misc_feature 1..1173: note = Description of Artificial Sequence: Synthetic coding sequence
  source 1..1173: mol_type = other DNA
atgggcctcctggtgtttgtgcggaacttgctccttgctctctgtctattcttagtgctgggattcttatattattcagcgtggaagttacatctcttgcaatgggaagaagattcatcaaaatacagtcacagtagttcaccacaggaaaaacctgtagccgactctgtcgtgcttagttttgactccgcaggtcagacccttggcagtgaatatgaccgcctgggctttttactgaacttggattccaaactccctgctgagctggccaccaagtacgctaacttcagcgagggtgcctgcaagcctggttacgctagtgctctgatgacagctatctttcccagattttccaagccagcaccgatgttcttggacgactcattccggaagtgggcgcgtattcgggaattcgttccaccgttcggcattaaaggccaggacaacttaatcaaagccatcttatctgtgaccaaggaatatcgcctgacccctgccctggatagtctcaggtgcaggcgctgtattatagtggggaacggcggtgtgttagctaacaaatccctcggctccagaattgatgactatgatatcgtcgtgcgactaaatagtgctccagttaagggatttgaaaaggacgtggggtcaaagacaacactccgcataacctatcctgaaggcgctatgcagagaccggagcagtacgagcgggactccctttttgtgctggctgggttcaaatggcaggacttcaagtggctcaagtacatcgtttacaaggagagagtttcagcttcagatggcttttggaaaagcgtagcaaccagagtgccaaaggaaccgccagagatccgcatactgaatccgtactttattcaggaagcagcgtttacactgattgggctaccattcaacaacggtcttatgggtagggggaatatcccgactctcggctccgtggccgtgacgatggcattgcatggctgtgatgaggtggctgtagcaggattcgggtatgatatgtccacccccaacgctcccttgcactattatgaaactgttcggatggcagcaataaaggagtcctggactcataatattcaacgcgaaaaagagtttttgcgaaaactcgttaaagcccgagtgattacagatttgtctagcgggatatag

SEQ ID NO: 242446 - DNA, 1242 bp, synthetic construct
  misc_feature 1..1242: note = Description of Artificial Sequence: Synthetic coding sequence
  source 1..1242: mol_type = other DNA
atgggattgctggtgttcgtcagaaatcttctcctggccttatgtctgttcttagtcctggggttcctctactactctgcttggaagctccatctgctgcagtgggaagaagactctaaatatgaccgtctggggtttcttctcaacctcgatagcaagctgtccccacgtactctgtgtaccgtggtgtttggcctggattgcattctggaatctcccggtgaacccaagaaactgctgatgcctgcatcccacccactcgagatcctaaaaagtctcagcgaagataccgctttcgccctgggcttcctcaagctacctcgcccagccgaattggctacaaaatacgctaactttagcgagggtgcctgcaagcccggatacgcaagcgccctgatgactgcgatctttccgcgtttttctaagcccgcaccaatgtttctggacgacagcttccgcaaatgggctcggatccgtgagttcgtgcccccttttggaataaaaggccaggacaacctgatcaaagcgattcttagtgttaccaaagagtaccggttgaccccggctctggactctcttcggtgccggagatgcataatcgtggggaacggcggagttttagccaataaaagtctcggctctaggatagatgactacgacatcgttgttagactgaatagcgcaccagtcaaaggcttcgagaaggacgtgggcagtaaaactacactacggattacctacccggaaggcgcaatgcagcgccctgagcagtacgagcgtgactcactttttgtgttagccggatttaaatggcaggacttcaagtggctcaagtatatcgtctacaaagaaagggtctctgctagtgatggattctggaaatccgtggccaccagagtaccaaaggagcccccagaaatccgaattctgaacccctatttcatacaggaggcagcctttacccttattgggctgcccttcaataacgggctgatgggcagaggaaacatccccaccctgggctcagtggccgttaccatggcactgcacggatgcgacgaagttgccgttgcgggattcggctacgacatgagcacacctaatgcccctcttcactactatgagaccgttagaatggcagctataaaagaatcatggacacataatattcagcgcgagaaggaattcctgaggaaactggtaaaggccagggttatcaccgacctcagcagtggaatctag

SEQ ID NO: 242447 - DNA, 834 bp, synthetic construct
  misc_feature 1..834: note = Description of Artificial Sequence: Synthetic coding sequence
  source 1..834: mol_type = other DNA
atgggccttcttgtgtttgtgcgcaaccttttgctggctctttgtttgtttcttgtgctcggatttctgtactactccgcttggaaactgcatcttctgcagtgggaggaagatagcaacagtgtcgtgttatccttcgactcagctgggcagactctgggctcagaatacgatcgccttggctttctcctgaacttggatagtaaattacctgcagagctggctacgaagtatgccaacttcagcgagggggcatgtaagccgggttacgccagcgccctgatgacggcaatctttccacgattctctaagcctgcacccatgttcttagacgactccttccgcaaatgggcacggattagggagtttgtgccaccctttggtatcaagggccaagacaacctcattaaggctattctgtcagtgactaaggagtacagattaactccagcgctcgatagtctccgttgccggaggtgcatcatcgtgggcaacggcggagtcctggcaaataagagccttggcagcaggattgatgactacgatatcgtggtgagattaaactctgcgcctgtcaagggcttcgaaaaagatgttggcagcaagactacactgcgcattacttatcctgagggggctatgcagaggcctgagcagtatgagagagatagtctgttcgtcttggccggatttaagtggcaagattttaaatggctaaaatatattgtctacaaggagcgcgtgtcgtggactcacaacattcaaagagagaaggagttcctgaggaagctggttaaagcacgggtgattactgacctctcatctggaatctag

SEQ ID NO: 242448 - DNA, 1128 bp, synthetic construct
  misc_feature 1..1128: note = Description of Artificial Sequence: Synthetic coding sequence
  source 1..1128: mol_type = other DNA
atgggcttgctggtgtttgtaaggaacctattactggccctgtgcctttttctggtcctgggctttctctactactctgcctggaagctgcaccttctgcagtgggaggaggattctaatagtgttgtgttgtcctttgattccgccggacagacgctgggctccgagtatgaccggctcggcttcctgctgaatctggacagtaagttgcccgcagagctggccacaaaatatgctaactttagcgagggcgcatgcaagcccggttacgcttctgccctaatgaccgcaatcttcccgcgttttagcaagcctgcgcctatgtttctcgacgactcgttccgcaagtgggctcggattcgcgaattcgttcctccctttggaatcaaggggcaggataacctgattaaggcaattctgtccgttactaaggagtatagactcacccctgcactcgacagccttagatgccggcgatgcattatcgtgggcaacggaggagtcctggcgaataaaagtctggggagccggatagatgactacgacattgtggtgcgtctgaattcagcccctgttaagggtttcgagaaagacgtgggctccaaaaccacactgaggattacataccccgagggagccatgcagcgcccagaacagtacgaacgcgatagcttattcgtgctagctgggttcaaatggcaggatttcaaatggttaaagtacatcgtgtacaaagaacgcgtgagcgccagcgatggattttggaaatctgtggccacccgggtgccaaaggagccaccagagattcgcatcctgaacccctactttattcaagaggctgccttcaccctgattgggctgccatttaataacggcttgatggggagaggaaatattcctacactgggctcagtggcagtaacaatggctctgcacggatgcgatgaagttgccgttgccggattcgggtacgacatgtcaacacccaatgccccacttcactactatgagactgtccggatggctgctatcaaagagagctggacacataatattcagagggagaaagaattcctgcgtaagttggttaaggccagagtcataactgatttgtcatctggaatctag

SEQ ID NO: 242449 - DNA, 1080 bp, synthetic construct
  misc_feature 1..1080: note = Description of Artificial Sequence: Synthetic coding sequence
  source 1..1080: mol_type = other DNA
atgggcttgctcgtgtttgtgcgaaacttactgcttgccctttgtctttttctggtgttggggttcctgtattacagtgcctggaagctacacctgctgcagtgggaagaggactctaagtacgatcggttgggctttctgctgaatctcgacagtaaactgccagccgagctggcaacgaagtacgccaattttagcgagggggcttgtaaaccagggtatgccagcgcgctgatgaccgctatatttcctaggttttccaagcctgcgccaatgttcctggacgacagcttccgtaaatgggccaggatacgtgagtttgtgcctccattcgggatcaagggtcaagataacctgatcaaggctattctctctgttacaaaagagtacagactcacccctgccctcgattcactgcgatgccgccgatgcattatcgtgggtaacggaggggtgctggccaataaatcccttggctcgcgtatagatgactacgacatcgtcgtgaggcttaactctgccccagtcaaggggtttgaaaaggacgtcggcagcaaaactaccctgagaattacatatccagagggtgcgatgcagcgaccagaacaatacgagcgtgacagcctctttgtcctggcaggcttcaagtggcaggatttcaagtggctcaagtacatcgtttacaaagaacgagtgtccgcctccgacggcttctggaaatcagttgctacccgggtgcctaaagagcccccagaaataaggattctaaacccatactttatccaggaagctgccttcactctcattggcctgcctttcaacaatggacttatgggccgaggcaacattccaacgctggggagcgtggcagttactatggccctccatgggtgcgatgaggtcgccgtcgcaggcttcggctatgatatgagcactccgaacgctccactgcactattatgagacagtccgtatggccgctattaaggaaagctggacacacaatattcagcgggagaaggaattcctgcgtaagctggttaaggcaagggtgataaccgatctcagttccggcatctag

SEQ ID NO: 242450 - DNA, 1335 bp, synthetic construct
  misc_feature 1..1335: note = Description of Artificial Sequence: Synthetic coding sequence
  source 1..1335: mol_type = other DNA
atggggctgctggtgttcgtgagaaaccttttactggcactgtgcttatttctggtgctgggtttcttatattactcagcttggaagctgcatcttttgcagtgggaggaggactcctcaaaatatagtcacagctcaagtcctcaagagaagcctgttgccgatagcgttgttcttagctttgattctgccggacagaccctcgggtcagaatacgataggctgggttttcttctgaatctggatagtaaactttcccctcgcacactgtgtaccgttgtcttcggcctggactgtatcctggagagtccaggcgaaccgaaaaaactgctaatgcctgcttcccaccctctggaaatcctcaaaagtttaagtgaagacacagcctttgccctggggtttcttaagttaccacgccctgccgagttggctactaagtatgcaaatttttcggagggcgcatgtaagcccggttacgcctccgcactgatgaccgccatcttcccccgattcagtaagcccgctcctatgttcctcgatgactccttcagaaaatgggcaagaataagagagtttgtgcctcccttcggcattaagggacaagacaatttgatcaaagccattctttctgtgactaaggagtacagactcacgcccgctctcgactcgctgcggtgccgccgatgcatcatcgtgggaaatggtggagttctagccaacaaaagcctgggatcccgcatcgatgactacgatattgtggtaagactcaactctgcccctgttaagggatttgagaaagacgtggggtcaaagacgactcttcggataacgtaccccgaaggggcaatgcagagacctgaacagtatgagcgcgatagcctctttgtgctggccggttttaagtggcaggacttcaagtggttaaaatacatagtttataaggagagagtttcagcgagcgatggcttctggaagtctgtggctacaagagtcccgaaagagcctccggaaatcagaattctaaacccctatttcattcaagaggccgcatttacccttataggcctgcctttcaacaacggcctgatgggtagaggaaacatccctacccttggatccgtggcagttactatggctctgcatggatgtgatgaggtggcagtcgcgggttttggctacgatatgtcaacaccaaatgctcctttgcattactacgagactgttagaatggcggctattaaggaatcatggacccacaacatacagagggaaaaggagttcctacgcaaattagtgaaggcgcgagttattacagatctctcatctgggatttag

SEQ ID NO: 242451 - DNA, 513 bp, synthetic construct
  misc_feature 1..513: note = Description of Artificial Sequence: Synthetic coding sequence
  source 1..513: mol_type = other DNA
atgggcctcctggtgttcgtacggaacctcttgttagcgctatgtttatttctggttctcgggtttctgtattactccgcttggaagttacatctgttgcagtgggaagaggattcctccaaatacagtcattcttcgtccccccaggagaagccggtcgccgatagtgtcgtgctgagctttgattcagcagggcagacactgggctctgaatatgatcggctgggattcctcttgaacctggactccaagctgccagccgaattggcaactaaatatgccaacttctctgagggtgcctgcaagcctggatatgcatccgccctcatgacagcaatatttcctcggttctctaagcccgctcccatgttcctggacgatagcttccggaaatgggcaaggatccgtgaatttgtaccaccattcggcattaaaggacaggtgctggacgctcagtacccggcaagggagcgtgtgtccgctgaagctggagaaagttcaagacaccactag

SEQ ID NO: 242452 - DNA, 468 bp, synthetic construct
  misc_feature 1..468: note = Description of Artificial Sequence: Synthetic coding sequence
  source 1..468: mol_type = other DNA
atgggtctgctcgtgttcgtccgtaatctcctcctggcattgtgtctgtttcttgttctaggttttctctactactcggcttggaaattacatctgctgcaatgggaagaggactccaatagcgtggtgttgagttttgatagcgccggacagaccctcggcagcgagtacgacagattgggcttcctgttgaacctggactctaagcttcccgcagaactcgccaccaaatacgccaacttttcggagggggcatgcaagccgggttatgcttctgcccttatgacagccatattcccaagattttccaaaccggctccaatgtttctagatgactcttttagaaaatgggccaggatcagggagttcgtgcctcccttcgggattaaaggacaggtgctggatgcgcagtatccggctagggagagagttagtgccgaagcaggtgagagcagccgccatcactag

SEQ ID NO: 242453 - DNA, 561 bp, synthetic construct
  misc_feature 1..561: note = Description of Artificial Sequence: Synthetic coding sequence
  source 1..561: mol_type = other DNA
atgggacttctggtgtttgtgcgcaacctcttgctggctctgtgtctttttctggtgctgggatttttgtattactccgcatggaagcttcatcttctccagtgggaggaagacagcaactctgtagtcctgtcattcgatagtgccggacagaccctcgggagtgagtatgaccgattagggtttttgctgaatctggatagcaagctgcctgcagaactcgcgacgaaatacgctaatttctcagagggtgcttgtaaaccagggtacgctagcgctctgatgaccgctattttcccaagatttagtaagcctgctccaatgttcctggatgatagctttcggaaatgggccagaataagagaattcgtgcccccatttggtattaaaggccaggacaacctaataaaggcaattctttcggttaccaaagagtatcggctaactcctgctctggattccctcaggtgcaggcgttgtatcattgttggtaacggaggggtgctagccaataagtctctcgggagccgtatcgacgattacgacatagtggtgcggtag

SEQ ID NO: 242454 - DNA, 558 bp, synthetic construct
  misc_feature 1..558: note = Description of Artificial Sequence: Synthetic coding sequence
  source 1..558: mol_type = other DNA
atgggtcttctcgtgtttgtgcggaacctgctgcttgcgctttgtttgtttcttgtcctggggttcctgtattacagcgcttggaaattacacctgcttcagtgggaggaagatagctctaagtacagtcactcctcatctccacaggaaaaacctgtggcagaatacgatcgcctggggttcctgctgaatctagattctaaattgccagctgagctcgccaccaagtatgcaaacttcagtgagggagcttgtaaacctgggtacgcctccgctttgatgactgctattttccccagattttcaaaacccgctccgatgtttctggacgactcttttcgtaaatgggctcggattagggaatttgtgccgccttttggaatcaagggacaggataacttaatcaaggccattctgagtgtgactaaagaatatcgactcacgccagccctggattcacttcgctgtaggcggtgtatcattgtcggaaatggtggcgtgctcgcaaataagtcactcggctcccgcatcgatgactacgatattgttgtgcgttag

SEQ ID NO: 242455 - DNA, 606 bp, synthetic construct
  misc_feature 1..606: note = Description of Artificial Sequence: Synthetic coding sequence
  source 1..606: mol_type = other DNA
atgggactcctcgtgtttgtcagaaacctgctgttggcactgtgcctctttttggtgttagggtttttatactacagcgcttggaagcttcatctgttgcaatgggaagaggacagcagcaagtattctcattccagttcgcctcaagaaaaaccagttgctgagtatgataggctggggtttctgctgaacctggattcaaagctccctgctgagctggccacgaaatacgctaatttctccgagggcgcttgcaagcctggttacgccagcgctctcatgaccgcaatcttcccccgtttttctaagccggctccaatgttcctcgacgattcttttagaaaatgggccaggatcagagaattcgtccccccttttggtatcaaagggcaagacaatctaatcaaggctatccttagcgtcactaaagaatacagactcacccctgcgctggattctctgaggtgccgccgatgtatcatagtggggaacgggggagtgctggccaataaatctctgggatctcgcatcgacgactatgatattgtggtgagccctggccgaacaatatcaagcgagcgcaaatcgttttgtggaagctggtag

SEQ ID NO: 242456 - DNA, 1290 bp, synthetic construct
  misc_feature 1..1290: note = Description of Artificial Sequence: Synthetic coding sequence
  source 1..1290: mol_type = other DNA
atgggactccttgtcttcgtgcggaacctgctgctcgccctatgtctgtttttggtgctaggcttcctgtactatagtgcttggaaacttcacctccttcagtgggaagaagattctaacagtgtggtgctcagctttgattctgccggtcagaccctcggaagcgaatatgaccgcttgggcttcctgttaaatctggactccaaactcagcccaagaaccctgtgcaccgtggtctttggcctcgactgtattttggaaagtccaggagagcctaagaaactccttatgcccgcttctcatccactagagatcctcaaaagtctttccgaagacacggcattcgcgctgggctttcttaagctccccagacccgctgagctggccacaaaatatgccaactttagcgaaggtgcttgcaagcccggttatgcctctgcactgatgacagctatatttcccagattttcaaagccagctcctatgtttttggatgattccttcaggaaatgggcaagaataagagaattcgtgccacctttcgggatcaagggacaagacaatcttattaaagcaatcctatctgtcactaaggagtatcgattgaccccagctctggactcacttcggtgtaggcgttgtatcatcgtcggcaacggcggagtgctggccaacaaaagtcttggtagcaggatcgatgattacgacatcgtcgtgaggctaaactccgcccctgtgaaagggttcgagaaggacgtcggcagcaaaacgacgctgcgcatcacatacccggagggggctatgcagcggcctgaacagtacgaaagagactctctgtttgtgctggcaggcttcaagtggcaggacttcaagtggcttaaatatattgtgtacaaggaaagggtgtcggcaagcgatggcttttggaaaagtgtggccactagggtcccaaaagagccacccgagattagaattctgaacccgtacttcattcaggaagcagctttcacactgatcggtttgccctttaataacggcttgatgggacggggaaatatccccacactgggcagcgtggccgttacgatggccctgcacggttgtgacgaggtcgccgttgccggattcggttatgatatgtccacccctaacgctcccctgcattattatgaaaccgttaggatggctgctatcaaggagtcttggactcacaatattcagcgcgagaaagagtttcttagaaaactggttaaagccagagttatcacagacctctcatccgggatctag

SEQ ID NO: 242457 - DNA, 1038 bp, synthetic construct
  misc_feature 1..1038: note = Description of Artificial Sequence: Synthetic coding sequence
  source 1..1038: mol_type = other DNA
atgggcctgctggttttcgtgaggaatctgctcctcgcactctgcctctttttggtgttaggcttcctgtattattcagcctggaaactgcatctcttacagtgggaagaggacagcaatagcgtcgtcctatcatttgactctgctgggcagactctgggcagtgagtatgaccgtctaggttttctgcttaatctggacagcaaacttccagcagagcttgcaacgaaatacgccaatttctctgagggcgcatgtaaacccggttatgcttccgccctgatgacagcaattttcccacgattctcaaagccagccccaatgttcctcgatgatagcttccgtaaatgggcgcgaatacgggagtttgtgcctccatttggaatcaaggggcaggataacctgatcaaggctattctcagcgtgacgaaagaataccggttgacacctgccctggactcattgagatgtcgtcggtgcattatagtgggtaatggaggcgtcttagcaaataagtcgctgggcagccggatcgatgactatgatatagttgtgcggctcaattccgcacctgtcaagggattcgagaaggacgtcggctctaagaccacactgcgaattacctaccctgagggtgccatgcaaagaccagaacagtatgagagggattcacttttcgtgttggcaggttttaagtggcaggactttaaatggttgaagtatattgtctacaaggaaagagtcgaagcggcattcacactgatcggcttaccattcaacaatgggctcatgggtcgcggaaacatacctaccttaggctctgtggcagttacaatggcgctacatggctgcgacgaggtggcagtagccggattcgggtatgacatgagcaccccaaatgcaccgctgcattactacgagaccgtgaggatggccgcaataaaagagagttggacacacaacatccagagggaaaaggaatttctacggaaactggtgaaggcacgcgtgatcacagacctcagcagcggaatttag

SEQ ID NO: 242458 - DNA, 1242 bp, synthetic construct
  misc_feature 1..1242: note = Description of Artificial Sequence: Synthetic coding sequence
  source 1..1242: mol_type = other DNA
atgggactgctggtcttcgtaaggaatctcttgctggcgctgtgcctcttcctggtgcttggtttcttgtattacagtgcatggaaattgcatttactgcagtgggaagaagactctaaatacgaccggctaggctttctgctgaacctggactccaagctctcccctaggacattgtgcacagtcgtgttcggcttagactgtatcctggagtctcccggagaaccaaaaaagcttcttatgcccgcatcacatcctctggagatactgaagtctctgtccgaggataccgcttttgccctggggtttctgaagctgccccgaccagccgaactcgccacaaagtatgccaacttcagcgagggggcttgcaagccgggttatgctagtgccttgatgacggccattttccccagattttctaagcctgccccaatgtttctagacgatagtttccggaaatgggcacgcatcagagaatttgtcccaccattcggaataaaagggcaggacaacctgatcaaggccatactcagcgtcaccaaagagtaccggttgacccctgccctcgattcattacggtgccgaaggtgtattattgtggggaacggtggcgtattagccaataagagtttgggctctaggatagatgactacgacatcgtggttcgcctaaactccgcccctgtgaagggtttcgagaaggacgtgggttccaagacgaccctgagaattacttatcctgagggggcaatgcaacgtccagagcagtatgaacgtgactctctgttcgtgctcgccggttttaagtggcaggattttaagtggctgaaatacatcgtttacaaggaacgcgttagcgccagcgatggattttggaagtctgtagccacccgagtgcctaaggaaccaccagagatccgtatactgaacccttatttcattcaggaagccgctttcaccctgattggtctgcctttcaataatgggctaatgggcaggggtaatattcccacgctcggttcagtggcggtcaccatggctttgcatggttgcgacgaagtggctgtcgccggttttggctacgatatgtcgacgcccaacgctccactccactattatgagacggtcaggatggctgccattaaggaaagttggacgcacaatatccagagagaaaaagagtttctcaggaagttggtgaaggccagagttatcacggacttgtcttccggaatttag

SEQ ID NO: 242459 - DNA, 1035 bp, synthetic construct
  misc_feature 1..1035: note = Description of Artificial Sequence: Synthetic coding sequence
  source 1..1035: mol_type = other DNA
atgggcctgctagttttcgttagaaaccttctgctagctctgtgccttttcctcgttttgggtttcctctactacagcgcttggaaattacatttactgcagtgggaggaggatagcaacagcgtggtccttagttttgacagtgcagggcagacactcgggtccgaatatgatcggttgggttttttgctaaaccttgactccaagctctttagtaaacctgctccaatgtttctcgacgatagtttcaggaaatgggccagaatccgggagttcgtacctccattcgggattaaaggccaggataacctgatcaaagccatccttagcgtcacgaaagagtatcggctgacgcccgcattagactccctaaggtgccgccgatgcattatcgtgggtaacggcggagtactggccaataaaagtctggggtcaaggattgatgattacgacatcgtcgtccgacttaattcagccccagttaaggggttcgagaaggatgtagggagcaagaccactctcagaataacctacccggaaggggcaatgcagcgtccagaacaatacgaaagggattcactattcgtcctagctgggtttaagtggcaagattttaaatggctcaagtatatagtgtataaggagcgcgtcagcgcctccgatggattctggaagtctgtggcaacacgagtccctaaggagccacccgaaatcagaatattaaacccatatttcatacaggaagctgctttcaccctgattggcttgcccttcaacaacggactgatgggcaggggaaatatccccactctgggcagcgtggctgttaccatggcccttcatggatgcgacgaggtagccgtcgctggtttcggatatgacatgagcacccccaacgcccctctgcattattatgaaactgttcgtatggccgctataaaggaatcctggacacataatatccagcgtgagaaagagttcctgaggaagctggtgaaggccagagtcatcacggatctctccagtggcatttag

SEQ ID NO: 242460 - DNA, 1290 bp, synthetic construct
  misc_feature 1..1290: note = Description of Artificial Sequence: Synthetic coding sequence
  source 1..1290: mol_type = other DNA
atgggtctcctggtcttcgtacggaacctactgcttgccctgtgtctcttcctggttttgggattcctgtattattccgcctggaagctacaccttctgcagtgggaagaggattccaactcagttgtgctgtcctttgactctgctggacagacacttggctccgaatatgataggctgggcttcttactcaacctggactctaagctgtcgcctcggacactgtgcacggttgttttcgggctggactgtatattggagagtcccggtgaaccaaaaaaactgttgatgccagcttcccatcccttggagatccttaaaagtctgagcgaggacactgcttttgctcttggattcctgaaattgccacgtcctgccgagctcgcgaccaaatacgccaattttagcgagggtgcctgtaaacccggatatgcctccgcgctcatgacagcaattttccccaggttctcgaagcccgcacccatgttcctggatgatagcttccgcaagtgggcacggattcgggagtttgtgccccctttcgggatcaaagggcaagataacttgattaaggccatattatctgtgacaaaagaatacaggctgactccggcactggatagtttgcgatgccggagatgtattattgtcggaaatgggggtgtactagccaacaaatccttgggctcccgcatagacgactatgacattgtggtcaggttgaactccgcccctgtgaaaggtttcgaaaaagacgtgggatctaagacgacgttgcgcatcacctatccagagggggctatgcaacgcccagaacagtacgaacgcgactctctgtttgtgctggcagggttcaagtggcaggacttcaaatggctgaagtacatcgtgtataaggagagagtcagcgcgtctgacggcttctggaaaagtgtggccacacgagtgcccaaagaaccacccgaaatccggatactgaacccgtactttatccaagaagccgcattcaccctcattggtcttccttttaataacggcctgatggggcgaggtaatataccgactctgggctcagtcgcagtcacaatggcccttcatgggtgcgacgaggtagctgttgccggttttgggtatgatatgtccactccaaacgcaccattacattattacgagactgtaaggatggccgcaataaaagagtcatggacccataacatccagcgggagaaagagtttctgaggaaactagttaaggccagagtcattacagaccttagctctggcatatag

SEQ ID NO: 242461 - DNA, 456 bp, synthetic construct
  misc_feature 1..456: note = Description of Artificial Sequence: Synthetic coding sequence
  source 1..456: mol_type = other DNA
atgggtttactggtgttcgtgagaaatctgctgctcgcactgtgccttttcttagtcctcgggttcctttattactccgcttggaaattgcatctcctccagtgggaggaagatagcaattcagtggtgttgtccttcgattcagctggccagacccttggttcagagtatgaccggctgggtttcctgctgaatctcgatagcaagctccctgctgagctcgccactaaatacgctaatttctcagagggcgcatgtaaaccaggttacgctagtgccctcatgacagcaattttcccacgcttttccaagccagcccctatgtttctggatgacagctttcggaagtgggccaggataagggagtttgtaccaccattcggaatcaagggccaggagtgtataggatggctgctggagatctgcggtcactctagcgctcagggagcaccctag

SEQ ID NO: 242462 - DNA, 561 bp, synthetic construct
  misc_feature 1..561: note = Description of Artificial Sequence: Synthetic coding sequence
  source 1..561: mol_type = other DNA
atgggactgctagttttcgtccggaatctactgctggcgctctgtctttttctcgtgctaggattcctgtattattctgcctggaaacttcacctgctacagtgggaagaagattcgaagtatgaccgcctgggctttctattgaatctggacagtaaattgcccgcagaactggccacaaaatacgccaacttctccgaaggagcctgcaaacctggctatgccagcgcactgatgaccgccattttccctcggttcagcaaacccgctcccatgttcttggacgatagtttcagaaaatgggctaggattagagaatttgttccaccatttggcattaagggccaagacaatctaataaaagccatcctttctgtcaccaaagagtatcgcctcactcctgcccttgattccctgcggtgcagaaggtgtatcatcgtgggcaacggcggtgtgctggcgaacaaaagcttaggaagtagaattgacgactacgacatagtcgtatctcccggaaggaccattagctctgaaaggaagagcttctgtggtagctggtag

SEQ ID NO: 242463 - DNA, 420 bp, synthetic construct
  misc_feature 1..420: note = Description of Artificial Sequence: Synthetic coding sequence
  source 1..420: mol_type = other DNA
atgggactgcttgttttcgtgcgcaacctgctgctggctctatgcttgttcttggtgctcggatttctgtattacagcgcttggaagcttcatctgttgcaatgggaagaggactccaaatatgatcgtcttggcttccttctgaacctggactctaagttgccggctgagcttgccaccaaatatgctaatttttctgagggggcatgcaaacccggatatgcaagcgcactgatgacagcaatattcccaagattctcgaagcccgctcccatgtttctagatgactcctttcgcaagtgggccaggatcagagagttcgtaccaccctttgggatcaaaggccaggtgctggacgcgcaatatccagccagagaacgggtctccgccgaagccggagagtcttcccgtcatcactag

SEQ ID NO: 242464 - DNA, 306 bp, synthetic construct
  misc_feature 1..306: note = Description of Artificial Sequence: Synthetic coding sequence
  source 1..306: mol_type = other DNA
atgggtctgctggtcttcgtgagaaatcttctccttgcactgtgcctctttctggtgctgggcttcctgtactattctgcgtggaaactacacctgcttcagtgggaggaagacagcaaatatgataggcttgggttcttactgaatctggactcaaagcttcctgctgaacttgccactaagtacgctaactttagcgaaggtgcctgcaaacctgggtacgccagtgccttgatgactgccatttttcccaggcctggcaggaccatatcatccgaacggaagtcattttgcggttcctggtag

SEQ ID NO: 242465 - DNA, 786 bp, synthetic construct
  misc_feature 1..786: note = Description of Artificial Sequence: Synthetic coding sequence
  source 1..786: mol_type = other DNA
atggggcttttggtgtttgtgcggaacctgttgttagccctctgtctgttcctggtccttgggttcctttactactctgcctggaagctgcacctgctgcagtgggaagaagattcaaaatacgatcggctgggctttttactcaatttggattcaaaactgcccgcagagctcgctactaagtacgctaatttctccgagggtgcctgtaagcccggttacgcgtctgcactgatgaccgccatttttccaaggttcagtaagcccgcacccatgttcttggacgattccttcaggaaatgggctcgcatacgtgagtttgtgccaccatttggaataaaggggcaagacaatttgatcaaggccatcttgagcgtaactaaggagtataggcttacccctgctctggacagcctgcggtgtagacggtgcataattgtcgggaatggaggggtgctggctaataaatctttgggcagcaggatcgatgattacgacatcgtggtcaggcttaactcggccccagttaagggattcgaaaaggacgtcggctccaaaactactctccggattacgtatcccgagggggctatgcagcggccagagcagtatgaaagggattctctcttcgtcttggctggcttcaaatggcaagacttcaagtggctcaagtacatcgtgtacaaagaacgggtatcctggactcataatatccagagggagaaagagttcttacgaaagcttgtgaaagcacgtgtcattacagacttgagctcgggtatatag

SEQ ID NO: 242466 - DNA, 834 bp, synthetic construct
  misc_feature 1..834: note = Description of Artificial Sequence: Synthetic coding sequence
  source 1..834: mol_type = other DNA
atgggcctgttggtcttcgtcaggaacctgttgctagccttatgtctgttcctggttctgggcttcctgtactactccgcctggaagctgcacttgctacagtgggaggaggactcaaactccgttgtactgtcctttgatagtgctggccagaccctggggtcagagtacgatagactcggattcctcttaaacctggattccaaactccctgccgaactggccacgaaatacgccaacttttcagagggcgcttgtaagcccggatatgccagcgcgttgatgaccgctatttttccgaggttttcgaagcccgctcctatgtttcttgatgattcttttcggaaatgggcgagaattcgagaattcgtccctccctttggcattaaaggacaggacaacttaattaaggcaatactcagcgtgacgaaggaatacagacttacgcccgctctcgactcactgaggtgcaggcggtgcataattgtgggcaacggaggtgtattagctaataagtcactagggtcacggattgacgactatgatattgtggtgaggctgaacagtgcacctgtgaagggcttcgagaaggacgtcggcagtaagaccaccctccgaattacttatcccgagggggcaatgcagcggcctgagcagtatgagcgggacagtctgttcgtgctggcaggcttcaagtggcaagactttaagtggctgaaatacatagtgtacaaggaaagagtgtcatggacccataacatccagagggaaaaggaattcctgcgcaaacttgtaaaagccagggttattacagacctttcatcagggatttag

SEQ ID NO: 242467 - DNA, 513 bp, synthetic construct
  misc_feature 1..513: note = Description of Artificial Sequence: Synthetic coding sequence
  source 1..513: mol_type = other DNA
atgggactcctcgtgtttgttagaaaccttctgttggccctgtgtctgtttctcgtgctgggatttctttactacagcgcatggaaactgcatttacttcagtgggaagaagattcaagcaagtattcacattctagctctccgcaggaaaagcccgtcgcagatagtgtggtgttatcatttgactctgccggtcagaccctgggcagtgagtacgaccgcctaggatttctgcttaatcttgacagtaagttgcctgcagaactggctactaaatacgcaaatttcagtgagggcgcttgcaagccgggttatgcttctgccctcatgacagccatcttcccacggtttagtaagccagccccaatgttccttgacgattcgttcagaaagtgggccagaataagggagttcgtcccacctttcggcattaaggggcaagtcctagacgcacaatatcctgctagggagagggtgagcgccgaagccggagaaagctctcggcatcattag

SEQ ID NO: 242468 - DNA, 642 bp, synthetic construct
  misc_feature 1..642: note = Description of Artificial Sequence: Synthetic coding sequence
  source 1..642: mol_type = other DNA
atgcggactagcgcggagtattttagacttgctttgtcaaaactccagtcttgtgacctctttgatgaattcgacaaaatgaacaacggacctgtattaggacatgaggaggaggtcggccgaagaactacattccgcctgttctatcctgagagcgttttttctgatcccatccacaatgatccgaacaccactgttatactgacagcctttaaaccacatgacctgaggtggttgttagaactgctcatgggagataagatcaataccaatggcttttggaagaaaccagccctgaatctgatatacaagccttaccagatacgaattctggacccttttatcattaggacagctgcctacgagctgctccactttcctaaagtgtttccgaaaaatcaaaaacccaagcaccctaccaccgggatcattgcaatcactcttgctttttacatatgccacgaggtgcaccttgcaggtttcaaatacaatttctccgacttaaaatcaccactgcactactatggaaacgcgacaatgtcattgatgaacaagaacgcttatcacaacgtgaccgctgagcagttgttcctgaaagatatcatagagaagaacctggtcattaacttaacccaggattag

SEQ ID NO: 242469 - DNA, 996 bp, synthetic construct
  misc_feature 1..996: note = Description of Artificial Sequence: Synthetic coding sequence
  source 1..996: mol_type = other DNA
atgagaggatacctggtggccatctttctgtccgctgtctttctgtattacgtcttgcattgtattttgtggggcacaaacgtttattgggtggctcctgtggaaatgaaaagacgcaacaaaatccagccctgcctcagcaagcccgctttcgcctctctgcttagattccaccagttccatccgttcctgtgcgctgcagatttccgcaaaatcgcgagcctttatggaagcgataaattcgaccttccctatggcatgaggacttcagccgaatacttccggttggccttgtccaaattgcagagctgcgacctcttcgacgagtttgataatatcccttgcaaaaaatgtgttgtggtcggcaacggtggagtgcttaaaaacaagaccttgggtgaaaagattgacagctacgacgtcatcatccgtatgaacaacggccctgtcctcggccacgaggaagaggttggccgaagaacaacatttcggttgttctaccccgagtctgtattttccgaccccatacacaatgatcccaatactaccgtgatactcactgccttcaagcctcacgacctacgttggctgctcgagttgctcatgggggacaaaattaacaccaatggcttctggaagaagcccgcactgaatttaatatataaaccatatcagatcaggatccttgaccctttcatcattcggaccgccgcatacgagctcctccacttccccaaagtatttcccaagaaccagaaaccgaaacacccaaccaccggcattattgccatcacacttgccttctacatctgtcacgaggtgcatttggcgggtttcaagtataacttcagcgatctgaagagcccactgcattactacggcaatgctacaatgtcattgatgaacaagaatgcctaccacaacgttacagcagagcagctttttttaaaagacataatcgagaagaacctggtcatcaatctgacacaggactag

SEQ ID NO: 242470 - DNA, 996 bp, synthetic construct
  misc_feature 1..996: note = Description of Artificial Sequence: Synthetic coding sequence
  source 1..996: mol_type = other DNA
atgcgagggtatctggtggctatcttcctcagtgccgtgtttctctactacgtattgcactgtattctatggggtaccaacgtgtattgggtcgccccagtagaaatgaaaaggcggaataaaattcagccttgtcttagcaaaccagcctttgcctctttgctgcgctttcaccagttccatccttttttgtgcgcagcagatttcaggaaaatcgcctccctgtacggatcggacaaattcgacctgccgtatggaatgagaacatccgccgagtatttcaggcttgcactttccaagctgcagagctgtgatctgtttgacgagttcgacaatataccttgcaaaaagtgcgtagtggtcgggaacggaggagtgctcaagaacaagacactgggcgagaagatcgatagctatgacgtcataatccggatgaataatggccctgtgctgggccacgaagaggaggtgggtaggagaaccactttcagattattctaccccgaatcagttttctctgatcctatccacaacgatccgaacacaactgtcatcctgaccgccttcaaaccccacgacctgcgatggctgcttgagctcttgatgggagataaaatcaacaccaatgggttttggaaaaagcctgccctcaatctgatctacaagccgtatcagattcgaatacttgacccttttataatacggactgccgcttacgagcttttgcactttcctaaggtgtttcccaagaaccaaaaacccaagcatcctactactggcatcatcgcaatcacgctcgccttttacatatgtcacgaagttcaccttgcgggtttcaagtataattttagcgatctgaagtccccactgcactactatgggaacgctaccatgtctctgatgaataagaatgcataccacaatgtaaccgccgagcaactatttctgaaggacatcatcgagaaaaatcttgtcatcaacctgactcaagactag

SEQ ID NO: 242471 - DNA, 696 bp, synthetic construct
  misc_feature 1..696: note = Description of Artificial Sequence: Synthetic coding sequence
  source 1..696: mol_type = other DNA
atgaggggatacttagtggccatcttcctgtcggctgtgtttctttattacgtgcttcactgcatcttgtggggcactaacgtctattgggtcgcacccgtggagatgaagcgacggaacaagatacaaccgtgcctatcaaaacctgcattcgccagccttctgaggtttcaccagttccatcccttcttatgtgctgctgatttcagaaaaatcgcgtctctttatggttcagacaagtttgacttgccatatggaatgagaacctctgccgaatattttaggctggccttgtccaaattacagagctgcgatttattcgacgagtttgataatatcccgtgcaaaaagtgcgttgttgtcggaaatggcggtgtgctcaaaaacaaaaccttgggggagaaaattgactcctacgacgtgatcatacgcatgaacaatggtccagttctggggcacgaggaggaagtgggcaggcgcaccacattcagactattttacccagagtcagtttttagcgaccccatccacaacgacccaaatacgacagtgattcttactgcctttaagccacacgacctccggtggctgctcgagctccttatgggagataaaataaacaccaatgggttttggaagaagccagctctgaacctgatttataagccctatcaaatccgaattttagatccttag

SEQ ID NO: 242472 - DNA, 741 bp, synthetic construct
  misc_feature 1..741: note = Description of Artificial Sequence: Synthetic coding sequence
  source 1..741: mol_type = other DNA
atgcactgtcgggattgcgccctagtgacttctagtgggcacctccttcacagccgccagggatcacagatcgatcaaacagaatgtgtgattcgcatgaacgatgctcccacgcggggttacggacgcgatgtgggcaaccggacctctctgagagtcatcgcccatagctcaattcagagaatcctgagaaacagacacgatctgctgaacgtttcgcaaggtaccgtctttatcttttgggggccaagtagctacatgcggcgagacggaaagggtcaggtgtataacaatctgcatctgctgtctcaggtgctgccgaggctgaaggcattcatgattacgagacacaagatgctccagtttgatgagctctttaaacaggaaaccgggaaagaccgcaagatttctaacacgtggctgagcaccggctggttcaccatgacgatagcattggagctttgcgacaggattaacgtgtacgggatggtcccgccagatttctgtagagacccaaaccacccaagcgtgccctaccactactatgaacctttcggtccggacgaatgtactatgtacctgagtcacgagagaggccgaaaaggcagccatcatagattcattacagagaagcgggtgttcaaaaactgggctcggacattcaatatacacttctttcagccggactggaagccagagagtttggcaatcaatcatccagaaaacaagccggtgttttag

SEQ ID NO: 242473 - DNA, 1011 bp, synthetic construct
  misc_feature 1..1011: note = Description of Artificial Sequence: Synthetic coding sequence
  source 1..1011: mol_type = other DNA
atgaaaacactgatgagacatggcctagcagtgtgcctcgcattgacaactatgtgtacctcactcctgctggtatattcttcgctgggtggccagaaggaaagaccgcctcagcaacagcagcagcaacagcagcagcagcagcaagccagcgctactggaagcagtcagcccgctgccgagtcgagtacacagcaaagaccaggcgtccccgctgggccaagaccactggatggatacttgggagtggcagatcataaacctctgaaaatgcactgccgggattgcgccttggtgacttcctctggacatctgctgcatagtcgccagggaagccagattgatcagacagaatgcgtcattcggatgaacgacgccccaacacgcggatacggcagggacgtgggcaacagaacttcactgcgcgtgatcgcccattcatctattcagcggatactccggaatcgccatgatctgctaaatgtctcccaaggaacagtttttattttctggggaccaagcagctacatgaggcgcgatggcaagggtcaggtttataataatctgcatctgttatcacaggtactgcccaggctcaaagcttttatgatcaccagacacaagatgttgcagttcgacgaattgttcaagcaagagactgggaaagatagaaaaatttctaacacttggctgtcaactggatggttcaccatgacaatcgccctggagttgtgcgatcgcatcaatgtctacggaatggttccgcctgatttttgcagagatccgaaccacccaagcgtcccataccactactacgagcccttcggtcccgacgaatgtactatgtatctctcccacgagagaggcagaaaggggtcccatcatcggtttatcacagagaagcgggtgttcaaaaattgggcccgaacattcaacatccacttttttcagcccgattggaagcccgagtctctggcgatcaatcatccggagaataaaccagtgttttag

SEQ ID NO: 242474 - DNA, 1275 bp, synthetic construct
  misc_feature 1..1275: note = Description of Artificial Sequence: Synthetic coding sequence
  source 1..1275: mol_type = other DNA
atgagcgaccatggcgatgtgagcctcccgcctgaagatagagtccgcgctctgagtcagctgggatcagcagtcgaggttaacgaagatatcccccctaggaggtacttccgcagtggcgtcgaaattatccggatggcttcaatctactcggaggaaggtaatattgaacacgcctttattttgtacaacaagtacatcaccctcttcatagagaagcttcccaaacatcgtgactataaaagcgctgtgattccagaaaagaaggacacagttaaaaaattgaaggaaatcgcgtttccaaaggctgaggaactaaaggcagagttactgaagcgatatactaaggagtataccgagtataatgaggagaagaaaaaggaagccgaagagctcgcccgtaacatggcgatacaacaggagctggagaaggagaaacagagggtggcccagcagaagcaacagcagctggagcaagagcagtttcatgcattcgaggagatgatacgaaatcaagagcttgaaaaggagagattgaagatcgttcaggagttcggtaaagtcgaccccggactggggggaccattagtaccagaccttgagaagccgtcattggacgtatttccaactctcacggtcagctcaattcagcccagcgattgtcacaccacagtgaggcctgcaaagcctcctgtggtggaccgatcactgaaacccggagctctttccaacagtgagagcatccccacgatcgatggacttagacacgtggtggtgccaggacgcctgtgcccacagttccttcagctggctagcgccaacacggcacgcggagtggagacttgcgggatcctgtgcgggaaacttatgaggaacgagttcactattacccacgtgctgatcccaaagcagtccgcagggtctgattattgcaatacagagaacgaagaggagctgtttcttatccaggatcagcagggcctaatcacactgggttggattcatacacaccctacccagactgcctttctatctagcgtggacctgcacacccactgttcctaccagatgatgctgcccgagtcagttgcaattgtctgcagtccaaaattccaggagacgggcttctttaaattgaccgatcacggattagaggagatttcgtcgtgcagacagaagggcttccatccccattccaaggaccctcctctgttctgcagctgctcacatgtaaccgtggtggatcgcgcagttacaatcacagatctccggtag

SEQ ID NO: 242475 - DNA, 1275 bp, synthetic construct
  misc_feature 1..1275: note = Description of Artificial Sequence: Synthetic coding sequence
  source 1..1275: mol_type = other DNA
atgagcgaccatggagacgtgtccctgccacccgaagatagagtgagggccctctcacagcttgggtccgcagtggaggtgaacgaggacatcccccctaggcgatacttccgctctggagtggaaataattcgtatggcgagtatttactccgaggagggtaacattgagcacgcattcattctatataacaagtacatcacactctttatcgagaaactgcccaagcatcgggactataagtcagctgtgatcccagagaaaaaggacaccgtaaaaaagcttaaggaaattgcatttccaaaagctgaagaactcaaagccgaactgctcaagagatacacaaaggaatataccgaatacaatgaagagaagaaaaaagaggccgaagagctggccaggaatatggctatacaacaggaactggaaaaggagaaacagagagtggcacagcagaagcagcagcaactggagcaggagcagttccatgcctttgaggaaatgataagaaatcaggagttggaaaaagagcgcctcaaaattgtccaggagtttgggaaagtcgaccccggtcttggcggacctttggttccggacctcgaaaaaccatccctcgacgtgtttccaactctgacagtgagtagtattcagcccagtgactgtcataccactgtcagaccagccaaaccccctgtggttgataggtccctgaagcccggagctctaagtaacagtgaatccatcccaacgatcgacgggctgcgccacgtagtggtgcctgggaggctgtgcccccagttcctgcaactagcttccgcaaataccgcgagaggtgtggagacgtgcgggatcctctgcggcaagttaatgcgcaatgaatttactattacacacgtgttgatccctaaacagtccgcagggagcgattattgtaacactgagaacgaagaagaattgttcttaattcaagaccaacaagggctaatcacgctagggtggatccatacgcacccgacacagacagcttttcttagtagcgttgacctgcatacacactgctcctaccagatgatgctgccagaatccgtggcgattgtgtgtagtccaaaatttcaggaaactggatttttcaagcttaccgatcatggattagaggaaatctcctcttgccgccagaaggggtttcacccccactctaaagatccaccgctgttttgctcttgctcacacgtgacggtcgtagatagagccgtgaccataacggacctgagatag

SEQ ID NO: 242476 - DNA, 1275 bp, synthetic construct
  misc_feature 1..1275: note = Description of Artificial Sequence: Synthetic coding sequence
  source 1..1275: mol_type = other DNA
atgagtgaccacggcgacgtttccctaccccctgaagaccgagtaagggcactgagccagctgggctccgctgtggaagtgaatgaggacatcccccctcgtagatactttaggagcggcgtggaaatcataaggatggcctccatttattcggaggaagggaatatcgagcatgccttcatcctgtacaataagtatatcaccttgttcattgaaaagctgccgaaacaccgcgactacaaatctgcggttatccctgagaagaaagacaccgtgaaaaagctcaaagaaatagcattccctaaagcagaagagctgaaggcagaattattgaagagatatactaaagagtacacagaatataatgaagagaagaagaaggaggccgaggaattggccagaaacatggccatccaacaggaactggagaaggagaagcaacgagtggctcagcagaagcagcaacagctggaacaggagcaattccacgctttcgaggagatgatcagaaatcaggaactggagaaggagcgactcaagattgtgcaggagttcggcaaagtcgaccctggtcttggcggtcccttggtaccagacctcgagaagcccagcctcgacgtgttccccaccctcaccgtctcatccatccagcctagcgattgtcacactactgtccggccagccaagcctcccgtggtggacaggagtctaaaaccaggggctctgagtaatagtgaatcaattccaacaattgacgggctgcgccacgtcgtggtgcccggaagactgtgtcctcagttccttcaactagcaagcgccaacaccgctcggggagtcgaaacctgcggcatcctctgcggtaagctcatgcggaatgaattcactattacccacgttctaatccctaagcagagtgccggttcagactactgcaacactgaaaatgaggaggaattattcctgatacaggatcaacaaggcctaattacgctgggatggattcacacacatcccactcagacggcttttctttcttctgtggatctgcatacacattgctcgtaccagatgatgcttccggagtccgtggctatcgtatgctcccctaagtttcaggagaccggctttttcaagctgacagaccatggattagaagagatcagttcctgtagacaaaaggggtttcaccctcactccaaagacccgcctcttttctgctcctgctcccatgtgaccgtcgtcgatcgtgcggtgacaatcaccgacttgagatag

SEQ ID NO: 242477 - DNA, 1275 bp, synthetic construct
  misc_feature 1..1275: note = Description of Artificial Sequence: Synthetic coding sequence
  source 1..1275: mol_type = other DNA
atgtctgatcacggcgatgtaagcctcccccctgaggaccgcgtgcgggctctgtcccagctcggttccgctgttgaggtcaacgaggatatccctcctcgacgatacttccgctcaggcgtggagattattcgcatggcaagtatctatagcgaggaaggtaatattgagcacgccttcatcctgtataacaagtatattacactctttattgaaaagctacctaaacaccgcgactataagagcgcggtgattccagaaaaaaaggacacagtcaagaagctgaaagagatagcgttccccaaagccgaggaacttaaggccgagctgctcaagagatacaccaaggagtacaccgagtacaatgaggaaaagaaaaaagaggcagaagaactggcaaggaacatggcaatacaacaggaactcgagaaggagaagcaacgcgtggcccagcagaagcagcagcagctggagcaagagcaatttcatgcattcgaggagatgatacggaaccaggaactagagaaagaaaggcttaagatcgtgcaagagttcggcaaggttgacccgggactgggaggacctcttgttccggacctggagaaaccatccttagatgtttttcctaccttaactgtgtccagcattcagccgagcgactgtcacacaactgtccgtcctgccaaaccacccgttgtcgacaggagcctcaagccaggcgcattatctaactccgaaagcatccctaccattgacggcttgcgacacgtggtagtgccaggtagattgtgcccacagtttctccagctggcgtctgcgaacacagccaggggcgtcgagacctgtggaatcctgtgtggaaaactgatgagaaacgaatttactataacacatgtactgatcccaaagcaatcagcgggttccgattactgcaacactgagaatgaagaagagctatttctcatacaggatcagcagggcctcataacacttggttggatccatacccacccgacgcagaccgctttcttgagcagtgtggatctacacactcattgctcctatcagatgatgcttccggaatcagtcgccattgtgtgtagtcctaaattccaagaaaccggcttcttcaagctgacagatcacggactggaggaaatttccagctgcagacaaaaggggtttcacccacattcaaaggacccccctttgttttgctcctgctctcacgtcaccgtggtagatagggccgtgacaataaccgatctcagatag

SEQ ID NO: 242478 - DNA, 492 bp, synthetic construct
  misc_feature 1..492: note = Description of Artificial Sequence: Synthetic coding sequence
  source 1..492: mol_type = other DNA
atgtcagatcacggcgacgtgtctctgccccctgaggatcgcgtccgagctctatctcagctgggcagtgcggtggaagtcaatgaggacattcctcccaggaggtatttcaggagtggagtggagatcattaggatggcatccatttactccgaagaggggaatatagagcacgcctttatactgtataacaagtatattacgctgtttatcgagaaattgcctaagcacagggactacaagagcgccgtaattcccgagaaaaaagacactgtgaagaagttgaaggaaatcgctttccccaaagcagaagaattgaaggccgagctgttaaaaaggtacaccaaagaatataccgaatataacgaagagaaaaaaaaggaggccgaagaactggccaggaatatggccatacagcaggagctggagaaagagaagcaacgggtggcacaacaaaaacagcaacaattggagcaggaacagtttcactag

SEQ ID NO: 242479 - DNA, 957 bp, synthetic construct
  misc_feature 1..957: note = Description of Artificial Sequence: Synthetic coding sequence
  source 1..957: mol_type = other DNA
atgtccgatcacggggacgtgagtctgcctcctgaggatcgggttagagccctttcacaactgggaagcgcagtggaggtcaacgaggacataccgcctagaagatatttcagatccggagtggagattattaggatggcttcaatttatagcgaggagggaaacatcgagcacgcctttatcctgtataacaagtatattaccctattcatcgaaaagctccctaagcaccgggattacaaatcagctgtaattccagagaaaaaagacaccgtgaagaaacttaaagaaattgcattcccaaaggctgaagaactcaaagctgaattattgaagcggtacaccaaagaatacactgaatacaacgaggaaaaaaaaaaggaggcagaagaactcgcccgtaacatggccattcagcaggagcttgaaaaggaaaagcagagggttgcacagcagaaacagcagcagcttgagcaggaacaatttcatgccttcgaagagatgattcggaaccaggaactggagaaagaaaggctaaaaatcgttcaggaatttggcaaggtggacccagggctggggggtcccctggtcccagatctggagaaaccatcattggatgtatttcccactcttaccgttagcagcatccagccatctgattgccacactacggtcaggcccgcaaaaccacccgtggtagaccggagcctcaagcccggagccctgtcaaattccgagagcattcccaccatcgatggtcttcggcatgtagtggtcccgggacgtctgtgtccgcaatttctgcagctggccagcgccaacaccgctaggggagtggaaacctgtgggatcctgtgcgggaagttgatgcgaaacgagttcaccattacccatgtgctcatccctaagcagtctgcgggatctgattactgtaatactgagaatgaagaggagtag

SEQ ID NO: 242480 - DNA, 414 bp, synthetic construct
  misc_feature 1..414: note = Description of Artificial Sequence: Synthetic coding sequence
  source 1..414: mol_type = other DNA
atgagtgaccacggagatgtatcccttcccccagaggatcgggtcagggccctatctcaactgggttcagcagtcgaggtcaatgaggatattcctcccagacgctattttcggagtggcgtcgaaattataagaatggcctccatatatagtgaggagggcaatatcgagcatgccttcatactgtataataagtacattacactctttatagaaaaactacctaaacacagagattacaagtcggctgtgatcccagagaaaaaagacaccgtcaagaaactcaaagagatcgccttcccgaaggcagaggagctgaaagcggagctactgaagcggtatacaaaagagtacacggagtataacgaggaaaagaagaaggaagccgaagagctggcacgaaacatggcatag

SEQ ID NO: 242481 - DNA, 1047 bp, synthetic construct
  misc_feature 1..1047: note = Description of Artificial Sequence: Synthetic coding sequence
  source 1..1047: mol_type = other DNA
atgagcgaccacggagatgtgtcgcttccaccagaggatcgagtgagagccctatctcaactgggctccgccgtggaggtcaacgaagatatccctcctcggagatacttccgaagtggcgtggagataatccgtatggcgtcaatctacagcgaggaaggcaacattgagcatgcctttattttatacaataaatatatcacactctttattgaaaagctcccaaaacatagggactacaagagtgctgtaattcccgagaaaaaggacactgtgaagaagctgaaggaaatcgccttcccaaaggccgaggagctcaaagccgagctgcttaaacggtataccaaagagtacactgaatacaatgaggaaaagaagaaggaggcggaagagcttgctaggaatatggctattcagcaagagttagaaaaggaaaagcagcgggttgctcagcagaagcagcagcagctggagcaggagcagttccacgccttcgaggagatgatacgaaaccaagaactggagaaggagcgtttaaaaattgtgcaagagttcggcaaggtcgaccccggtctggggggaccactcgtcccagacctggaaaagccatcactcgatgtctttccaacactgaccgtaagctccattcagccatccgactgccatactaccgttcgacctgcaaagcctccagttgtggaccgcagcttaaagccaggcgcactttctaactcagagtcaatacctacaattgatggattgagacatgtcgtggtgccagggagactgtgtccccaattcctgcagctcgctagtgccaatacggcccgaggggtggaaacatgcggtattctttgcggtaagctgatgcgtaatgagtttactattacacacgtgctgattccaaaacagagcgccggatctgactattgtaatacggagaatgaagaggagctttttctgattcaggatcaacaaggccttatcactctaggttggattcatgtcgagacgttatggtctctgaaatctctacacgcaccttag

SEQ ID NO: 242482 - DNA, 813 bp, synthetic construct
  misc_feature 1..813: note = Description of Artificial Sequence: Synthetic coding sequence
  source 1..813: mol_type = other DNA
atgcggcagcagcaactggagtccgagcagtttttattctttgaagatcaacttaagaaacaagaattggcacgcggtcagatgcggagccagcagacctcgggcttgtctgagcagatcgatggaagcgcgctctcctgcttctccacccatcagaataacagcttgctgaacgtgtttgcagatcagcctaacaaatcggatgcgacgaactacgcctctcacagccccccagttaatcgggctctgacccctgctgccaccctcagtgccgtgcaaaatttggtagtggaaggccttcggtgtgtggtgctgcccgaagatttgtgccacaagtttctacaactggctgaatctaatacagtccgaggcatcgaaacatgcggaattttatgtgggaaacttacccacaacgagtttaccatcactcacgtgatcgttcctaaacagagcgctggcccagattattgcgatatggaaaacgtggaagagttgttcaacgtccaggatcaacatgacctcctcacgctaggctggatccacacacatcccactcagactgccttcttgtcctcggttgatcttcatacccattgctcctatcagttgatgttgcctgaagctattgccatcgtgtgctcacctaagcataaggacacaggcatatttcgccttacaaatgctggaatgctagaggtttctgcttgtaaaaaaaaaggttttcatccccacactaaagaaccaagattgttttccatctgcaagcacgtcctcgtcaaagacattaaaataatcgtgctggacctgagatag

SEQ ID NO: 242483 - DNA, 1311 bp, synthetic construct
  misc_feature 1..1311: note = Description of Artificial Sequence: Synthetic coding sequence
  source 1..1311: mol_type = other DNA
atggatcagccctttaccgttaactcgctcaagaaactggctgccatgcctgaccatactgacgtaagcctgagccctgaggaacgcgtccgggctctaagcaaacttggctgcaacattactatatccgaagatataacgccgaggaggtatttcaggagtggcgtggaaatggagcggatggcctctgtttacctggaagaaggcaatctggagaacgcctttgtcctctacaacaaattcattacactgtttgtggagaagctgccaaaccacagggattaccagcagtgcgctgtgccagagaagcaggatatcatgaaaaaactgaaagagatcgctttccctaggaccgacgagttgaagaacgatctcctcaagaagtacaacgtcgagtatcaggagtatcttcagagtaagaataagtacaaggctgaaatcctgaaaaagctggagcaccagcgtctaatcgaggccgaacgcaagagaatagcccagatgcgccagcagcagctggagtccgagcagtttcttttcttcgaggatcagctgaagaaacaagagctggcacgcggacagatgcgcagccaacaaacatccggattatccgagcagatcgacggctctgccttgtcctgttttagtacccaccagaataatagtttgctcaatgtgttcgcagatcagcccaataaatcagatgcaaccaattatgctagtcactcacccccagtgaaccgcgctttgactccagcagccactctcagcgcagtccagaatctcgtcgtggaggggttgagatgtgtggtgctccccgaagatctgtgtcataagttcttgcagctggccgagagcaacaccgtccgtgggatcgaaacttgcggaatactttgtggcaaactgactcacaatgagttcaccattactcacgtgatcgtgcctaaacagtctgctggaccagactattgcgatatggagaacgtagaggagctctttaatgtccaggaccagcacgatttgctgaccctgggatggatccacactcaccctacccagacggcatttctgagtagcgtcgatctgcatactcattgttcgtatcaactcatgctacctgaggcaattgctatcgtctgctcaccgaaacataaggataccgggattttccgactcacaaacgcgggaatgctggaggtttccgcctgcaaaaagaagggtttccatccccatactaaggaacctcgcctattctcaatctgtaaacacgttctcgtgaaggacatcaaaattatcgttctggatttgcggtag

SEQ ID NO: 242484 - DNA, 1311 bp, synthetic construct
  misc_feature 1..1311: note = Description of Artificial Sequence: Synthetic coding sequence
  source 1..1311: mol_type = other DNA
atggaccagccgttcaccgtaaattcactcaagaaattggccgctatgcctgaccataccgatgtgtccctcagtccagaggagcgggtgcgggctctgagcaaattaggctgcaacataacaatctcagaggatatcactcccagacgatactttagaagcggagtggagatggagcgaatggctagcgtgtacctggaagaagggaatttagagaacgctttcgtcttgtacaacaagtttatcacccttttcgtagagaagctgccaaaccaccgtgattaccagcaatgcgctgttcccgaaaagcaggacattatgaagaaactcaaagagatagccttccctaggacggatgagctgaaaaacgatcttctcaagaaatataacgtggagtaccaggagtacctccaatccaagaataaatataaggctgaaattctgaaaaagctggaacaccagaggctgatcgaagctgagaggaaaaggatcgcacagatgcggcaacaacagctcgagagtgaacagtttttatttttcgaggatcaactgaagaaacaagagctcgccagaggccagatgcggtctcagcaaacctccggcctgtcagaacagatagacggctcagcgctatcttgttttagtacccaccaaaacaactcccttctgaacgtttttgctgatcaaccgaataaatcggacgctaccaattacgctagccactccccccctgtgaatcgagcattaacccctgctgctacacttagcgccgtgcagaacctcgttgtcgaagggctgcggtgcgtcgtgctccccgaagacctgtgccacaagtttctgcaactggctgaatccaataccgtccgcggaatcgagacatgcgggattctctgcggaaaacttacccacaatgaatttaccatcacacacgtcattgtccctaagcagtcagcgggacctgattactgcgatatggaaaatgttgaagagttattcaatgtacaggaccaacacgatctgctgaccctgggctggatccacacacaccccactcagaccgcctttttatccagcgtcgacctacacacacactgctcctatcaactgatgcttccagaagcgatcgctatcgtgtgtagccccaaacacaaggacaccgggatttttagattgaccaacgctggcatgctggaagtgagcgcttgtaaaaaaaaaggctttcacccccatacgaaagaacctcgcctgttcagtatatgcaagcatgtcctggtgaaggatataaaaatcattgtgctcgacctgcggtag

SEQ ID NO: 242485 - DNA, 1386 bp, synthetic construct
  misc_feature 1..1386: note = Description of Artificial Sequence: Synthetic coding sequence
  source 1..1386: mol_type = other DNA
atggaccagcccttcaccgtcaactcgttgaaaaaactggcagcaatgcctgaccataccgacgtgtctctctctcccgaggagcgtgtgcgcgcattgtcaaaactcggatgcaacatcactatatccgaggatatcaccccacggcgttatttccgatctggggtggaaatggagcggatggcctctgtgtacctggaggaagggaatctggagaacgccttcgtcctgtacaataaattcattacattgttcgttgaaaagctgccaaaccatagggactatcagcagtgtgcggttccggaaaaacaggatatcatgaagaagctcaaggaaatcgcttttcctagaaccgatgaacttaaaaatgacctgttgaaaaagtacaatgtagagtaccaggaatatcttcagagtaaaaacaagtataaggccgagatcctgaaaaaacttgagcatcaacgtctgatcgaggccgagaggaagagaattgcccaaatgcgccagcagcagcttgagagcgaacagtttctttttttcgaggaccagctgaaaaaacaggagctcgcccgaggtcaaatgaggtcgcaacagacttctggcctgagcgaacagattgacggctctgcgctctcttgtttcagtacgcatcaaaacaattcattactgaacgtgttcgccgaccagcccaacaaaagcgacgccactaattacgcctcacattcacccccagtgaatagggctctgacaccagcggcaacactcagtgccgtgcagaatctcgtcgtcgaaggcttgcgctgcgtggtcttacccgaggacctgtgccataagtttctgcagctggcagagtctaacactgtcagggggatcgaaacctgcggcattctatgtgggaagcttacccacaacgagttcacgatcactcatgtgatagtgccaaaacagagtgctgggccagattactgtgacatggagaacgtggaggagctgtttaacgtccaggaccagcatgatcttctaacactgggctggatccatacccacccaacgcagacggctttcctaagctcagtagacttacatacgcactgcagctaccagctcatgctgcctgaggctattgctattgtttgctcacctaaacataaagataccggtatttttaggcttaccaacgctggcatgcttgaggtgagtgcctgcaagaagaaagggttccacccacacaccaaagaacctcgactcttctccatccagaagttcctgagtggcatcatttccgggacagcactggaaatggagcctctgaagatagggtatgggccaaacgggtttcccctgctcggcatcagccggtcaagcagtcctagtgagcagctatag

SEQ ID NO: 242486 - DNA, 267 bp, synthetic construct
  misc_feature 1..267: note = Description of Artificial Sequence: Synthetic coding sequence
  source 1..267: mol_type = other DNA
atgagcatcatggatcacagccccaccacgggggtcgtgacagtcatcgttatcctgatcgccatcgcagctctgggcgctctcatacttggatgctggtgctacttacggttgcagagaataagtcagagtgaggacgaggaatcgatagttggtgacggcgaaacaaaggaaccattcctcctcgtgcagtactccgctaaaggtccctgtgtggagagaaaagctaagctgatgacacccaacggcccagaagttcatggttag

SEQ ID NO: 242487 - DNA, 744 bp, synthetic construct
  misc_feature 1..744: note = Description of Artificial Sequence: Synthetic coding sequence
  source 1..744: mol_type = other DNA
atgttacagaattccgccgttcttctggtgctagtcatatcagctagtgcaacacatgaggccgagcagaatgatagcgtgagtcctcggaaaagtagagttgccgctcagaattctgctgaggtggttaggtgcctcaactccgccctgcaggtggggtgtggtgctttcgcatgtcttgaaaattcgacttgtgacaccgatgggatgtacgacatttgcaaatcttttctctactctgccgctaagttcgacacacagggtaaggcgttcgtcaaggagagcctgaaatgtattgccaacggcgttacatccaaggtcttcttagccattagacggtgctctacatttcagcggatgatcgctgaagttcaggaagaatgctacagcaaacttaatgtttgctctatcgctaaaaggaatccagaggccatcactgaggtcgtgcagctgcccaatcactttagcaacaggtactacaataggttggtacgctcactgctggagtgtgacgaagatacggtctccaccatccgcgactccttaatggagaaaatcggccctaacatggcttcactcttccacatcctgcagacagatcactgcgcccagacccaccccagagcggactttaatcgcagacgcacaaatgagccgcagaagctgaaagtcctcttgcgcaacttgaggggggaggaagacagcccatctcatataaagcgaacaagtcacgaatctgcttag

SEQ ID NO: 242488 - DNA, 537 bp, synthetic construct
  misc_feature 1..537: note = Description of Artificial Sequence: Synthetic coding sequence
  source 1..537: mol_type = other DNA
atgtatgacatctgtaagtcgtttctatattctgctgcaaaatttgacacccagggtaaggctttcgtcaaggaatcgctgaagtgtatcgccaacggcgtgacgtccaaagtgttcctggcgattaggagatgttccacgtttcaaagaatgattgccgaggtgcaagaagagtgctactcaaagctcaacgtgtgtagtattgctaagaggaaccccgaagccatcactgaggtcgtacagctgcccaatcacttcagcaacaggtattataatcggcttgtacgcagtttgcttgaatgcgatgaggacacggtgagcactatccgcgactcactcatggagaagataggccctaatatggcctcgttgttccacattctgcagaccgaccactgcgcccagacacatccacgggctgactttaatcgacgaaggaccaatgagcctcagaaactgaaagtgctcttgcggaacctgaggggagaggaagactcacctagtcacatcaaacgcacatcccacgaatccgcttag

SEQ ID NO: 242489 - DNA, 537 bp, synthetic construct
  misc_feature 1..537: note = Description of Artificial Sequence: Synthetic coding sequence
  source 1..537: mol_type = other DNA
atgtatgacatctgtaaatcattcttgtactcagctgctaaattcgacactcaaggaaaggccttcgtcaaggaaagcctgaagtgtattgccaatggtgtgacctctaaggtgttcctggccattcgcagatgttcaactttccagaggatgatcgctgaggtgcaggaggagtgttacagcaagcttaacgtgtgttccatcgcaaaaaggaacccggaagctatcacagaagtggtgcagctgccaaaccacttctctaaccgttactacaataggctggtgagaagcttgctggaatgcgatgaggatactgtttcgaccatacgcgactcactgatggagaagattggtcctaatatggcttcgctttttcacatactgcaaaccgaccattgtgcacagacacacccgagagctgatttcaacaggaggcgcacaaatgaaccacagaaactgaaagtgttattgcggaatttacgcggagaggaggacagcccttcccatatcaaacggacctcacatgagagcgcctag

SEQ ID NO: 242490 - DNA, 2733 bp, synthetic construct
  misc_feature 1..2733: note = Description of Artificial Sequence: Synthetic coding sequence
  source 1..2733: mol_type = other DNA
atggcaagttcggcgcagtccggtggatcctcgggtggacctgcggtcccaaccgttcaacggggtattattaaaatggtcctgtcaggatgcgccatcattgtgaggggtcagccacggggaggcccaccaccagaaagacagatcaatctatcaaacatcagggccggaaacctcgcacggcgagcagccgctacgcagccagacgctaaggacaccccagacgagccatgggccttccccgctagagagttcctcaggaagaaacttatcgggaaagaggtgtgcttcactattgagaacaagaccccccagggcagagagtacggaatgatctacttaggcaaggatacaaacggtgaaaacatcgcagagtcactcgtagccgagggcctcgcaacacggcgagaaggaatgcgggctaataatcctgagcaaaaccgcctctctgagtgtgaagagcaggcgaaagccgctaaaaagggcatgtggagcgagggcaatgggtcacatactatacgggatctcaagtacacgattgagaatccacgacactttgtggattcgcatcaccagaagccggtgaatgccatcatcgaacacgtccgcgacggatccgtggtgcgcgctctgctgctgcccgactactacctcgtcaccgtcatgttatctggaattaaatgccctacattccggcgagaggctgatggctctgaaactccagagccatttgccgcagaggccaaattttttaccgagagtagactgctgcaaagagacgtgcagatcatcctcgaatcgtgccataatcagaacatcttggggactatacttcatcctaacggaaacattaccgagcttttgctgaaggagggttttgccagatgtgtggactggagcattgccgtgtacacccgcggagctgagaagctccgagcggcagaaagatttgccaaggagagaagactgcgcatctggcgggattacgtcgcaccgactgctaacctcgaccagaaagataagcagtttgtcgccaaggtgatgcaggttcttaatgcagatgcaattgtggtgaaactgaactccggcgattacaaaacgatccatctgagctccatccgacctcccagattagaaggcgagaacacacaggacaagaacaaaaagcttcggcctctgtacgacataccatacatgttcgaagctagagagttcctcaggaagaagctgattggtaagaaggtcaacgtaacagttgattatattaggccggcatctccagcgacagaaacggttccagccttctctgagcgaacttgcgccacggtcactatcgggggaatcaatatcgcggaagcgcttgtgagtaagggccttgctactgtcatccggtaccgccaggatgatgatcagaggagtagccattacgatgagctgctggcagccgaggccagggctattaaaaatggaaaagggctccattccaagaaggaagttcctatccaccgcgtcgcagatatttccggagacacgcagaaggcaaaacagtttctgccctttttacaaagggcgggacggtccgaggcagtggtggagtacgtgttctcaggctctagacttaagctgtacctccctaaagagacctgcctgatcacttttctcctagctggcatagaatgtcccagaggtgcccgaaatctgccgggacttgttcaggaaggcgagcctttctcagaagaagccacactgttcactaaggagttagtgctgcaaagggaggtggaagtggaggtggagtcaatggataaagccggtaacttcattgggtggctgcatatagatggggcaaatctcagcgtcctcttagtcgagcatgccctatctaaagtccacttcacagcagagaggtcttcatactataaaagtcttttgagtgcggaggaggcagccaagcagaaaaaagagaaagtttgggctcactatgaggagcagcctgtggaggaggtgatgccagttctagaagagaaggagagatcagcatcttataaaccagtgttcgtaacggagatcactgatgatctccatttttacgttcaggatgtagagaccgggactcagctagagaaactaatggagaacatgaggaacgatatagctagccaccccccagtggaaggctcatacgctcctcgtagaggcgaattctgcattgcaaaattcgtggacggcgagtggtacagagccagggtggagaaggtggagtcgccagctaaaatccacgtgttttacatcgattatggtaaccgagaggttcttccgtcaacaaggctcggaaccctttcacctgccttctcgactcgggtcctgccagctcaggcaacagaatatgcctttgccttcatccaggttccacaggatgacgacgctagaaccgacgccgtcgattcagtagttagggatattcaaaatactcagtgcctcttgaatgtggagcatctgtccgccggatgtccccatgtgaccctgcagtttgccgattctaaaggggacgtgggactgggcttggttaaggaagggctcgtgatggtcgaagtgcggaaagaaaaacagttccagaaagtgataactgagtacctaaatgctcaggagagcgcgaagtcagccagactgaatttgtggagatacggagactttagagccgatgatgctgatgaattcggatattcccggtag

SEQ ID NO: 242491 - DNA, 2703 bp, synthetic construct
  misc_feature 1..2703: note = Description of Artificial Sequence: Synthetic coding sequence
  source 1..2703: mol_type = other DNA
atggcatcatctgctgttcccaccgtgcagcgcggaattatcaagatggtcctaagcggttgtgccattatcgtccgcggacagccaagaggtggaccaccacctgagaggcagattaacctgtccaatatccgtgctggcaacctcgccaggcgagccgcagccacccagcccgatgcaaaggatactccagatgagccatgggcctttccagctagggagtttctgcgcaagaaactgattggcaaagaagtatgttttacaattgaaaacaagaccccccagggcagggaatacggcatgatctacttaggcaaggacacgaatggcgagaacatcgccgaatctctggtggccgaagggctcgcgacacggagggaaggaatgcgagctaacaacccggagcagaataggctgagtgagtgtgaggaacaggcaaaagccgctaagaagggaatgtggagcgaggggaacggctcacataccataagagacctaaagtataccattgagaatccaaggcactttgtggactcacaccaccagaagcctgtcaacgcaatcatcgaacacgtacgtgatggttctgtggtgcgggcactcctactgcctgactactacctcgtgaccgtgatgttgtctggcataaaatgcccaacatttagacgagaagctgacgggtcagaaaccccggaaccatttgctgccgaggcaaaattcttcaccgaaagtcgccttctccagcgggacgtccagatcatactggaatcttgtcacaaccagaatatcctgggcacgatcctgcatccaaatgggaatatcaccgagcttctgttaaaggaagggtttgctaggtgtgtggactggtccatagccgtgtacactagaggagccgagaaactccgagctgcagaacgattcgccaaggagagaaggctgcgcatctggcgcgattacgtggcacctaccgctaacctggaccagaaagataagcaattcgtggccaaggttatgcaggtgttgaacgcagacgctattgtagtgaaattaaattcaggcgattataaaaccatccacctctcatcaattcggcctcccaggttagagggcgaaaatacgcaagataaaaataagaagttacgtcccttatatgatatcccctatatgtttgaagcccgtgaattcttacgcaagaagctgattgggaagaaagtcaacgttacagtggattatattcggcctgctagtcctgccacggagaccgtgcctgcattctccgaaagaacttgcgctaccgttactattgggggaataaatattgcggaagccttggtaagcaagggcctcgctaccgttatccgataccgccaggatgatgatcaacgatcttcacactatgatgagctgctggccgctgaagccagagctatcaaaaatggtaaggggctccactcaaagaaggaagtgccgatccacagggttgcagatatctccggcgacacgcagaaagccaaacagtttctcccctttctacagagagcgggacgctccgaagccgtcgttgagtacgtgttctcaggaagcaggctgaaactgtacctgcccaaagagacatgcttgattaccttcttattggctgggatagaatgtcccagaggtgctcgcaatctgcccggacttgtgcaggaaggagagccttttagcgaggaagcaaccctctttacaaaagaattggttttgcagagggaggtggaggtcgaggtggagtcaatggataaggccggaaattttatcggctggctgcacatagacggggctaaccttagtgtgttgcttgttgaacacgccttgtctaaagtgcactttactgctgagagatcatcgtattacaagagtctcctaagcgccgaagaggccgctaagcagaaaaaagaaaaagtctgggctcattacgaggaacagccagtagaagaggtgatgcccgtcctcgaggagaaagagagaagtgctagttataagccagtgtttgtgactgagattactgatgatctgcacttttatgtacaggacgtcgaaacaggcacgcagctcgaaaaactcatggagaacatgagaaatgatatcgcctctcacccgcctgtcgaaggctcttatgccccaagacgcggtgagttctgcatcgccaagtttgtagatggggaatggtatagggccagagtagagaaggtagagtcccctgccaagatccatgtgttctatattgactacgggaatagggaggtactgccttccactagactcgggaccctttcccccgcttttagcaccagggttctgcccgctcaagcaaccgagtacgcctttgccttcatacaggtcccgcaggatgacgatgcacgaaccgacgccgttgatagcgtggttagagatattcagaacacgcagtgcctgttgaatgtagagcacttatctgctggttgccctcacgttactctgcagttcgcggactccaaaggcgatgtcggccttggactggtgaaagagggtctcgtcatggttgaggtaaggaaggaaaagcaatttcagaaagttattaccgagtatctgaatgcccaagagagcgccaaaagtgcaaggctgaacctgtggcggtacggagatttccgagcagacgatgcagacgaatttgggtacagtcgctag

SEQ ID NO: 242492 - DNA, 705 bp, synthetic construct
  misc_feature 1..705: note = Description of Artificial Sequence: Synthetic coding sequence
  source 1..705: mol_type = other DNA
atgaatcatctgcccgaagacatggaaaacgccctgaccggctcacagagcagtcatgcctcgcttcgcaacattcattcgatcaatcccacgcagctcatggcgaggatcgagtcttacgaagggcgtgaaaaaaaaggaatttcggacgtgcgaaggacgttttgcttgtttgtgacatttgatctgctatttgtaacattattatggattatcgagttgaacgttaacggtggaattgagaacactctggagaaagaagtcatgcaatacgattattatagcagctatttcgatatttttctgttggccgtatttaggttcaaggttcttattctggcctatgcagtgtgccgcctgcgacactggtgggctattgcgcttacgactgcggtgacaagtgcattcctcctggcgaaagtgattttgagcaaactgttctctcagggggcatttggatatgtgctccccattatatcattcatcttagcctggatcgaaacttggtttctggactttaaagtgctaccacaagaggcagaggaagaaaatcgtttactgatcgtgcaggatgcctctgagcgggctgctctcatcccaggcggactatctgatggccagttctactcaccgcctgagtcagaagcaggatcagaagaggcagaagagaaacaggactccgaaaaaccgctgctggaactgtag

SEQ ID NO: 242493 - DNA, 705 bp, synthetic construct
  misc_feature 1..705: note = Description of Artificial Sequence: Synthetic coding sequence
  source 1..705: mol_type = other DNA
atgaaccacctgcctgaggatatggagaatgcgttaaccggatcccagtcctcacacgcctccctgaggaatattcacagcattaaccccacacagttgatggcacggattgagtcctacgaaggaagagagaagaaaggaatcagtgatgtcagaaggaccttctgcttgttcgtgacgttcgatctgctttttgtaacactcctctggattatcgagctcaacgttaacggaggcatcgaaaacactttggagaaggaagtcatgcagtacgattattattcgtcatattttgatattttcctcctggcagtgtttcgcttcaaagttctcatcttagcctacgctgtgtgcaggttgcggcattggtgggccatcgcactgaccacggccgtgacgagcgcctttcttttggcaaaagtgatactgagcaagctgttttcccaaggggcatttggatatgtcctgcccatcatctccttcatcctggcttggatagagacctggttcctcgactttaaagtcctcccgcaagaagcagaggaggaaaaccggctgcttatcgtgcaggatgcttccgaacgggcagcgctgatccccggaggactgtctgatggacagttctatagcccaccagagagcgaggcaggaagtgaagaggcagaggagaagcaggacagcgagaagccgctccttgaactgtag

SEQ ID NO: 242494 - DNA, 621 bp, synthetic construct
  misc_feature 1..621: note = Description of Artificial Sequence: Synthetic coding sequence
  source 1..621: mol_type = other DNA
atgaatcatctgcccgaggacatggagaacgctctaacggggtcacagtctagtcatgcctctctccgtaacatccacagcataaatccgacgcagctgatggccagaatcgagtcttacgagggccgtgaaaaaaaaggaattagcgatgtccggaggacattctgtctgttcgtgacatttgatcttcttttcgtaaccctgctgtggataatcgagctcaacgttaacggagggattgagaacaccctcgagaaagaagttatgcagtatgactactattcctcctatttcgatattttcctgttggcggtgtttcggtttaaagtcttgatcctcgcctatgcagtgtgccgattgagacattggtgggccatcgcattaaccacagctgttacctccgcctttctactggcaaaggtcattcttagcaaactgttctcacagggtgccttcgggtacgtccttccaatcatcagtttcatcctcgcatggattgaaacctggttcttggatttcaaagtgctacctcaagaggctgaggaagagaaccggctacttattgtccaggatgcatcagagagggcggcattgatcccgggtggtctcagcgatgggtag

SEQ ID NO: 242495 - DNA, 555 bp, synthetic construct
  misc_feature 1..555: note = Description of Artificial Sequence: Synthetic coding sequence
  source 1..555: mol_type = other DNA
atgaaccacctccccgaggatatggagaacgccctgacagggagtcagtctagtcacgctagtctgagaaacattcacagcatcaatcctacacagttgatggctagaatcgagtcctatgagggaagggaaaaaaaaggtatctccgatgtgcgcagaactttctgtctcttcgtcacatttgacctgctgttcgtgaccctgttgtggatcatcgagctcaacgttaacggcggaatagaaaacacactggaaaaagaagtgatgcagtacgactattacagctcctattttgacatcttcttgctggcagtgttcagattcaaggtgttgatcttagcatacgccgtctgccggctgaggcactggtgggccatcgcactaacgacagcagttacgtcggcctttctgttagcgaaagtcattctgtctaaactgtttagccagggcgcttttgggtacgtcctacccatcatcagtttcatcctagcttggatcgagacctggtttctggacttcaaagtgttgcctcaggaggcggaggaagagaactag

SEQ ID NO: 242496 - DNA, 519 bp, synthetic construct
  misc_feature 1..519: note = Description of Artificial Sequence: Synthetic coding sequence
  source 1..519: mol_type = other DNA
atgaatcacttacctgaggatatggaaaatgccctcaccggttcccagagttcccatgccagcctgaggaacattcactcaattaatccgacacagcttatggcaagaatcgaatcatatgaaggaagggaaaagaagggaattagcgatgtaagacggaccttctgtctgttcgtcacattcgatttactatttgtgacactgctgtggataattgagctcaatgtaaacgggggaatcgagaacacactggagaaggaggttatgcagtatgattactattcctcttacttcgatatctttctgttggccgttttccgctttaaggtgctaattcttgcctacgctgtgtgtcggctgagacattggtgggcaatcgccctcactacggcggtgacatcggctttcctcctggccaaagtcattctatcaaaattatttagtcagggcgcatttggctatgttttgcccatcatcagcttcatcctagcctggatcgaaacatggttcctcgattag

SEQ ID NO: 242497 - DNA, 684 bp, synthetic construct
  misc_feature 1..684: note = Description of Artificial Sequence: Synthetic coding sequence
  source 1..684: mol_type = other DNA
atggagaacgccctcactggctctcagagcagtcacgcctctctcaggaacatacatagcatcaatccaacacagctcatggcacggatagaaagttatgagggcagagagaagaaaggtattagcgatgtgcggaggaccttctgcctgttcgttacattcgacctcctgttcgttaccctcctgtggattattgagttaaatgttaatggaggaatagagaataccctagagaaggaagttatgcagtatgattattattcaagctacttcgacattttccttctggccgttttcagattcaaagtgctcatcctggcctacgcagtgtgccgcctgcgtcattggtgggctatcgctctgaccacagccgtgacgagcgccttcctgttagccaaagtaattctgtccaaacttttttctcagggggcatttggatatgtgctgccgatcatctctttcattttggcttggattgaaacgtggtttctagacttcaaagtgctgccccaggaggccgaggaagaaaatcgtctgttgatcgtgcaggatgcttccgaacgggcagcactgatacctgggggactgtctgatgggcaattttattcaccacccgaatctgaagccggaagcgaggaggcggaagagaaacaggacagcgaaaagccgctgctcgagctatag

SEQ ID NO: 242498 - DNA, 1338 bp, synthetic construct
  misc_feature 1..1338: note = Description of Artificial Sequence: Synthetic coding sequence
  source 1..1338: mol_type = other DNA
atgagcaagctgcctagggagctaaccagggatctcgagaggtccttgccagcagtggcctctctgggttcgagcctcagtcactcccaaagcctgtccagtcacctcctgccacctcctgagaagcggagggctatatcagacgtaagacggaccttctgcttgttcgtgacatttgacctactgttcatttccttgttatggattattgagctgaacaccaacactggtattaggaagaacctggaacaggaaatcatccagtataatttcaaaacgtccttctttgacatcttcgtgcttgccttcttcaggttttccgggctcctgttgggttacgccgtcctgcgcctccggcattggtgggtcatcgccgtgactaccttagtgtcttccgcttttcttatcgtcaaagtgatcctttctgaactcctgtccaagggggcattcgggtatcttttgccaatcgtgagctttgtgctggcttggctcgagacatggttcctcgactttaaagtgctcccccaggaggctgaagaggaacgctggtatctggcggcacaggtggcagtggcccgtggacccttattgttcagcggggctttgtctgagggccaattttattctccccctgaatcttttgccggttcagacaacgagagcgatgaggaagtcgcaggtaaaaaatcctttagcgcacaggagcgagagtatatcagacaggggaaagaagcaactgctgtcgtcgaccagatcctcgcacaggaagagaactggaaattcgagaaaaacaatgaatacggggacaccgtgtacaccattgaggtaccgttccatggaaaaactttcatactcaaaactttcctgccctgccccgctgagcttgtctaccaagaggttatactccagccagaacggatggtcctatggaacaagaccgttactgcatgtcaaatcttgcagcgggtggaagataacacccttatatcctacgatgttagcgctggtgcggctgggggagtggtgagccccagagattttgtgaatgttcgccgtatcgaaaggcgcagagacaggtacctatccagcggcattgcgacttcccacagcgcaaaaccacctactcacaagtatgtcagaggcgagaatggacctggcggtttcattgtgttgaagtccgccagcaaccctagagtgtgtacgtttgtgtggattctgaacacggatctgaaagggagactccccaggtatctaatacaccaaagtctcgctgctactatgtttgagtttgccttccatctgcgccagaggataagcgagctcggtgccagggcatag

SEQ ID NO: 242499 - DNA, 1284 bp, synthetic construct
  misc_feature 1..1284: note = Description of Artificial Sequence: Synthetic coding sequence
  source 1..1284: mol_type = other DNA
atgtcgaaacttccaagagagttgacaagggacctggaaaggagcctgcctgctgtcgccagcctaggtagttctctcagccacagccaaagcctgagttcacacttacttcctccgccagaaaagcgcagagcgatttccgatgtgcgcaggacattttgcttatttgtgacgtttgacctgctgttcatttctcttctttggattatcgagctgaatacaaacacaggcatccggaagaacctagaacaagaaattatccaatataattttaagacttcattcttcgacatttttgtactagccttctttcgcttttctggtctattgctgggctatgctgttttgcgactgcggcattggtgggtaattgccctcctgagcaagggtgcgtttggctatctgctgcctattgtgtccttcgtgcttgcctggttggagacttggttcctggacttcaaggtgttgccacaggaagctgaggaggagcgatggtatttggccgcacaagtggctgttgccagagggccacttctctttagtggagccctgagcgagggtcagttctacagcccccctgaatcgtttgccggatcggacaacgagagcgatgaagaggtggcgggaaaaaagtcatttagtgcccaggaacgtgaatacatcaggcagggaaaagaggctacggcggtcgtggaccagattttggcccaggaggaaaattggaagtttgagaagaataacgagtatggggacaccgtctacactattgaagtgcccttccatggaaagaccttcattctgaaaacatttctgccatgtccggctgaactggtataccaggaagtcatactccagccggaacgaatggtgttatggaacaaaacagttacagcctgccagattttacagcgggtggaggataacaccctcatctcttacgacgtgagtgctggtgccgcaggaggcgtggttagtcctagggactttgtcaacgtgagaagaattgagcgcaggagggacagatacttgagttccggaatcgctacctcacacagtgctaaaccccctactcataaatatgtgaggggcgagaatggtccaggcggttttattgtgctgaaatcagctagtaacccacgagtgtgcactttcgtctggattctgaataccgatctcaaggggcgtctgcctaggtacctgatccatcagagtcttgccgctactatgtttgagttcgccttccatttgcgacaaagaattagcgagcttggcgctagggcttag

SEQ ID NO: 242500 - DNA, 591 bp, synthetic construct
  misc_feature 1..591: note = Description of Artificial Sequence: Synthetic coding sequence
  source 1..591: mol_type = other DNA
atgagcaaactcccgagagaactgactagagatttagagagatcactccccgctgtagcttccctggggtcctccctctcccatagccagagcttatcctcacatcttttaccccctcccgagaagcgacgcgctatttccgacgtccgcagaaccttctgcctgtttgtgacatttgaccttttgttcattagccttctgtggataatcgaactgaacacaaacacaggtattagaaagaatctggagcaagaaattatacagtacaacttcaagaccagcttcttcgacatttttgttctggcattcttccgcttctcagggcttctcttgggctatgcagttttaaggttgagacactggtgggtgatagccgtgactaccctcgtaagctcagcctttctgatcgtcaaggtcattttgagtgagctgctttctaagggcgctttcggctatctgctccccattgtgtcattcgtccttgcttggttggagacttggtttctcgactttaaggttctaccccaggaagcagaagaggagagatggtacctcgccgcacaggtggcagtagcacggggtcctctttag

SEQ ID NO: 242501 - DNA, 1338 bp, synthetic construct
  misc_feature 1..1338: note = Description of Artificial Sequence: Synthetic coding sequence
  source 1..1338: mol_type = other DNA
atgtctaaactgcccagggagctcacaagagatctcgagcggagtctgcctgccgtcgcctctcttggctcatcgctgtcccactcccagtcactaagttctcatctcctcccaccccctgagaagcgaagagcgatttcagacgtacgtcggactttctgcctgttcgttactttcgatctgctgtttatttcactgctctggattattgagttaaataccaacacaggtatccggaaaaatctggagcaggagatcattcagtacaatttcaaaaccagcttcttcgatattttcgtgctcgcgttttttcggttctccgggttgctgcttggatatgcagtcctgagactgcggcactggtcccgcaggtggtgccccgtgcattctagcttgagcaggtcctcatccttatcttgcagtgcaaaagggcacctggctacctgtagccccagctcccttctctcctcgccgggatggcgcccaggctcgctaacctcgaaatcctatccacggaagctcaaaaggtcagactcagctcctccagggtacttagccgctcaggtcgccgtggctaggggtcctttgctgttcagcggggcactgtcagaaggacagttttactctccccctgagtcattcgctgggagcgacaacgagtcagatgaagaagtggcaggcaaaaagtctttcagtgcacaagagcgtgagtacatccgacagggtaaggaggctactgctgtggttgaccagattctggcccaggaagaaaattggaaattcgaaaaaaacaatgaatacggcgacacagtatacacaattgaagtgcccttccatggtaaaaccttcatactgaagacattcctgccctgcccagccgagttagtctatcaagaagtgatcctgcagccagagcgtatggtgttatggaataagaccgtaacggcctgccagatcctccagcgcgtggaagacaataccttgatctcttacgatgtaagtgcaggggctgccggtggcgtggtgtcaccaagagatttcgttaatgtgcgcagaatcgagcgacgacgagatagatacctttctagtggaatcgctacgtctcactccgcaaaaccacctacacacaaatacgtcagaggggaaaacgggccaggaggctttattgtcctaaagtccgcttccaacccccgagtatgtactttcgtatggatcctgaacacagatttaaaagggaggctccctcgctatctgatacatcagtcacttgcggctacgatgtttgagttcgcctttcatcttcgacagagaatctctgagctgggagcacgagcttag

SEQ ID NO: 242502 - DNA, 618 bp, synthetic construct
  misc_feature 1..618: note = Description of Artificial Sequence: Synthetic coding sequence
  source 1..618: mol_type = other DNA
atggaaggtctgagcgatgtcgcctccttcgccacgaagctgaagaacacgcttattcagtaccacagcattgaggaagacaagtggagagtagccaaaaagacgaaggacgtgacggtctggcggaaaccgtcggaggaatttaacggctacctgtataaagcacagggcgtcattgatgatttggtatatagcattatcgatcacatccgcccagggccatgtagactcgattgggactctcttatgacctccctggacatcctagagaactttgaagagaactgttgtgtcatgagatatacgactgctgggcagctgtggaacatcatcagtccacgggagttcgtggactttagctataccgttggctataaggaggggctgctgtcctgtggtatttcccttgattgggacgaaaagagacccgaatttgtccgtggctataaccacccatgcgggtggttttgtgtgccactcaaagacaatccaaatcaatcattgctgactggatacatccagactgatcttagaggaatgatcccacagagtgcagtcgacaccgctatggccagtactttaactaacttctacggagacctgcgcaaggcactgtag

SEQ ID NO: 242503 - DNA, 576 bp, synthetic construct
  misc_feature 1..576: note = Description of Artificial Sequence: Synthetic coding sequence
  source 1..576: mol_type = other DNA
atggaggggctctcagacgtcgcttcttttgccacaaagcttaagaatacactgatccagtaccattctatcgaggaggacaaatggagagttgcaaagaaaacgaaggatgtgaccgtatggcgaaagccctcagaggaatttaatgggtacctttataaagcccagggcgtgattgatgatctggtctatagcatcattgatcacatcagacccggaccatgcaggctcgattgggattccctgatgacttctctagacattctggaaaactttgaggagaactgctgcgtcatgcgatatacaacggccggacagctgtggaacatcataagcccccgagaattcgtggactttagctatacagtgggatacaaggagggactgctatcttgcggcatttcccttgattgggatgagaagaggccagagtttgtgcgtggatataatcatccttgcggatggttttgcgtgccactcaaggacaatcccaaccagtctcttctcacagggtacatccagacagatctgcgaggaatgattcctcaaagcgcagtcgataccgcaatggcctag

SEQ ID NO: 242504 - DNA, 642 bp, synthetic construct
  misc_feature 1..642: note = Description of Artificial Sequence: Synthetic coding sequence
  source 1..642: mol_type = other DNA
atggaccctgcacttgccgctcagatgtccgaagccgtcgccgagaagatgctgcaataccgtcgggatactgccggatggaaaatctgcagagaagggaatggggtgagtgtctcctggcggccttccgtggaattcccaggaaatctctaccgaggcgaaggcatagtatacggaaccctggaagaagtgtgggactgcgttaagcctgctgtggggggtctgagagtgaagtgggacgagaatgtgactggcttcgagatcattcagtccatcacagacacgctgtgcgtgtcccgaacctccacaccatccgcagcaatgaagctgatctcaccacgggatttcgtggatctagtgttagtcaaaagatacgaggatggcactatatccagcaatgccacacacgtcgaacacccactctgcccccctaagcctggtttcgtccgaggtttcaatcatccttgtggttgtttctgcgagccgctgcccggtgagcccacgaagacaaatcttgtcaccttctttcatacagatctgtccggctacctcccccaaaatgtggtggacagcttttttccacggagcatgactcgcttttatgccaatctacagaaagcagttaaacagttccacgaatag

SEQ ID NO: 242505 - DNA, 663 bp, synthetic construct
  misc_feature 1..663: note = Description of Artificial Sequence: Synthetic coding sequence
  source 1..663: mol_type = other DNA
atggactttaaagctatcgcacagcaaaccgctcaggaggttctgggttacaatcgcgacacctccgggtggaaggtagtgaagacttctaagaaaatcaccgtttcttcgaaggcctccagaaaattccatggaaacttataccgcgtcgaagggatcattccagagtctcctgctaagctcagcgattttctgtaccagacgggagatcgcattacctgggacaaaagcctgcaggtgtacaacatggtgcacagaattgacagtgatacattcatctgtcatacaatcactcagagcttcgcagtgggctcaataagccctagagattttatcgacttagtgtatataaaaagatatgagggtaatatgaacataattagctccaaatcagtggatttccctgagtaccccccatcgagcaactacatccggggttataaccatccctgcggcttcgtgtgttcaccgatggaggaaaacccggcttattccaaactggtgatgttcgtacaaaccgaaatgcgcggtaagctgtctccaagcatcattgaaaagactatgccatccaacttagtgaatttcattctgaatgccaaagatggaatcaaagcccaccgcaccccatctaggaggggcttccatcacaacagccacagttag

SEQ ID NO: 242506 - DNA, 3072 bp, synthetic construct
  misc_feature 1..3072: note = Description of Artificial Sequence: Synthetic coding sequence
  source 1..3072: mol_type = other DNA
atgaccctgaacaattgtgcctctatgaagctcgaggtgcattttcagtccaaacagaacgaggattccgaggaggaggagcaatgcacaattagctcacattgggcctttcagcaggagtcaaagtgctggagtcctatggggagctccgacctgctagcgccacccagcccaggactccccgcaacctcaagctgtgagtccgtgctcaccgagctgtccgccacaagcctacctgtgatcaccgtctcactacccccagaaccagctgatctgccattgccgggaagagctccttcatcatcggatcggcctctattatctcccacccagggacaggagggcccacaagacaaggctaaaaagagacatagaaaccggagcttcctgaagcaccttgaatcactgaggagaaaagaaaagagtggatcccaacaggcagaacccaaacactcacctgctacaagtgagaaggtatcaaaagctagcagtttccgaagttgccggggattcctctccgccggtttctatcgtgccaagaactgggccgctacctccgccggagggtctggggcaaatacacggaaagcatgggaagcatggccagttgcctcattccgtcaccctcagtggacgcaccggggtgattgtctagtgcacgtgcctggagaccataaaccaggcacctttcccagaagcctgtccatcgaatccctgtgccctgaagacgggcaccggctcgccgattggcagccaggaaggagatggggatgtgaaggcagacggggaagctgtgggagtactggttctcacgcctctacctacgacaatcttccagagctgtaccccgcagagccagtgatggtgggcgctgaggctgaggacgaagatgatgaggaatcaggcggatcttatgctcacctcgacgatatcctgcagcatgtgtggggtctccagcaaagggtagaactgtggagcagggccatgtatcccgaccttgggcctggagatgaagaggaggaagaagccactagtagcgtggagatagctactgttgaggtgaagtgccaggcagaggctttatcacagatggaagtgcccgcacatggcgagtctccagcctgggcccaagccgaagtacaaccagctgtgttggcacccgcacaggcccctgctgaagctgagccggtcgcgcaggaagaagcggaggccccagccccagcccctgcacccgctccagctcaggacagcgagcaggaagcccacagtgggggtgagcccacctttgcttctagtctgtctgtggaggaagggcactcaattagtgacaccgttgcttccagcagcgagctggactcatccggcaattctatgaacgaagcagaggccgctggtccattagctggactgcaggcatccatgcctcgggagcgaagagattcaggcgttggggctagcctaactcggccatgtcgtaagctgcggtggcattcatttcaaaacagccataggccatctttgaactccgaatcactggagattaatcgtcagtttgcgggacaaatcaacctgttgcacaaaggatcgctgctccgtctgaccgcctttatggaaaagtatacggtgccccacaagcagggatgggtgtggagcatgcccaaattcatgcggcgtaataaaacccccgactacagaggccagcatgtgttcggtgtcccccctctcatccatgttcagcggactggacagcctctacctcagtccattcagcaggccatgagataccttcggtctcagtgtctggatcaggtaggtattttccgcaagtctggagtgaagagccgcattcagaatctcagacaaatgaatgaaacatctccagataacgtgtgttacgagggacaaagtgcatacgacgtggccgatctgctgaagcagtatttcagagatctgcccgaacccatctttacctccaaactgacgaccacctttctgcagatctatcaattgttacctaaagatcaatggttggcagctgcccaggccgctactctcctgctgccggacgaaaacagggaagtgctgcaaacactgctgtatttcctttccgacatagcatccgcggaggagaaccagatgacagccggtaatctcgcagtctgtctggccccttctatattccatcttaatgtgtccaagaaggatagcccctctccccgaattaagtccaagagatccttgattgggaggccgggtccacgcgatttgagtgacaacatggctgctacccaaggcttgtcgcatatgatatctgattgtaagaagctatttcaggtgcctcaagatatggtgcttcagctctgctcttcctattccgctgctgaattaagtccaccaggtcctgccctggcggagctgcgtcaagctcaggccgctggagtgtctctgtcactatacatggaggagaacatccaggacctattgcgggatgctgccgagcgtttcaaaggttggatgtctgtgccgggaccacaacacacagaactcgcatgtcgaaaggccccagacggccatcctctcaggctttggaaggcttcaaccgaggtggccgcaccccctgcagtggtgctgcatcgggtgttaagagaacgggctctgtgggatgaagatctgttgcgagcccaggtgttggaggccctgatgccaggcgtggagctgtatcattatgtgacagacagtatggcaccgcacccttgcagagattttgtcgtgctccgcatgtggaggtcagatttaccccgtggcggttgtctcctcgtcagtcagagtttggacccagaacagccagtgcctgaaagtggggtgcgggcactaatgctgaccagccaatacctgatggagccttgcggattgggcagaagtagactcacacacatttgtcgggctgacctgaggggccgttcccctgattggtataacaaggttttcggtcacttatgtgctatggaagtggccaagatccgagactcattccctacactacaggctgccggtccagaaacaaaattatag

SEQ ID NO: 242507 - DNA, 3072 bp, synthetic construct
  misc_feature 1..3072: note = Description of Artificial Sequence: Synthetic coding sequence
  source 1..3072: mol_type = other DNA
atgacattaaataactgtgcttccatgaagctagaggtgcattttcaatcgaagcagaacgaagactcagaagaagaggaacaatgtactatctcctcacactgggcttttcaacaagagagtaaatgttggtcgcccatggggtcttctgatttgctggccccacctagcccaggtctgcccgctaccagcagctgtgaatctgtacttacagagttgtccgcgacatctctacctgtcattacagtgagcctgccacctgaaccagcagatctgcctctgcccggaagggctccttctagcagcgatcgacctctactttcaccgacacagggacaagagggtccccaggataaggctaagaagcgccaccggaataggagcttccttaagcatctagaaagtttgaggaggaaggagaagtctggttctcaacaggccgagcccaagcacagccctgctacaagcgagaaggtgagcaaagccagtagctttagaagctgtcggggattcctgtcggccggtttctatcgcgcaaaaaattgggcagccacctcagccggtgggtccggtgccaatacaagaaaggcctgggaggcttggcccgtagcctctttccgccacccccagtggactcaccggggagactgcctcgtgcacgtaccgggagatcataagcctggtacattccccagatccttaagcatcgagtccttgtgtcccgaggatgggcataggctcgccgactggcagcccggacggaggtgggggtgcgaggggaggagagggagctgtggttccacgggctcacatgcaagcacgtacgacaacctgccggagctgtacccagcggaacctgtgatggtcggcgctgaggccgaggatgaggacgatgaagaatccgggggaagctacgcccatcttgacgacatcttgcagcacgtctggggccttcagcagagagtagagctgtggtctcgagccatgtatccagatttgggccctggggacgaagaagaagaggaagctacttcctccgtagagatagcaacagtggaagtaaaatgccaagctgaggccctgagccagatggaggttcctgcccacggtgagtctccagcctgggcacaggcggaggtgcagcctgctgtgctcgcccctgcgcaggccccagcagaggcagagccagtcgcacaggaggaggccgaggctcccgcaccagcccctgctcccgcacccgctcaggattcagaacaggaggcgcatagtgggggagagccaactttcgcctcttctctaagcgtggaagaaggccacagcatctcagacacagttgcatcctcctccgagctggacagtagcggaaactctatgaacgaggcggaggctgccggaccacttgccggactgcaggcctccatgcctagggagagacgggattcgggagttggggcttccttaaccaggccatgtagaaaactgcgctggcacagctttcagaacagtcaccgcccatctctgaacagtgagagcctcgaaattaacaggcagttcgccggacagatcaacttacttcataaagggtctcttcttagactcacggcctttatggagaagtacactgtgccacataagcaggggtgggtgtggtccatgcccaagttcatgaggaggaataaaaccccagattaccgcggacagcatgtgtttggcgtgcctcccctcatccacgtgcagcggaccggccagccactgcctcaatcgatacaacaggcaatgcgatacctgcggagtcagtgtttggatcaggtgggcatttttcgaaaatccggggtgaaaagccggatccaaaacctccgacaaatgaacgagaccagccccgataacgtatgttacgagggacagtctgcctatgatgtggcggacctcctgaagcagtatttcagggacctgccagaaccaattttcaccagcaagctgaccacgactttcctccagatttaccagttacttccaaaagatcagtggttggcagcagcacaggctgccactcttctgctgcccgatgagaacagggaggtcttacaaacacttctttactttttgagtgatatcgcgtcagctgaggaaaatcagatgacagccggtaacctggctgtgtgtctcgccccttccatttttcatcttaacgtttccaaaaaggactcaccaagcccacggattaaaagtaagagaagcctcattggcagacctggacctcgcgatctgtccgataatatggctgcaacgcaggggctctctcacatgatctcagactgtaagaagttatttcaggtgccccaggatatggtccttcagctgtgctcctcctatagcgctgccgagttgagtccacccggacctgccctcgcggaactacgccaggcgcaggcagcaggggtctccttatcattatatatggaggagaatattcaggatcttttacgcgatgcagctgagcgcttcaaaggctggatgtctgtgcctggacctcagcataccgaactggcatgcaggaaagcgcctgatggacatcccctaaggctgtggaaagcctcaaccgaagtcgcagcccctcctgctgtcgttctccatcgcgtgcttcgggaacgagccttgtgggacgaggatcttctgcgcgcacaggtcctcgaggccctaatgccaggagttgaactgtatcactatgtgacagattcgatggcccctcatccatgtcgggactttgtggtgctccggatgtggagatccgacctgcccagaggcggttgtctcctagtatctcaatccctggacccggagcaacccgtgccagaaagtggagtgcgcgcactgatgttgacatcacagtacctcatggaaccttgcggtctgggtcgctctcggctcacccacatctgtcgggcagatttgcggggtaggagcccggactggtacaataaagtatttggccacttgtgcgctatggaggtggccaagatcagagacagctttcctacccttcaggccgctggtcctgagactaaactctag

SEQ ID NO: 242508 - DNA, 3312 bp, synthetic construct
  misc_feature 1..3312: note = Description of Artificial Sequence: Synthetic coding sequence
  source 1..3312: mol_type = other DNA
atgccattgctggacgtgttctggagctgttttagaaaggtgaaatgttttccgctgctccaggtgaaaaagaatgccgaagcagaggcaaagagagcttgtgagtggctgcaggctacaggcttccctcaatatgtgcagcttttcgaagagggaagtttccctttggacatcggcagcgtcaagaagaaccacgggttcctcgatgaggatagcctgggggctctgtgccggaggttaatgaccttgaataactgcgccagtatgaagctggaggttcacttccagagcaaacaaaacgaggacagcgaagaggaggaacagtgtactatatcatcccattgggccttccaacaggagagcaagtgttggtcgcccatgggttcctccgatttattggctccaccttcgccgggacttcctgctacctcaagctgcgagagcgtactgaccgagctgagcgcgaccagtctgcccgtcattaccgtttcgcttcccccagagcccgctgatctccccctcccaggccgtgccccatcttcttccgatcgccctctgctttcccctactcaggggcaagaaggaccacaggataaagccaagaaaagacatagaaatcggagtttcctcaagcatcttgaatccttgcggaggaaggagaaatcgggctctcagcaggccgaacccaagcactctcctgccacaagcgaaaaggtttccaaagcatctagttttagatcatgccggggatttctctccgccggattttatcgcgctaaaaattgggccgcaaccagtgccggtggctccggggctaacactagaaaggcgtgggaggcatggcctgtggcctctttccgacacccacaatggactcataggggcgactgtctcgtgcacgtccctggagaccacaaacctggcacattccccaggagtctgagcattgagagcttatgcccagaagatggtcaccggctcgctgactggcagcccggtagaaggtggggctgcgaagggagacgcggaagttgcggcagtaccggatcacatgccagtacttacgacaacctgcccgagctctatcctgcagagccagtgatggtcggtgccgaggcagaggacgaagacgatgaagagagcggcggaagctacgcccatctcgacgacatcctgcagcacgtgtggggcttgcaacaaagagtggagttgtggagccgagctatgtaccctgacctaggaccgggtgatgaggaagaagaggaggccacatccagcgtagaaatagccacagtagaagtgaagtgtcaggccgaagccttgtcgcagatggaggtgcctgcgcatggggaatcccctgcatgggctcaggccgaagtgcagccagccgtcctggctcccgcacaggcccctgccgaggccgaacccgtagcacaagaagaggcggaagcgccagccccagcccctgcgcctgcaccagcgcaggactccgaacaagaggctcattcagggggagaacccacctttgcttcttccctgagcgtcgaggaggggcacagtatatccgatactgtagcttctagctcagaactcgactcttccggtaacagtatgaatgaagcggaagcagccggtcccctggctgggctgcaagcgtctatgcctagagagcgcagggatagtggcgtaggtgcgagtctgacacgcccttgccgaaagctgcgttggcatagctttcagaattctcaccggccatcgctgaactcggaatctctagaaattaaccgccagttcgctggccagattaatttgctgcataagggttcactcttaaggcttacagcttttatggaaaagtacaccgtgccccataagcagggctgggtgtggagcatgcccaaatttatgaggagaaataaaacacctgattatcggggacaacatgtctttggagtccccccacttattcatgtgcagcgcaccgggcagcctctcccccaaagcatccagcaggctatgaggtacttaagatctcaatgtttagaccaggtgggaatctttaggaagagcggggtaaagtcccgaatccagaatctgagacagatgaatgaaacttcccctgataatgtgtgctatgagggccagtccgcctacgatgttgccgatcttctcaagcagtactttagggacttaccagagcccatcttcacctccaaactcacaaccacgtttcttcaaatctaccagctgttgcctaaggaccagtggttggcagcagcccaggcagcaaccctactgctccccgatgaaaatcgggaagtgctccagacccttctctattttctgtcagatattgccagtgcagaggagaaccagatgactgccggtaacttagctgtgtgtctggcaccttccatcttccacctgaatgtttccaaaaaggactctccctcccctcgtattaaatctaaacgatcactgattggcagacctggcccacgagaccttagcgacaatatggccgcaacacagggtctctcccatatgatctccgattgcaagaaactgttccaggtgccacaggacatggtgctccaactgtgtagctcttattcagcggctgaactttccccccctggacccgcacttgccgaactcaggcaggcccaggctgctggggtgagtctcagcctctacatggaggaaaacatccaagacctactgcgcgacgctgcagagcggtttaaagggtggatgtctgtgcccggtccccagcatactgagctagcttgcagaaaggctcctgatggtcaccccttgagattatggaaagccagcaccgaagtcgccgctccccctgccgtagtactccatagagtcctgcgcgaaagagctttgtgggatgaagacttgctacgtgctcaagtgctggaggccctgatgcctggagtggagctgtaccactacgtaaccgacagcatggcacctcatccatgccgtgacttcgtggttctaagaatgtggcggtctgacctgccgaggggagggtgtctgttggtctcccagtctttggaccccgagcagcctgtaccggagagcggcgtccgcgctctcatgctgacctcccagtacctcatggagccttgtggtctgggacggtctcgcttaacgcatatttgccgggctgacctgcggggtcggtcacctgattggtataataaagtgtttggccatttgtgcgccatggaggttgccaagatacgagactctttcccaactttgcaggccgctggccctgaaaccaaactctag

SEQ ID NO: 242509 - DNA, 159 bp, synthetic construct
  misc_feature 1..159: note = Description of Artificial Sequence: Synthetic coding sequence
  source 1..159: mol_type = other DNA
atgcccttacttgacgtgttctggagctgctttaggaaggtaaagtgctttcccctcttgcaggtgaaaaagaatgccgaggctgaggccaagcgggcatgtgagtggctccaggcgactggctttcctcaatatgtccagctgtttgaaggagggtag

SEQ ID NO: 242510 - DNA, 189 bp, synthetic construct
  misc_feature 1..189: note = Description of Artificial Sequence: Synthetic coding sequence
  source 1..189: mol_type = other DNA
atgaagttcctggtgtttgcttttatcctggccctgatggttagcatgataggggctgattcttcggaggagaagttcttgcgccgaatcggacggttcggatacggatatggcccttatcagccagtgccagaacagccactgtatccgcagccttaccaaccacagtaccagcaatataccttttag

SEQ ID NO: 242511 - DNA, 159 bp, synthetic construct
  misc_feature 1..159: note = Description of Artificial Sequence: Synthetic coding sequence
  source 1..159: mol_type = other DNA
atgaagtttctcgtgttcgcctttattctcgcgcttatggtcagcatgatcggcgcagatagctccgaggaatacggatacgggccttaccagcccgttccggagcaaccattgtacccgcaaccctaccagccccagtaccaacagtataccttttag

SEQ ID NO: 242512 - DNA, 843 bp, synthetic construct
  misc_feature 1..843: note = Description of Artificial Sequence: Synthetic coding sequence
  source 1..843: mol_type = other DNA
atgcgatggtttctgccctggactctggctgcagtcactgctgctgctgcctccacagtcctagcgacagcactgtctcccgctccaacaaccatggactttaccccagcccctctcgaggataccagctcacgccctcagttctgcaagtggccctgtgaatgtcccccttcacctccgcgatgtcctctcggcgtttctcttatcactgacgggtgcgagtgctgtaagatgtgcgcccaacaactgggcgacaattgtacagaagccgctatttgtgatccccatcggggactgtactgtgattactcaggagacagacccagatatgccattggcgtttgtgcccatgcagttggcgaggtcgaagcatggcacagaaactgcatagcatacacttctccctggtctccatgctcgaccagttgcggacttggggtttctacaagaatctccaacgtgaatgctcagtgctggcccgagcaggagtctcgcctgtgtaatctgcgaccctgcgatgtagatattcatacattaataaaggcagggaaaaagtgcctggctgtatatcagccagaggcttctatgaactttacactggcgggttgtatctcaactaggtcctaccagccaaagtactgtggcgtctgcatggacaatcggtgctgtattccctacaagagtaaaaccattgacgtaagcttccagtgtccagacggcctgggcttctcccgacaagttctttggattaatgcatgcttttgtaacctgtcatgtagaaaccccaatgacattttcgctgatctggagagttaccccgatttttccgagatagcgaactag

SEQ ID NO: 242513 - DNA, 507 bp, synthetic construct
  misc_feature 1..507: note = Description of Artificial Sequence: Synthetic coding sequence
  source 1..507: mol_type = other DNA
atggctaaaactgccatggcctacaaagaaaagatgaaagaactgagcatgctctccctgatttgtagttgcttttacccggagccgaggaatataaatatttatacctatgatgatatggaggtgaagcagataaacaagagggcctctggccaggccttcgagctcatcttgaagccaccctctcccaagaagaaggacttaagccttgaagagatccagaaaaaactggaagcggctgaggaaagaaggaagtcccaggaagcacaagtcttaaaacagctagccgagaaacgggaacatgaacgcgaggtgttacagaaggccctcgaggagaataacaatttcagcaagatggccgaggagaaacttatacttaagatggagcaaattaaggagaaccgggaagctaatctggcggctatcatcgaacgcctccaggagaaggagcggcacgcggctgaagttcgcagaaataaggagttgcaggtggagttaagcggctag

SEQ ID NO: 242514 - DNA, 564 bp, synthetic construct
  misc_feature 1..564: note = Description of Artificial Sequence: Synthetic coding sequence
  source 1..564: mol_type = other DNA
atggcgaagaccgccatggcctacaaagagaaaatgaaagaactgagcatgttatccctgatctgttcatgtttttatcccgaacctaggaacattaatatttacacttacgacgacatggaggtaaagcaaattaataagagggcaagcggccaagcctttgaactgatcctgaagcccccttcccctatttctgaggctccgaggacacttgccagccctaaaaaaaaagatttatctctcgaggaaatccagaagaaattagaagccgctgaagagagacggaagagccaagaggcacaagttctcaagcagctggctgagaagagggaacacgaacgcgaggtccttcagaaggctcttgaggaaaataataacttcagcaagatggcagaggaaaagttgattcttaagatggagcagataaaggaaaatagggaagccaatctggctgccatcatagagcgtctccaagagaaattggttaaatttatttctagtgagctgaaagagagcatcgagagccagtttttggagcttcagcgagaaggggagaagcagtag

SEQ ID NO: 242515 - DNA, 543 bp, synthetic construct
  misc_feature 1..543: note = Description of Artificial Sequence: Synthetic coding sequence
  source 1..543: mol_type = other DNA
atggcgtcaacgattagcgcttataaagagaagatgaaggagctctccgtcctctcactgatttgcagctgcttttacacacaaccacatcccaacacagtctaccagtatggggacatggaggtaaagcagcttgacaagagggcttccggtcagagctttgaagttatcctgaaaagccctagtgacctgtcacccgagtcaccaatgctatcaagccctccaaagaaaaaggacacaagcttggaggaacttcagaagcgacttgaggctgctgaagaacgaagaaagacacaggaggcccaagtcctgaagcagctcgccgagaggagggaacacgagcgtgaggtgctacacaaagccctggaggagaataacaatttctcacgacaggctgaagaaaagctgaactacaagatggagctaagcaaggagatccgcgaagctcatctggctgccctcagagaacggctgagagagaaggaattgcatgcggcagaggtcaggcgcaacaaggaacaacgggaagagatgagcgggtag

SEQ ID NO: 242516 - DNA, 510 bp, synthetic construct
  misc_feature 1..510: note = Description of Artificial Sequence: Synthetic coding sequence
  source 1..510: mol_type = other DNA
atgaaagaactctccgtcctgtctttaatatgttcctgtttctatacccagccacaccctaacactgtttaccagtacggggatatggaggttaagcaactagataagcgagcctccggccaatccttcgaagtaattctaaaaagtccgagtgacctgagcccagagtcgcctatgttgagttctccaccaaaaaagaaagatacttctctggaggaactccagaaaagactggaggctgccgaagaacgccgaaagactcaggaggctcaggtccttaaacagttagccgagcgcagggaacatgagagagaggtgctccacaaggccctcgaagagaataacaacttcagccgccaggccgaagagaagctcaattataagatggagctttctaaggagatcagagaagcccacctcgccgcactacgcgagcggctcagagagaaggagctgcatgcggctgaggtccggcgaaacaaggagcagagagaggaaatgtctggttag

SEQ ID NO: 242517 - DNA, 1422 bp, synthetic construct
  misc_feature 1..1422: note = Description of Artificial Sequence: Synthetic coding sequence
  source 1..1422: mol_type = other DNA
atgttctcagtacagctgtctctgggggagcagacatgggagtctgaggggtcatcaatcaagaaagcccagcaggcagtggcaaataaggccctaactgagtccactctacccaagcctgttcaaaaaccaccgaagtccaatgttaataacaaccccggttctatcacgccaacagtggagttaaacggactcgcaatgaagaggggggagcccgcaatctaccgccctctggatccgaaaccctttccaaattatcgggcaaactacaacttccggggaatgtataatcaacgctaccactgtccagtgccaaagattttttacgttcagttaaccgtgggcaataacgaattcttcggcgaaggcaaaactcggcaagccgcacgccataatgcagcaatgaaggccttacaagccttacagaatgagcctatccctgagaggtccccccagaatggcgagagtgggaaggacgtagacgatgacaaggatgcaaacaaaagcgagatttcactggtttttgagattgccctgaaacgaaacatgccagtgagcttcgaagtgataaaggagtctggacccccacacatgaagtcctttgttacacgggtgtccgtcggagagttctccgccgagggagaaggtaatagcaagaagctgagcaagaagcgagcggctacaactgtgctccaggagctcaaaaagcttcccccacttccagtcgtagagaagcctaaattgttttttaaaaaacgccctaaaaccatcgtgaaagctgggccagaatatgggcaaggaatgaaccccatttctaggctcgcccagatccagcaggcgaagaaagagaaggagcccgactacgttttactgagtgagaggggaatgccacgcagaagggagttcgttatgcaggtgaaagtgggaaatgaagtggccaccggaacgggccctaacaagaaaattgccaaaaagaacgccgctgaagctatgctgctccagctgggatataaagcaagtaccaatcttcaagaccaactggaaaagaccggcgagaacaaaggttggagcgggcctaagcctggatttccggaacctaccaataacacccccaaaggcatactgcacctgtcacccgatgtgtatcaggaaatggaagcctcacgccacaaggtcatcagcggaaccacactagggtatctgagtcccaaagacatgaatcaaccatccagtagcttcttttccattagcccaacatccaatagttccgctaccattgccagagaactgctgatgaacggaaccagcagcactgcagaagcaattggtctcaagggttcgtcccccacaccaccttgtagccctgtgcaaccttctaagcaactggagtatttggccagaattcaaggctttcaagtgtag

SEQ ID NO: 242518 - DNA, 1515 bp, synthetic construct
  misc_feature 1..1515: note = Description of Artificial Sequence: Synthetic coding sequence
  source 1..1515: mol_type = other DNA
atgaaaagaggagagccagctatttatcggccactggaccccaagccatttccaaattatagagccaattataacttcaggggtatgtacaatcagagataccattgccctgtaccgaaaattttttacgtccagttaacggtgggtaacaatgagttttttggtgaaggtaaaacacggcaggcggcaagacataatgccgctatgaaagcgctccaggcgttgcaaaatgagccaatccctgagcggtctccccaaaatggggagagtggaaaggacgtagacgacgataaagatgccaataagtccgaaatcagcctagtatttgagatcgccctgaagaggaatatgcctgtctcctttgaagtgatcaaagagagcggaccaccacatatgaaaagctttgtgacaagggtctccgtaggggaattcagcgccgaaggggagggcaacagcaagaaactcagcaagaagcgcgctgctactaccgtgttacaggagctcaaaaagctgccgcctttacccgtagtcgaaaagccgaaactttttttcaaaaagagacctaaaacaatcgtgaaggcaggccctgaatacggacaagggatgaatcccatcagccgattggcccagatccagcaggccaagaaggaaaaggaaccggactacgtgctgctctccgagcgcggtatgcctcggaggagggagtttgtgatgcaggtcaaggttgggaatgaagtggccaccggcaccggacccaataagaagatagcaaaaaagaacgcagctgaggcaatgctcctgcagttgggatacaaagcaagcaccaatcttcaggaccagctggaaaagactggtgaaaacaaaggctggagcgggccaaagcctggatttccagagccgacaaacaacactcccaaagggattcttcatcttagccctgacgtttatcaggagatggaagccagtagacacaaggtcatctccggtactactctgggttacctctctccgaaggatatgaaccaaccatcatcaagcttttttagtatctcgccaacttctaactccagcgccacaattgcacgggagctcttgatgaacgggacatcctccacggcggaggctattggtctgaaagggtccagtccgaccccaccttgttctcccgtgcagccttcaaagcagttggagtatctggcccgtatccaggggttccaggtgcactattgcgacaggcaaagtggtaaagagtgcgtgacctgcctgacattggctccagtccaaatgacattccatgctatcgggtcaagtatcgaagcttcccacgaccaagccgcactatcagcactgaagcagttcagcgagcagggactggatccgatagatggagcgatgaacatcgaaaaaggctcactggagaaacaggcgaaacacctgcgcgagaaggctgataataaccaagcccctccaggaagcattgcacaggactgcaagaagagcaactccgccgtatag

SEQ ID NO: 242519 - DNA, 1197 bp, synthetic construct
  misc_feature 1..1197: note = Description of Artificial Sequence: Synthetic coding sequence
  source 1..1197: mol_type = other DNA
atgaaggctcttcaagctctccagaacgaacccatcccggagaggagcccacaaaacggagagtcaggaaaggatgtcgacgatgataaagacgctaataaaagcgagatctccctagtgttcgaaatcgccctgaagagaaacatgcctgtgtcctttgaggttatcaaagagagtggtccccctcacatgaagagtttcgtgacacgcgttagcgtgggcgaattttccgccgagggggaaggtaactccaaaaaactgtctaagaaacgcgctgctacaaccgtgctccaggaactgaaaaaactgccgccattgcccgttgtggagaaacctaagctgtttttcaagaaaaggccaaaaacgatcgtgaaagccggacctgaatacggtcagggcatgaatcctatcagcagactcgctcagattcagcaggcaaaaaaagagaaagaacctgactatgtgctgctctctgaaaggggaatgccacggagacgcgagttcgtgatgcaagtgaaagttggcaacgaggtagccaccggcaccgggcctaataagaaaattgccaaaaagaacgcagccgaggctatgctccttcagctgggatataaagcatctactaacctccaagatcagctggaaaagactggcgagaataaggggtggtctgggcctaagcccggatttccagagccaaccaataacacgccaaaggggattctccacctatccccagatgtatatcaggagatggaggcttccaggcacaaggtgatatctggaactacactcggatacctgtctcctaaagacatgaaccagcctagtagctctttcttctcaatctcacccacgagcaactccagcgcaaccattgcgcgagagcttctcatgaacggtacatcttccacagccgaggccattggcctgaaagggagtagccctaccccaccctgctctcccgttcagccttcaaagcaattggagtacctggctcggatccagggttttcaggccgctcttagcgccctgaagcagttctcagagcaaggcttagacccaatcgatggcgctatgaacatagaaaagggtagtctggagaagcaagccaaacatctgcgggagaaggccgacaacaatcaggcccctccgggaagtatagcgcaggattgtaagaagagtaactctgcagtttag

SEQ ID NO: 242520 - DNA, 1440 bp, synthetic construct
  misc_feature 1..1440: note = Description of Artificial Sequence: Synthetic coding sequence
  source 1..1440: mol_type = other DNA
atgctccagatcaaccagatgttcagcgtacagctgtctcttggggaacagacatgggagtctgaggggtctagcatcaagaaggctcagcaggccgtggctaacaaggctcttactgagagtactctgcccaaaccggttcaaaaacccccaaagtcaaacgtcaacaataacccagggtcaatcaccccgaccgtagagctcaatgggctcgcaatgaaacgaggggagcctgcaatttacaggcccttagaccctaagccctttccgaattacagagctaattacaacttccgaggaatgtataaccagcgctatcattgtcctgttcccaaaattttttacgtgcagttaaccgtgggtaacaacgaatttttcggcgaggggaagactcgccaggccgcacggcacaatgccgctatgaaagctctgcaggccctgcagaatgagcccatcccagagcgtagcccgcaaaatggggagtccggaaaggatgtggatgacgataaggacgccaacaagtccgaaatcagcctggtgttcgagatcgctttaaaaaggaatatgccagtcagcttcgaagtgatcaaggagagcgggccaccccacatgaagagttttgtaacccgcgtttctgtgggtgagttctcagccgagggagaaggaaatagcaaaaagctgagcaaaaaacgggcagccactaccgtgttgcaggaacttaagaagttgccccctctccctgtggtagagaaaccgaaattattctttaaaaagcggccaaaaacgattgtgaaagcaggcccagagtatgggcagggaatgaaccccattagccgcctggcacagatccagcaggcgaaaaaagaaaaagagcccgactatgtcctattgtctgaacgtggcatgcctcggagaagagaatttgttatgcaagtaaaagtgggtaacgaggtggcgaccggtacaggcccaaataagaaaatcgccaagaaaaacgcagctgaggccatgttattgcagctcggctataaagcctcaaccaatttgcaggatcagttggagaagaccggcgagaacaaggggtggagtggccctaaaccaggattccccgaaccaactaataatacaccaaaggggatactgcacctatcacccgacgtttaccaagaaatggaagcctcgcgccacaaggtgattagcggcaccaccctgggctacctaagtccaaaagacatgaaccagccaagttccagttttttctccatttccccaactagcaattctagcgctacgatcgccagggaactgttgatgaacggcacctcaagtacagcggaagctattgggttgaaaggtagttctccaacacccccttgttcacccgtccagccctccaagcagttagagtacttggccaggattcaagggtttcaggtgtag

SEQ ID NO: 242521 - DNA, 615 bp, synthetic construct
  misc_feature 1..615: note = Description of Artificial Sequence: Synthetic coding sequence
  source 1..615: mol_type = other DNA
atgttacagattaatcagatgtttagcgttcaactgagcctgggcgagcagacttgggaatctgaggggtcctcaatcaaaaaagcccagcaagcagtggccaacaaggcgcttacagagtctacactccctaaacctgtgcaaaagcctccaaagagcaatgtgaacaataatcctggctccataacccctaccgtggagctgaacggtctcgctatgaagcgtggggagcccgctatttacagaccactagatccaaagccattccctaattaccgcgcaaattacaattttcgaggtatgtataatcaacgctaccactgcccggtgcccaaaatcttttacgtccaactgaccgtggggaataatgagttcttcggggaaggaaagacgcgtcaggctgcacgtcacaacgctgccatgaaagccctgcaggctttacaaaacgaacccattccagagcgctctccacagaatggagaatctggaaaagatgtggatgatgataaggacgcaaataaatccgagatctcactggtgtttgagatcgctctgaagcgtaatatgccagtctcttttgaagtgattaaggaatccggtcctccacatatgtag

SEQ ID NO: 242522 - DNA, 195 bp, synthetic construct
  misc_feature 1..195: note = Description of Artificial Sequence: Synthetic coding sequence
  source 1..195: mol_type = other DNA
atgttgcagattaatcagatgttctcagttcagctgtcacttggagaacagacctgggagtcagaaggcagcagtatcaaaaaggctcagcaggccgtggccaacaaggctctcactgagtccactctacccaagcccgtgcagaaaccccctaaatcgaatgtgaataacaacccagggtctattacaccctag

SEQ ID NO: 242523 - DNA, 1440 bp, synthetic construct
  misc_feature 1..1440: note = Description of Artificial Sequence: Synthetic coding sequence
  source 1..1440: mol_type = other DNA
atgttgcaaattaaccagatgttctccgtccagttgtcccttggagagcagacatgggaaagtgagggctcctccatcaaaaaggcccagcaagcggtggcaaacaaagcacttacagagtccacactacctaagcccgtccagaagccacctaagtcgaacgtgaacaataaccccggatccattacccctaccgtcgaactgaacggattagccatgaagcggggagaacccgcaatataccgaccactcgatcccaaaccattccctaactacagagcaaactataatttccgcggtatgtacaaccagcgataccactgccctgttcccaaaattttttatgttcaactgacagtcgggaataacgagttttttggcgagggaaaaacgcgacaggcagccaggcacaatgctgccatgaaggcacttcaggccctgcagaatgagcctatcccagagcgctcgcctcagaatggagaatccggcaaagacgtggacgacgataaggatgccaataagtctgagatcagtctcgtgttcgagatcgcgctgaagaggaatatgcctgtcagctttgaggtgatcaaagagtccgggccaccacatatgaagtccttcgttacaagagtcagcgtaggcgagtttagcgctgagggagaagggaattccaagaagctgagcaaaaagcgtgccgctaccactgtgctccaggaactcaaaaaactgcctccactgccagtggttgaaaagccgaagctgtttttcaaaaaaagaccaaagactatcgtgaaggctggtccagaatacggacagggcatgaaccccatcagccgactagctcaaatccaacaagctaagaaagagaaggagccagactacgtgttactttcggagaggggcatgccacgtagacgggagtttgtgatgcaagtgaaagtcggaaacgaggtggccaccggtaccggtccaaataaaaaaattgctaaaaaaaatgcagcagaggccatgctcctccaattaggatataaagcatccaccaatctgcaggaccaactcgagaaaactggcgagaataaaggctggtccgggccaaagccaggatttcccgagcccacaaacaacactccaaaaggaatccttcaccttagtcctgacgtatatcaagagatggaagcttccaggcataaagttatttctggcacaactttgggttatctgagtcccaaagacatgaatcagccttcctcgagtttcttttctattagtccaacttccaattcaagtgcgacaatcgccagagaattgctcatgaacggtaccagcagcactgctgaggctattggcttaaaaggcagttctccaacccctccgtgcagccccgtgcagccgagcaaacagttggaatacctagctcggattcagggatttcaggtatag

SEQ ID NO: 242524 - DNA, 1617 bp, synthetic construct
  misc_feature 1..1617: note = Description of Artificial Sequence: Synthetic coding sequence
  source 1..1617: mol_type = other DNA
atgctgcagatcaaccaaatgttttcagtgcagctgtcactcggagagcagacttgggagagtgaagggtcatctatcaaaaaggcccagcaagccgtggcaaataaggccctcacagagagcacattgcctaagccagtgcagaagccccctaaaagcaatgtgaacaataaccccggaagcatcacacccacggtcgagcttaatgggctcgccatgaaaaggggcgagcccgcaatctaccgacccctggaccccaagccctttcctaactatagagccaattacaacttccgcggaatgtacaatcagcgctaccattgtcctgttccgaaaatcttttacgttcagttgactgtcgggaataacgagttcttcggagagggtaaaacacgtcaggcagctcgtcacaatgcggcaatgaaagccttacaggcccttcagaatgagccaattccagaacgctctccacaaaacggagagagtggcaaagatgtcgacgacgataaggatgcaaataaatcggaaatctctctagtgtttgaaatcgccttgaagcggaatatgcctgtttcattcgaagtgattaaggagagtgggccaccccacatgaaatcatttgttaccagggtgagtgttggggaatttagtgccgagggagagggaaattccaagaagctctctaagaagagagccgctaccacggtgctgcaggaacttaaaaagctgccccctcttccagttgtggaaaagcctaaacttttcttcaagaaaagaccaaagacgattgtaaaagcaggccctgagtacggccagggtatgaaccccatatctaggctggcccagatccagcaggctaagaaagaaaaggaacccgactatgtcctgttatccgagcggggtatgccccgaaggagagagttcgtcatgcaagttaaggtgggcaatgaagtcgcgaccggaaccggccctaacaaaaagatagccaagaagaacgccgctgaggcgatgctgttgcagctcgggtacaaagccagcactaatctgcaggatcagctggagaaaaccggcgagaacaaaggctggagcggtcccaagcctggatttcccgaacccactaacaacaccccgaagggtatcctgcacctctcacctgacgtttatcaagagatggaagcctcccgtcacaaagtaatttctggaactaccttaggttatctgagcccaaaagatatgaaccagccatcgtcctcctttttcagcatctccccgacctccaacagcagtgccaccattgccagagagctcctgatgaacggtacaagcagcacagccgaagccatcggactaaagggctcatcacccactcctccgtgttcccccgttcaaccttctaaacagttggagtatctcgcacgaatccagggcttccaagccgctctcagcgccctgaaacagttctcagagcagggacttgaccctatagacggggcaatgaacattgagaagggaagccttgagaaacaggccaagcatctgcgcgaaaaagctgacaacaatcaggccccacctggctctatcgcccaggattgtaagaaaagtaattccgctgtgtag

SEQ ID NO: 242525 - DNA, 318 bp, synthetic construct
  misc_feature 1..318: note = Description of Artificial Sequence: Synthetic coding sequence
  source 1..318: mol_type = other DNA
atgcttcaaataaatcagatgtttagtgtccagctttcactcggcgaacagacctgggagagtgagggatctagcattaagaaggcccaacaggccgtcgctaataaggctctgactgaaagcacattgcccaagcccgttcaaaagcctccaaaaagcaacgtgaataacaatccaggaagcatcacccctaccgtggaactgaacggactggccatgaagagaggggagcctgcaatttaccgcccactagatcccaagccctttcccaattaccgggctaactacaatttccggggaatgtacaaccagagatag

SEQ ID NO: 242526 - DNA, 1713 bp, synthetic construct
  misc_feature 1..1713: note = Description of Artificial Sequence: Synthetic coding sequence
  source 1..1713: mol_type = other DNA
atggccaatcccaaggagaagacagccatgtgcctggtcaatgagctagcacggttcaacagagtgcagcctcagtacaaattgctgaacgagcgcggtcccgcacacagcaaaatgttctctgtgcaacttagccttggcgaacagacttgggagtctgaggggtcctcaattaagaaagctcaacaggccgttgcaaacaaagcactgacggaaagcacacttcccaaacccgtgcaaaaaccgcctaagtctaacgtcaataataatcctggctctattactcctaccgtcgagctgaacggattggccatgaagcgcggtgaacctgccatctacagaccgttggaccccaaaccctttcccaactaccgggcaaattacaattttagaggtatgtacaaccaacgctatcactgccccgtaccaaagattttttatgtgcagctcacagtcggaaacaacgaatttttcggtgaaggtaagacaaggcaggcagctagacataacgcagctatgaaggcgctccaggcactgcagaacgaacctattcctgaaaggagcccacagaatggcgagagcgggaaagacgtcgatgatgataaggacgcaaacaagtcggaaatcagtctggtgttcgaaatcgccctcaagaggaatatgccagtctcattcgaggtaattaaggagtctggccctcctcacatgaagagctttgtcactcgtgttagtgtcggagagttctctgcagagggggaaggcaactccaagaagttgtccaagaaacgtgctgctacgaccgtgctgcaggagctgaagaagttgcctcctctacccgtggtggagaagcccaagctgtttttcaagaagcggcctaaaactatcgtgaaggccggacccgagtacggccagggtatgaatcccattagccggctggctcagatacagcaggctaagaaggaaaaagaacctgattacgttctgctgagtgagagagggatgccccgacggagagaattcgtaatgcaggtaaaagtcggcaatgaggttgccacagggacaggtccaaacaagaagatcgccaagaaaaacgccgctgaggccatgctgctgcagcttggatataaggcgtccaccaacctgcaagatcagcttgagaagacaggagagaacaaggggtggagcggcccaaaacctggcttccctgaaccaaccaataataccccaaagggaatcctacatctgtcacccgatgtttatcaggagatggaagcttcgcggcacaaagtgatttccggtacaaccctgggctacttgtctcccaaagacatgaaccagcccagctcctcattcttctctatctcacctactagtaattccagcgctaccatagcaagagaactcttaatgaacggaacaagcagtacggcagaagccattggtcttaaaggttctagtccgacgccaccatgcagccctgtccaacctagcaaacagctggagtacttggccaggatccagggcttccaggccgctctctcggccctgaaacaattcagcgaacagggacttgaccctatcgatggcgcaatgaatattgaaaagggaagtctggagaaacaggctaagcatttacgagaaaaggcggataataatcaggcccctcctggaagtatagcacaggactgcaagaagagtaactcagcggtttag

SEQ ID NO: 242527 - DNA, 1044 bp, synthetic construct
  misc_feature 1..1044: note = Description of Artificial Sequence: Synthetic coding sequence
  source 1..1044: mol_type = other DNA
agcctcctgaccaatgacgcttcttctgaatctatcgcctccttctcaaagcaagaggtcatgtcgtccttccttcctgagggaggttgttacgaactcctgaccgtgattggcaagggcttcgaggacctcatgaccgtaaatctggcacggtataaacccactggagaatatgttactgtccgcagaatcaacctggaggcttgttctaacgaaatggtgactttcttgcagggcgagctccacgtctccaagctcttcaatcatcccaacattgtgccctatagagctacgttcatcgctgataatgagttatgggttgtgacctccttcatggcctacggaagcgccaaggacctgatctgcacacattttatggacgggatgaacgaactcgctatcgcatatatccttcagggcgtgttaaaggcactggattatattcatcatatgggctatgtgcatcggtctgtgaaagcttcacacatcctgatcagcgtggatgggaaagtgtacttatctggcttgcgctcaaacctctccatgattagccacggacaacgccagcgtgtggtccatgatttcccgaaatacagcgtcaaggtgctgccctggctcagccctgaagtgctgcagcagaacctccagggttatgacgcaaaatccgatatttactctgtcggtatcacggcctgtgaactggcaaatggtcacgtcccgtttaaggacatgcctgctacacaaatgctgctggaaaagctgaatggcaccgtcccctgcctgctcgacacgtctactattccagccgaggagttgactatgagcccttcccgctccgtagcgaacagtggcctaagcgacagtctgacaactagtaccccaagaccttctaatggagactctccgagccatccctaccataggaccttcagtcctcacttccatcatttcgtggaacagtgcttgcagcggaatcccgatgctcgctatccttgctggcccggtcctggtctgagggaatcacgtggctgtagtggaggttag

SEQ ID NO: 242528 - DNA, 1296 bp, synthetic construct
  misc_feature 1..1296: note = Description of Artificial Sequence: Synthetic coding sequence
  source 1..1296: mol_type = other DNA
atgtcattcctcgtgtcgaagcctgaacgcatccggaggtgggtgtcggagaaattcatcgtggagggcttgagggatcttgaactgtttggggagcaaccaccgggagacacacgcaggaaaaccaatgacgcgtcatccgagtctatcgctagtttctctaaacaggaggtcatgagcagctttcttcctgaaggaggatgctacgaactgctgaccgtgattggtaaagggttcgaggatttgatgacagtcaacctggctaggtataaacccaccggggagtacgtgacagttcgtcgcatcaacctggaggcttgtagtaacgaaatggttaccttcctgcaaggagagctacacgtcagcaaattgtttaaccatcccaatattgtaccctaccgggcaacattcattgcggacaacgaattgtgggttgtcaccagttttatggcatacggttctgccaaggaccttatctgtacacatttcatggacgggatgaatgaactcgcgattgcctatattctgcagggtgtgcttaaggccctagattatatccaccacatgggatatgtgcacaggagtgtcaaggcatcccacatcttgatctccgttgacggcaaagtttatctgtccgggctcaggagcaatctctccatgatctcccatggccagcgccagcgagtggttcacgactttccaaaatatagcgtgaaagtactcccatggctgtcccccgaggtcttacagcagaacttgcagggctatgacgctaagagtgatatctacagtgttggaataactgcttgcgaactggctaatggtcatgtgccatttaaagatatgcctgccacacagatgctcctcgagaagttgaatggaaccgtcccatgtctgctggatacttcaactatccccgcagaggaattaaccatgagtccctcccgatctgtcgcgaattctggcctttccgactccctgactacgtccactccaaggccgagcaacggtgattcccctagccacccttaccacagaacgttttcaccacacttccatcatttcgtggagcagtgcctgcagcggaatcccgatgcgcgtccaagcgctagcactcttttaaaccacagcttctttaagcaaataaagcggagagccagtgaggctttgcctgaactgctgcggccagtcactccaataacaaacttcgaagggagccagagtcaggaccactctggtatcttcggcctcgtgacaaacctcgaagaacttgaagtggacgactgggagttctag

SEQ ID NO: 242529 - DNA, 1122 bp, synthetic construct
  misc_feature 1..1122: note = Description of Artificial Sequence: Synthetic coding sequence
  source 1..1122: mol_type = other DNA
atgagcagctttctgccagaggggggatgttacgagctccttaccgtgatcgggaaaggttttgaggatctaatgactgtgaatcttgcaaggtacaaacctacgggcgagtacgtgacagtccggaggataaacctcgaagcttgctcaaacgagatggtgacgtttctgcagggcgagctgcacgtttccaaattgtttaaccaccctaacattgttccttaccgggcaaccttcattgccgacaacgaactttgggtagtgacctcatttatggcatacggctccgctaaagaccttatctgcacccacttcatggatggaatgaatgaactggcgatcgcctacatcctgcagggcgtgctcaaggccctagattacatacatcatatgggatacgttcatcgttctgtgaaagctagccacattcttatctccgttgatggcaaggtgtacttgtcgggtctccgatccaatctaagtatgatctctcatggacagcggcagagagtagtacatgacttccctaaatattcagtgaaagtactgccttggctcagccccgaggttctgcagcagaatctgcagggctatgatgccaagtccgatatttattctgtgggcattactgcctgcgagctcgccaacggtcacgtgccatttaaagatatgccggcaacccaaatgttgctcgagaagttgaacgggaccgtaccgtgcctcctggatacttcgacaatacccgctgaggaattgacaatgtccccaagcaggtcggttgctaattccggactgtccgactcattaacgacgtctacccccagaccaagcaacggagatagtccctcccacccgtatcatagaactttcagtccacacttccaccatttcgtcgagcaatgcctccagcgtaaccctgacgccaggcctagtgcatctactctgctgaatcactcattctttaagcagattaagaggcgggcatccgaggcactgcccgagctcctgaggcctgtcacgcctatcactaacttcgaggggtcccagagccaggaccacagcgggatttttggcctggtgaccaacctcgaggaactcgaagtggacgactgggagttttag

SEQ ID NO: 242530 - DNA, 1047 bp, synthetic construct
  misc_feature 1..1047: note = Description of Artificial Sequence: Synthetic coding sequence
  source 1..1047: mol_type = other DNA
atgagcttcctaacaaacgacgcctcgtctgagagcatagcatccttcagcaagcaggaagttatgtcatcttttctcccggagggcggatgctacgagctgctgacagtgatcggaaaggggttcgaggatctgatgactgtgaatttagcgagatataaaccaaccggggaatatgtgactgtgcgtcgcataaatttagaggcgtgctccaatgaaatggtgacctttcttcagggggagctgcacgtctcaaagctgttcaatcatccaaatattgtgccctatcgcgctaccttcatcgctgacaacgaactctgggttgttaccagctttatggcctatggaagcgccaaagacctaatttgtactcacttcatggacggaatgaacgagctcgctatagcctacatcctccagggtgtactgaaggctttagattatatacaccatatggggtatgtccatcgctccgtaaaagcctcccacattctcatttccgtggacggaaaggtgtacctctcaggcctgcgttctaatctctccatgatctctcatgggcaacgacagcgggtcgtgcacgattttccaaaatattctgtcaaggtgttaccttggttgtctccagaggtgttacagcaaaatctgcaagggtacgatgcaaagtctgatatttactcagtaggaattactgcatgtgagctcgccaacggacacgttccattcaaggatatgcctgctacacagatgctgctggagaagctgaatgggaccgttccatgtctgctcgacactagcactatccctgccgaggaactgaccatgtctccctcccgctcagtggccaacagcggcctgtccgactctttaaccacctccaccccgcgaccaagcaatggggattccccaagtcatccataccaccggacattcagccctcatttccatcacttcgtggagcagtgcttgcagcgcaaccctgacgcacgctatccatgctggccaggccctgggctccgcgagtcccgcggatgttcaggtggctag

SEQ ID NO: 242531 - DNA, 900 bp, synthetic construct
  misc_feature 1..900: note = Description of Artificial Sequence: Synthetic coding sequence
  source 1..900: mol_type = other DNA
atgagcttcctggtgtccaaaccagaaaggataaggcggtgggtctccgaaaaattcatcgttgaggggctgcgcgacctcgagcttttcggaggaaagggcttcgaggacctgatgacagtcaacctggctcgctacaagccaacaggagaatacgttacagttagaagaatcaacctcgaagcctgttctaatgagatggttacctttctgcaaggagaactgcatgtctcaaaactgtttaaccaccctaacatcgtgccatatagagcaacctttattgccgacaatgagttgtgggtggtgacttccttcatggcttacggatctgcaaaagatctgatatgtacacactttatggatggtatgaatgagctcgcaatcgcctacatcctccagggagtgttaaaggccctcgattatatccaccacatgggctacgtgcaccgttcggtaaaagcctcacacatactgatcagcgtggatgggaaggtgtatctgagcggcttgcggtcaaacctctctatgatcagtcacggacagcgtcagagagttgtgcatgacttcccaaaatattccgtgaaggtactgccctggctctcacctgaagttctgcaacagaatctccagggatacgacgcaaaatctgacatctattcagtcggtatcacagcctgtgagctcgccaacggtcacgtgccattcaaagacatgccggcaacccaaatgctgctagaaaagctcaatggcaccgtaccatgcctgttggatacttctactattcctgccgaagaactgacgatgagtcctagtagaagtgtcgctaactcaggactgagcgactcactaactacttctacacccaggccaagcaacggacctgttccggcacccagctag

SEQ ID NO: 242532 - DNA, 1257 bp, synthetic construct
  misc_feature 1..1257: note = Description of Artificial Sequence: Synthetic coding sequence
  source 1..1257: mol_type = other DNA
atgagtctgcttgattgtttttgcacttcccgcacgcaggtggagtcattgagaccggaaaaacagtctgagactagtatccatcagtatttggttgacgaacctactttgtcatggtcgcgcccaagcaccagagcctctgaggtgctgtgtagcactaacgtttcacattatgagcttcaggtggaaatcgggaggggcttcgataacctcacaagtgtgcacttggccagacacacccctactggcaccctggtgacaatcaaaatcaccaacctggaaaactgcaatgaagagagattgaaggcacttcaaaaggctgttattctcagccacttcttccggcatccaaatatcaccacgtactggaccgttttcacagtgggctcctggctttgggttataagcccgttcatggcttatggctcagcgtcccagcttttaaggacctactttccagagggaatgagcgaaactctgatccggaatatccttttcggcgctgtgcgaggactaaattatcttcaccagaatggatgcattcacagatcaatcaaagccagccatattttgatctctggggatggacttgtcacattatccggcctcagccacctgcacagtttagttaagcacggccagcgccaccgggctgtatacgacttcccccagtttagcacgtctgtgcaaccatggctgtcacccgagcttttgcgtcaggaccttcacgggtataatgtcaagtcagatatttacagcgttggcattaccgcgtgtgagctggcctccggccaagttccattccaggacatgcatcggacacagatgctcctgcagaagctgaaagggccaccctatagcccattggacatttctatcttccctcagtccgagtctaggatgaagaatagccagagcggagtggactccgggatcggggaaagtgttctggtgtcctcgggaacccacacggtgaatagcgataggctccatactccttctagcaagacattctcgcccgctttcttctctttagtacagctctgcctgcagcaggaccccgagaagagaccatccgcttccagcctgcttagccatgtgttctttaaacaaatgaaagaggagtcccaagattctattctgtcgctgttgccccctgcttataataagcctagcatctcacttccccctgtgctcccatggacagaacccgagtgcgattttcctgatgagaaagatagttactgggagttttag

SEQ ID NO: 242533 - DNA, 1134 bp, synthetic construct
  misc_feature 1..1134: note = Description of Artificial Sequence: Synthetic coding sequence
  source 1..1134: mol_type = other DNA
atgagtctcttggattgcttctgtacatctaggacccaagtggaatctctcagacccgaaaaacagtctgagaccagtatacaccaatatctggtcgacgagcctacgctgagctggtctcgcccttcaacacgtgcttctgaagttttgtgctctacgaacgtgtcacattatgaattacaggtggagattggcagaggcttcgacaacctgactagcgtgcatctggcaaggcatacccccacgggcacattggtcaccattaagattacaaatctggagaattgtaacgaggagagacttaaagcactccagaaggccgtgattttgtcccattttttcaggcaccctaacataactacgtattggaccgtttttaccgtcgggagctggttgtgggtcatctctccctttatggcttacgggtcggcttctcagctcctccggacatacttccccgaaggaatgagcgagacgctcattcgtaatatcttgtttggagccgtccggggactcaactacctgcaccagaacgggtgtatccatcgctctatcaaagccagtcacatccttataagcggggacggactggtgactctttcaggtctttctcacctgcattctctcgtaaagcacggccagagacacagggctgtctacgactttcctcagttttcaacctccgtgcagccttggcttagtccagagctgctgagacaagacctccacgggtacaacgtgaagtcagatatttacagcgtgggaatcactgcatgcgagctggcctcaggccaggttccttttcaagatatgcaccgaacccagatgttactgcagaagcttaaaggccctccttactcgcccctcgacatctcgatattcccacaatctgagagtcggatgaaaaactcgcagagtggcgtagatagcggcattggtgaatcagtgctggtgagttcgggaactcacactgttaattccgaccgcttgcacacgcctagcagcaagacattctcccctgcattctttagcctggtgcagctatgcctgcagcaggatccagaaaaacgcccatcagcgtcctcactgctgtcccatgtgtttttcaaacaaccatatttcgagtttctctag

SEQ ID NO: 242534 - DNA, 843 bp, synthetic construct
  misc_feature 1..843: note = Description of Artificial Sequence: Synthetic coding sequence
  source 1..843: mol_type = other DNA
ctcggatattgttccgcatcccaactcctccgcacctatttccctgaagggatgtctgaaacactgattcggaacatcttgttcggcgcagtcagggggcttaattacctccatcagaatggttgtattcaccgctccataaaggccagccatattttaataagcggagacgggttagtcactctttctggcctctctcaccttcatagcctggtaaagcacggccaacgtcacagagccgtctacgacttcccgcagttctctacatccgtccagccctggctgtctcctgagctccttaggcaggacctccacgggtacaatgtaaaaagcgacatctacagcgtaggaatcaccgcttgtgaattagcatcaggccaggtgccattccaggacatgcataggacccagatgcttctgcagaaactcaaaggccctccgtactctccgttggacatatcaattttccctcagtccgaaagtaggatgaagaactcccagagtggggtggatagcggaatcggggagtctgtattggtgagctccgggacacacaccgtcaactcagaccggctgcacacaccatcatctaaaacgtttagccctgcctttttttcactggtacagctttgtctgcaacaagatcccgaaaaacggccttccgcttctagcttgctgagccacgtgttcttcaagcagatgaaagaagaatcccaagattctatattgagtctattgcctcccgcttacaataaaccatctatctcgctgccccctgtactgccgtggaccgaacccgaatgcgacttccccgacgagaaggacagctactgggaattttag

SEQ ID NO: 242535 - DNA, 1257 bp, synthetic construct
  misc_feature 1..1257: note = Description of Artificial Sequence: Synthetic coding sequence
  source 1..1257: mol_type = other DNA
atgagcctgctggattgcttttgcaccagccgtacccaagtggaaagcctccggcctgagaaacagagtgaaaccagtatccatcagtatctcgttgatgagccaaccttgagctggagtcggccaagtacgcgtgcatccgaggtcctgtgttctacaaacgtgtctcattatgagctgcaggttgagatcggaagaggttttgacaatctgacaagcgtccacctcgccaggcacactcccacaggcactctcgtgactatcaagatcaccaatctcgagaattgtaatgaggaacggctcaaagcactccagaaggccgtcatcttgtctcatttctttagacacccaaatatcaccacatattggaccgtgttcaccgtggggagctggctgtgggtgatcagtccttttatggcctatggttcggcaagtcagcttcttagaacgtacttccccgaaggcatgtcagaaacactaattaggaatattttattcggggcagtgagggggctcaattacctgcaccaaaacgggtgtattcatcggtctatcaaggcaagccatatcttaatatctggcgacggattagtgacactctccggcttaagccatttgcacagtctggtaaagcatggccaaagacaccgcgctgtttatgactttcctcagtttagtactagtgtgcagccttggttatccccagagctgctgcgccaggatctccacggctataacgtaaagagtgacatatatagcgttggaattacggcctgtgagctggcgtccgggcaagtgccgttccaggatatgcatcggacccagatgctgctccagaagttaaaaggcccaccatacagccctctcgacatcagcatattcccacaaagcgagtcaaggatgaaaaatagccagtccggcgtggacagtggcatcggagagtcagtgctggtgagctcaggaactcacactgtcaacagcgacaggctgcatacgcccagtagtaaaaccttcagccctgcattcttctccttggtgcaactctgcttgcaacaagaccctgagaaaagaccttctgctagttctctgctctctcacgtgttcttcaagcaaatgaaggaagaatctcaggactccattcttagcctccttccccctgcctataacaagcctagcatctctctccctccggtgctgccatggacagagcctgagtgtgactttcctgacgagaaagacagctactgggaattttag

SEQ ID NO: 242536 - DNA, 1260 bp, synthetic construct
  misc_feature 1..1260: note = Description of Artificial Sequence: Synthetic coding sequence
  source 1..1260: mol_type = other DNA
atggaatcgatatctatgatggggtccccgaaaagtctgagtgaaacatttttgcccaatggtattaacggaatcaaggacgctcgcaaagtcactgtcggagtgatcggctccggagacttcgccaagtctctcacaatacggctgattaggtgcgggtaccatgtcgtgatcggaagccgcaatcccaagttcgcgtccgagttctttccacacgtagttgacgttacccaccatgaggatgcacttacaaagactaacatcatctttgtggccatacacagggaacactatacctcactgtgggatctccgccatctacttgtgggcaagattctaatcgatgtgtcgaataatatgcggattaaccagtatcctgagagcaacgcagaatacctggcctccctgtttcccgacagtcttatagtgaaaggcttcaacgtggtgagcgcatgggcactccagctcggacctaaggacgcctctcgacaggtgtatatctgttcgaataacatccaggccaggcagcaggtaattgaactggcacgccagcttaattttattccaatagatttgggctccctgagtagtgccagagaaatcgaaaatctgccactgagattattcaccctttggaggggccctgtggtggtcgcgatcagtctggccactttctttttcttatacagtttcgtgagggatgtcatacacccatacgctaggaaccagcagtccgacttctacaagatccctatagagattgtcaacaaaacccttcctattgtggccattacccttctctctcttgtatatctggctggccttttggccgcagcttaccagttatactacggaaccaaatacagaaggttccctccctggcttgaaacctggttgcaatgtcggaagcagctcggtctactgtcatttttctttgccatggtccatgtggcctactctctgtgcctgccgatgcgtcggtctgagaggtaccttttcttgaacatggcctaccagcaggtgcacgccaatattgagaactcctggaacgaggaagaagtatggagaatcgaaatgtatatttccttcggcattatgagtcttggcctgctgagtctgctcgctgtgaccagtatccccagcgtttctaacgcgctaaactggcgcgagttttcatttatccaaattttttgttcatttgctgatacccagacagagctggagctggagtttgtctttcttttaacactgctcctctag

SEQ ID NO: 242537 - DNA, 1473 bp, synthetic construct
  misc_feature 1..1473: note = Description of Artificial Sequence: Synthetic coding sequence
  source 1..1473: mol_type = other DNA
atggaaagcatcagcatgatgggatcccctaagtccctttccgaaactttcctgccaaatggaatcaatgggatcaaggatgccagaaaggtgaccgtcggagtcatcggatctggagatttcgcaaaaagcctcactatcagattgatccgctgtggataccatgtcgtcataggcagtcggaaccctaagttcgcctccgagttttttccccacgttgtggatgtgactcaccatgaggacgcacttacaaaaacaaatattatcttcgtggctatccacagagaacattacacttccttgtgggacctgcggcacctgctcgtgggtaaaattctcatcgatgtgtcaaataatatgcgcatcaaccagtacccagaatccaatgcggaatacttagcctctctttttcctgactccctgattgttaaggggtttaacgtggtttcagcctgggcactgcaactgggaccgaaggacgcgtcacgacaagtgtatatctgcagtaacaatatccaggccaggcagcaggtgattgagctggcaagacagctaaatttcattccaatcgatctaggaagccttagctccgccagagagattgaaaatctccctcttagactgtttaccctttggcgaggcccagtcgtcgtggccatctcgcttgcgacgttcttttttctctactcgttcgtgagggacgtaattcatccatacgctagaaaccagcagagcgacttttataagatcccaatcgagatcgtgaataaaaccttgcccattgtagctatcacgctcctgtcgcttgtctatctggccggactgttagcggcagcttatcagctttactatgggacgaaatataggcgttttccaccatggttggagacatggctgcagtgccggaagcaattgggcttgctgtcgtttttttttgcaatggtacacgtagcctactctctctgtttacctatgcgcaggagtgagcgctacctgttcctgaatatggcttaccaacaagtgcacgccaatattgagaactcctggaatgaggaagaggtatggaggatcgagatgtatatctcgtttgggatcatgtctcttgggctgctgagcttgctggctgttacaagtatccccagcgtcagcaatgctctgaattggcgggagttctcattcatccagagcacactcggttatgtggcactcctgatatcgacatttcatgtgcttatctacggctggaagagagcgttcgaggaggagtactaccggttctatacacctcccaatttcgtgctagcattggtgctgcccagcattgtcatcctcggtaagatcattctctttctgccttgcatcagccggaagctcaagcgcattaaaaagggctgggagaagtcacagttcctggaagagggcatgggcggtactatcccacatgtcagtccagaacgggtgacagttatgtag

SEQ ID NO: 242538 - DNA, 1473 bp, synthetic construct
  misc_feature 1..1473: note = Description of Artificial Sequence: Synthetic coding sequence
  source 1..1473: mol_type = other DNA
atggaaagtatttccatgatgggctcacccaaatccctatctgagacatttctgcctaacggcattaatgggattaaagatgcccgaaaggttaccgtaggagtcattgggagtggtgacttcgccaaatctctgacgatccggttgatccggtgtgggtaccacgttgttattggttccagaaatccaaagttcgctagcgagttttttcctcatgtggtcgatgtcacacaccatgaggacgctctgacaaaaaccaacatcattttcgtcgccatccaccgcgagcattacacctccctgtgggacttgcgacacctcttggtcggtaaaatccttattgacgtgtcgaataacatgcgcattaatcagtatcccgagagcaatgccgagtacctggcctccctgttccctgacagcctgatcgtcaagggcttcaatgttgtgagtgcttgggcactacagctgggcccaaaagacgcctccaggcaggtttacatctgttcaaataatatccaggcgaggcagcaggtcattgaactggccagacaactgaacttcatccccattgatctggggagcctctccagcgctcgcgagatcgagaatctgcccctgcgattattcactctgtggcgaggtcccgtcgtggtggccatttcactcgccacgttcttcttcctctattccttcgtgagggacgttattcacccatatgccaggaatcagcagtcagacttctacaaaatcccaatcgaaatcgttaataagaccctacccatagttgcgatcactttgctgtcactagtctacctggcagggcttctggctgcagcttatcagttgtattatgggaccaaataccgccgttttccaccatggctggaaacctggttgcagtgtagaaagcagctaggtttgctgagcttcttttttgcgatggtccacgtcgcctacagcctctgtctccctatgcggagaagtgagcgttatctgttcctcaacatggcataccagcaagtccacgccaacattgaaaacagctggaatgaggaagaagtgtggaggattgaaatgtacataagcttcggaatcatgtctctgggacttcttagcctgttggccgtgacttcaattccctccgtgtccaatgctctgaattggcgcgagttcagctttatccagagcacccttgggtacgtcgctcttcttatttctacttttcacgttctgatctatgggtggaaacgcgcatttgaggaggagtattaccgcttctatacccccccaaattttgttctcgccctggtgctaccctccatcgttatcctgggtaaaatcattctttttctgccgtgtatctccaggaaactgaagcgcataaagaagggatgggaaaaatcacagtttctggaagaggggatgggaggcactattcctcacgtgtcgcccgaaagagtcaccgtgatgtag

SEQ ID NO: 242539 - DNA, 1473 bp, synthetic construct
  misc_feature 1..1473: note = Description of Artificial Sequence: Synthetic coding sequence
  source 1..1473: mol_type = other DNA
atggagtccattagcatgatgggtagccctaaaagcctctctgaaaccttcctaccaaatggaatcaatggcattaaggatgcgagaaaagttacggtgggcgtaattgggtccggagacttcgccaaaagcctgaccatacggctcattcggtgcggctaccacgttgtcattggctcgcgcaaccccaagtttgcctccgagttctttccacatgtggtggacgttacacaccacgaagacgcccttaccaagacgaatatcatcttcgtggcaatccacagagaacactacacctccctgtgggacctccgacaccttttggtcggtaaaattctcattgatgtgtcgaataacatgaggattaatcaatacccagaatctaacgcggaataccttgccagcctgtttccggacagtctgattgtgaaaggctttaatgtggtctccgcatgggctctgcagctagggccaaaagacgcatcaagacaggtttacatttgctcaaataacatccaggcaaggcagcaagtgatcgagttagcacgacagcttaacttcatccctatagacctaggctcccttagcagcgccagggagatcgagaatctgccattgcggctgtttacgctctggcggggtccagtggtggtagccatctctctggcgacctttttctttttgtactcattcgtacgggacgtgatccacccctatgctcgcaatcagcagtctgacttttacaaaatcccaatcgaaatcgtcaataaaactcttccaatcgttgctataacactcctgtcactggtgtaccttgccggactgctggctgccgcatatcaactgtattatgggaccaagtataggcgctttccaccctggctggagacttggctccagtgtcgcaagcagttggggctgctcagcttttttttcgccatggtgcacgtagcttatagcctgtgtcttccaatgagacggtcagagagataccttttcctaaacatggcctaccagcaagtgcatgctaacattgagaactcttggaacgaagaagaggtctggagaatcgaaatgtacatttcattcggaatcatgtctctggggttactatccctacttgccgtgacttctattccatccgtttccaatgccttgaactggcgtgagttttcgttcattcagagtactctcggctatgtcgctctgttaatctccacctttcatgtcctcatatatggttggaaaagagcatttgaagaggaatactaccgcttctacacaccgcctaatttcgtgttagccctggtgctaccctccattgtgatcttgggaaaaataattttattcctcccctgcattagccggaaactgaagaggatcaagaagggctgggagaagagtcagtttctggaagagggcatggggggtacaattccacatgtttccccggaacgagttacggtcatgtag

SEQ ID NO: 242540 - DNA, 1365 bp, synthetic construct
  misc_feature 1..1365: note = Description of Artificial Sequence: Synthetic coding sequence
  source 1..1365: mol_type = other DNA
atggagtctatttctatgatggggtccccaaagtcactgtccgagacgttccttcccaacgggatcaatggaattaaagacgcccgtaaggttaccgtcggtgtgattggaagtggagatttcgctaagagcttgacgatccgcctgatccggtgcgggtaccatgtggtcatcggtagtcggaacccaaagttcgcatccgagtttttcccccacgtggttgatgttacgcaccatgaggatgctctgaccaagaccaatatcatcttcgtagctatccaccgggaacactatacatccttatgggacctgagacacctgctggtcggcaaaattttgatcgacgttagcaacaatatgcgaatcaaccaatatccagaaagtaatgctgaatacctggcctccttgtttcctgacagcctgatcgtgaaaggcttcaatgtcgtaagtgcctgggcgttgcaactcggacccaaggacgcctctcgtcaggtgtatatttgtagcaataacattcaggccagacagcaggtgatcgaactggcacgccagttgaacttcatccctattgacttgggatctctgagctcagccagggagatcgaaaacctgcccctcagactttttacactgtggaggggccctgttgttgtggcgatttctcttgccaccttcttttttctgtactccttcgtccgcgatgtgatccacccgtatgccaggaaccagcagtccgatttctataaaatcccaatcgagatcgtcaacaagacactccctattgtggccattacattgctttccctcgtgtacctggccggtctgctagccgctgcatatcagctgtattatggaacaaaatatcgtcgctttcccccatggctggagacctggttgcagtgcagaaaacagctgggactcctctccttctttttcgccatggttcacgtcgcttactcactgtgtctccccatgagaaggtccgagcgctacctgtttctgaatatggcctatcaacaagtccacgctaatatcgagaactcctggaatgaagaagaagtttggcgtatcgaaatgtacatctcgtttggtatcatgagcctgggtctgttatctctgctagctgtaacttcaattccttctgttagcaacgcccttaactggagagaatttagtttcatccagtccactctcggatatgtcgcactgctgatctcaacatttcatgtattgatatacggatggaagcgcgcatttgaagaggaatattataggttctatacaccccctaactttgtgctagccttggtgctgccatccattgtgatactggacctcctgcagttgtgcaggtacccagattag

SEQ ID NO: 242541 - DNA, 1365 bp, synthetic construct
  misc_feature 1..1365: note = Description of Artificial Sequence: Synthetic coding sequence
  source 1..1365: mol_type = other DNA
atggagtctatttctatgatgggcagtcccaagagcctctccgagacatttctcccaaatggtatcaatggtataaaggacgctagaaaggtgaccgttggggttattggaagtggggactttgccaagtctttaacaatacggcttatccgctgcggatatcatgtggtgattggcagtaggaacccaaaatttgcatcggaattctttccacatgtggtggacgtcactcatcatgaagatgctctgaccaaaaccaatataattttcgttgcaattcacagagaacactatacgtccctctgggaccttcgacaccttttagtcggaaaaattctgatcgatgtgagcaacaacatgagaatcaatcagtaccccgagagcaacgcagaataccttgcatccctgttccccgacagcctgatcgtcaagggtttcaatgttgtttccgcctgggcgctccagctgggacctaaagacgcatcccggcaggtgtacatctgcagtaataacatccaagccaggcagcaggtgattgaactggcgaggcaactgaattttatccctattgacttagggagcctctccagtgctagagaaatcgaaaatctccccctgcgcctgttcacactgtggaggggacctgtcgttgttgcgatctcactggccactttcttcttcctgtactcatttgtgagggacgtaatccatccttatgcgagaaaccagcagagcgacttctataagatccccattgaaatagtgaacaaaaccctgcccatcgtggctatcacattgctgtcgctggtgtatctggcgggattgttggcagccgcttaccaactatactacgggactaaatacaggcggtttccaccatggctggagacttggctccagtgccgaaagcagttaggtcttctcagcttcttctttgcaatggtgcacgttgcctatagcctgtgtttgccaatgagacgtagcgagagatacctgttcctcaacatggcctatcagcaggtgcacgcaaatattgagaattcttggaatgaggaggaggtttggcgcatcgaaatgtacatttctttcgggatcatgagcctgggtctgctgtccctactggccgtgacctcaatcccctctgtgagcaacgcactaaactggcgcgagttctcatttattcagagcaccctgggttacgttgcacttctcatatcaacctttcacgtgctcatatatgggtggaaaagagcatttgaagaggagtactatagattctacactccccctaattttgtactggcccttgtgctcccaagtatcgtcatccttgatctcttgcagttgtgcaggtatcctgactag

SEQ ID NO: 242542 - DNA, 1365 bp, synthetic construct
  misc_feature 1..1365: note = Description of Artificial Sequence: Synthetic coding sequence
  source 1..1365: mol_type = other DNA
atggagtccataagcatgatgggatcccccaagtccttgtcagagaccttcctgccaaacggcataaacgggataaaggatgcaagaaaggtgactgtcggtgtgataggaagtggggacttcgcaaagagcttgactattcgacttattagatgcggataccacgttgttattggctcgagaaaccctaaattcgcctctgaattttttccccatgtggtcgacgtaactcaccacgaggatgccttgacaaagaccaatataatattcgtcgccatccaccgggagcattacacgtccctctgggacctgcgccatctgctcgttggcaaaatcctgatcgacgtttctaataacatgcggatcaatcagtatcccgaatccaacgctgagtatttggcctcactatttcctgactctctgatcgtgaagggtttcaatgtcgtatcggcatgggcactgcagctaggaccaaaagatgcctcacgccaggtctacatctgcagcaataacattcaggcacgacagcaagtgatcgagctggcaaggcaactgaacttcattccaatcgacctgggatctttgagtagcgctcgggagattgaaaacctgccactgcgcctgttcaccttgtggcgaggtccagtcgtagtagcgatctcactcgccaccttcttcttcctatactcatttgtgagagacgtaattcatccatacgccaggaatcagcagtccgatttttacaagatcccgatcgagatcgtcaacaaaacactccctatagtggcgattaccttgttgagcctggtgtatctcgctgggctgctagcagccgcttaccagctgtactacgggacaaagtaccggagattccctccttggctcgagacttggctccaatgcaggaaacagctcggcctgctttccttcttctttgcaatggtacacgtagcgtactcattgtgcctgcccatgagaaggagcgagaggtacctcttccttaatatggcatatcagcaggtccacgccaacatcgagaattcatggaacgaagaagaagtttggaggatcgaaatgtatatctcttttggcatcatgagtctcggcctcctcagtctgctggcagtcactagcattccttccgtgagcaacgcacttaactggagagagttcagtttcatccaatcaaccctgggctatgtcgccttacttatcagtacattccatgtcctcatctacggatggaaaagagcgttcgaggaagaatactatcgattttatacgccgcctaacttcgtgcttgccttggtgttgccatctatcgttatcctggacctgctgcagctgtgtcggtaccccgattag

SEQ ID NO: 242543 - DNA, 267 bp, synthetic construct
  misc_feature 1..267: note = Description of Artificial Sequence: Synthetic coding sequence
  source 1..267: mol_type = other DNA
atggaatctatttctatgatgggctcccccaaaagtttatctgaaaccttcctcccaaacgggatcaatgggatcaaagacgctaggaaggtgaccgtgggcgttatcgggtccggggacttcgccaaatctcttaccatacgtctgataaggtgtggttaccacgtcgtgataggctccaggaaccccaagttcgcctcagaatttttccctcatgtcgtggacgtcacgcaccacgaggatgcactcaccaaaacgaacatctag

SEQ ID NO: 242544 - DNA, 549 bp, synthetic construct
  misc_feature 1..549: note = Description of Artificial Sequence: Synthetic coding sequence
  source 1..549: mol_type = other DNA
atggagtccatttctatgatgggaagccctaaatccctttctgagacgttcttacctaacggaatcaacggcataaaggacgcccgaaaggttaccgtgggagtgatcgggagcggagacttcgccaagtccctgacgatcagattaatacgctgtggttatcacgtcgtgatcggctcacggaatcccaaattcgcatctgaattcttcccacatgtggtagacgtgacccatcacgaagatgccctgacgaaaaccaacattatttttgtggcaatccatagagagcactatacctctctctgggatctgcggcatctcctggtggggaaaatactcatcgatgtaagcaacaatatgcgaatcaaccagtaccccgaaagcaacgccgagtacctggcctcactgttcccagattcgctgatcgtgaagggctttaacgtggtgagtgcctgggccctgcaactgggtccaaaggacgcgtccagacaggtgtacatctgcagtaataacatccaggcaagacaacaggtgatagaactggcctag

SEQ ID NO: 242545 - DNA, 1467 bp, synthetic construct
  misc_feature 1..1467: note = Description of Artificial Sequence: Synthetic coding sequence
  source 1..1467: mol_type = other DNA
atgccagaggagatggacaagcctctcatatcactccacctcgtggacagtgactcatccctggctaaagtacctgacgaggcaccaaaggttggcatccttggttctggggacttcgctcgatctcttgctacacgcttagttggcagcgggttcaaggtggtggtcggtagcaggaacccgaaacgcactgccaggctgtttccctctgccgctcaggtgacttttcaggaagaggccgtgtcttctcccgaagtcatttttgttgctgtgtttcgcgaacactacagttccctgtgttctctctctgatcagctagcaggtaaaattctggtggatgtctcaaatccaaccgagcaggaacacctccaacaccgtgagagcaacgcagaatatctggcaagcctgtttcccacctgtacagtggtcaaggccttcaacgtgatttcagcctggacgcttcaagccggaccccgtgacggcaataggcaggtccctatttgcggggaccaacccgaggcgaagcgagccgtatccgaaatggccctcgccatgggcttcatgccagtagatatgggatctttggctagcgcttgggaagtagaggcaatgcctctgcggctgctgccagcctggaaagtgcctactctgttggctctgggcctttttgtgtgtttctatgcatacaattttgtgcgagacgtactgcagccctacgttcaagagtcccaaaacaagttttttaaactgcccgtgtcagtcgtcaacaccacattgccctgcgtggcatatgtgttgctgagcttagtgtacctcccaggcgttctagcagcagcgctgcagttacgtcggggaaccaagtaccagcgttttcccgattggttggaccactggttgcagcatcgtaagcagataggcttattgtccttcttctgtgctgcactgcacgctctttatagtttttgtctccctttaaggcgcgctcatagatatgatcttgtgaacctcgccgtgaagcaggtattagctaacaaatcacacctgtgggtcgaggaagaagtctggaggatggaaatttatctgagcctgggcgtgctggctctggggaccctgagccttctcgctgtaacctctctgccatcgatcgccaatagcctcaactggcgggaattttctttcgtccagagctctttgggtttcgttgccttggtgctgtcaactttacatacactcacctatgggtggactcgggctttcgaggagtcaaggtacaagttctacctgcccccaaccttcacacttacactgctcgtgccctgtgtggtgatattggctaaggcactgttcttgctcccttgcatttcccgtcggttagcccgaatcaggagaggttgggagagagagtccacaattaaatttacactgcctacagaccacgcgttggccgaaaaaacctcacacgtgtag

SEQ ID NO: 242546 - DNA, 1467 bp, synthetic construct
  misc_feature 1..1467: note = Description of Artificial Sequence: Synthetic coding sequence
  source 1..1467: mol_type = other DNA
atgcctgaagagatggataaaccacttattagcctgcatcttgtcgacagcgattcctccttagccaaggtgcccgacgaggctccaaaggttggaattcttggcagtggcgatttcgcccgaagtctggctactcgcctggttggcagtggatttaaggttgttgttggttccagaaaccctaaacggactgctcggctcttcccaagcgccgctcaggtgactttccaggaggaggctgtctcgagcccagaagtgatttttgtcgctgtcttcagagaacactacagcagcctctgctcgctgagtgaccagttggccggtaagattttggtcgatgtgtccaatccaaccgaacaggagcacctccagcaccgggaatccaatgccgagtatttggcgtcgctttttccaacttgtaccgttgtgaaggcctttaacgttattagcgcttggactctgcaggccggtcccagagacggaaaccgacaggtgccgatttgcggcgaccagcccgaagctaaaagagctgtctccgaaatggcgttggctatgggctttatgcccgtcgatatgggctctctggcaagcgcctgggaagtggaggctatgccactgcgcttacttcctgcttggaaggtgcccacactcttggccctcggtcttttcgtgtgtttctacgcgtacaactttgtgcgggacgtgttacagccctacgttcaggaatcccaaaataagttcttcaagcttccagttagcgttgtgaatactaccctaccctgtgttgcttacgttctcttgagcctagtatatctgcccggagtcctggcagctgccctgcagctgcgtcggggaacaaagtaccagaggtttcccgactggctcgaccactggttacagcaccgcaaacagatcggactcctctcattcttttgtgccgcactgcatgcactctacagtttctgcctgcctctgaggcgggctcacaggtacgatctcgttaaccttgcagtgaaacaggtgctcgccaataaatctcacctatgggtggaagaggaggtgtggaggatggagatttacctgtcactcggcgtactcgccctgggtacactttcactcctggccgttaccagcctgcccagcatcgcaaattctctaaattggcgcgagttctccttcgtacagtcctccttaggttttgtagccttggttctgtctactctccacaccctgacctatgggtggacgcgggcattcgaagagagtcggtataagttctacctgcccccaacgttcaccctgaccctcctggtaccatgcgtcgtaattcttgccaaggctctgttcctcctcccatgtatctcacgtcggcttgccagaatccgcagaggctgggaacgcgagagcaccattaagttcacactgcccacggaccatgctctcgcagaaaagacaagccatgtgtag

SEQ ID NO: 242547 - DNA, 1467 bp, synthetic construct
  misc_feature 1..1467: note = Description of Artificial Sequence: Synthetic coding sequence
  source 1..1467: mol_type = other DNA
atgcctgaggaaatggataaacctctaatttcgctgcatttagtggactcagactcctccctggccaaggtccctgatgaagcccctaaggtggggattttgggttcgggagattttgcgcgatcactcgccacacggctggtgggctcgggatttaaagtagtggttggcagccggaatcctaagagaacagccagactgtttcccagcgctgcccaagtaaccttccaggaggaggcagtgtcatctccagaggtgattttcgttgctgtgttccgggagcattatagctctctgtgctcactatccgaccagctggcagggaaaatccttgtagatgtgtccaaccctacagagcaggaacacctgcagcacagggaatcaaacgctgagtatctggcctcacttttccccacttgcaccgtggttaaggcatttaatgtgatctcagcctggacactacaggccggacccagggatggcaaccggcaggtcccgatctgtggcgatcagccagaggctaagagagccgtctccgagatggccctggcaatgggtttcatgccagtagacatggggtctctggcttctgcctgggaggtcgaagcaatgcccttgcgcctgctcccggcatggaaggttccgacgctgttggccctgggactgtttgtgtgtttctacgcatataatttcgtcagagatgtcctgcagccatatgtccaagagtcccagaataaattctttaagctacctgtttctgtcgtgaacacaaccctcccctgcgttgcctacgtgctcttgtcgctggtctatttgcccggagtgctcgcagccgctctgcagcttaggaggggcaccaagtatcaaaggttccccgactggctagaccactggctgcagcacagaaagcaaattgggcttttatcattcttctgcgcagccttgcacgcgctctattccttctgtttaccactgcgcagagcacacaggtacgacctggtgaatctcgctgttaagcaggtccttgccaataaatcacacctgtgggtcgaagaagaggtatggaggatggaaatttacctcagcttgggagtgctcgcactcggaaccctgtctctgcttgcagtgacctcactcccttctatcgccaatagtctgaattggagagagttctcttttgtgcaatcttccctgggatttgtcgcgttagttctgagcaccttgcacaccctgacttacggttggacaagggcctttgaggagtcgcgttataaattttacctcccccctacattcaccctaacactgctcgtcccatgcgtagttatcttggcaaaggcactcttcttactgccttgcatcagtagaaggctggcgaggattcggcgtggttgggaacgagagtccaccattaaatttacattgccgactgatcacgcgttggctgaaaagacgtcgcatgtctag

SEQ ID NO: 242548 - DNA, 1467 bp, synthetic construct
  misc_feature 1..1467: note = Description of Artificial Sequence: Synthetic coding sequence
  source 1..1467: mol_type = other DNA
atgcctgaggaaatggacaagccgctgatctcactgcatctggttgactcggatagctccttggccaaagtgccagatgaagcacctaaagtagggatcctcggatctggtgactttgcgaggagtttggccacccgtctcgtaggcagtggatttaaagtggtagtgggctcaaggaaccctaagaggaccgccaggctcttcccctcagccgctcaggtcacatttcaggaggaggccgtgagcagtccggaggttatctttgttgctgtcttcagggagcactactcatcgctgtgcagtcttagtgatcagctggcgggaaagatcctcgttgacgtttcaaaccccacagaacaagaacatcttcagcatcgggagtcaaacgccgagtatttagcaagtttattccccacctgtaccgtggtcaaggcttttaacgtcatcagtgcctggacactccaggctggccctcgtgacggcaatcggcaggtaccaatttgcggcgaccagcctgaggcgaaaagagcagtctcggagatggccctggcgatgggcttcatgccagtcgatatgggctcgctggcaagcgcatgggaggttgaagccatgcctctcagattgctccctgcctggaaagtgccaaccttgctcgccctcgggctatttgtgtgtttctatgcctataatttcgtacgcgacgttctgcagccatacgtgcaagaaagtcagaataaattcttcaaactcccagtgtcggtagttaacactaccttaccatgcgtagcttacgtcctgctgagtctggtgtaccttcctggcgtgctcgccgcagctttacagctcagaagaggtacaaagtaccagaggttcccagactggctggaccactggctacagcatagaaaacagataggactcctctcattcttctgtgccgctcttcacgcgctgtatagtttctgccttcctctgcgcagagcccatagatacgacctcgtgaatctcgccgtaaaacaggttcttgctaacaaatcccacctctgggtcgaggaggaagtgtggcgcatggaaatctatttgagtctgggtgtactcgctctgggcacgctgtccctccttgccgtgacatcactcccctcaatagccaacagtctgaattggagggagttctcctttgtgcagtcctctcttggttttgtagcgcttgtgctatccactctgcacaccctgacttatggatggacgcgtgcgttcgaagaatccaggtacaagttttatctgcctccaacattcacccttaccctgctggtcccctgtgtcgtgattttagccaaggccctttttctactcccatgtatttcacgtagactggccagaataaggagaggctgggagagagagtccacgatcaagttcacgctgcccaccgaccacgcactggctgagaaaacctcacacgtatag

SEQ ID NO: 242549 - DNA, 1497 bp, synthetic construct
  misc_feature 1..1497: note = Description of Artificial Sequence: Synthetic coding sequence
  source 1..1497: mol_type = other DNA
atgtcccaccaacccgcagtcgccaccaagatgcctgaggagatggataagcctctcatcagccttcatctggtggacagcgattcaagtctcgccaaggtgcccgacgaagcgcctaaggttggcatcttgggcagcggcgattttgcacgtagcttggccacacggttagtggggagcggctttaaggtggttgtcgggtctagaaacccaaagagaaccgctcgcctctttccctccgctgcacaggtgacgtttcaagaggaggcggtaagctccccggaggtgatattcgtggcagtgttcagggagcattattcatcgttgtgcagcctctcagaccaactggccggaaaaatactggttgatgtatctaatccaaccgaacaggagcatcttcagcacagggagtcaaacgccgaatacttagctagtctgtttccaacttgtactgtggtgaaggccttcaatgtgatcagcgcatggacgttgcaggctggaccaagggacggcaatcgccaggtgccaatttgcggagaccaaccggaagccaagcgggctgtgagcgagatggctctcgcgatggggtttatgcctgtggacatgggcagccttgcatccgcctgggaagtagaggcaatgcccctgcggctgctaccggcttggaaagtgcccaccctcctcgccctgggtctctttgtatgtttctatgcctataattttgtacgtgatgtgttgcaaccgtatgtacaggagtcccaaaacaaattttttaagctccccgtgtcagtcgttaataccacactgccttgcgtggcgtatgtcctcttaagccttgtgtacctccccggtgtactagccgcagccctgcagctacgtcggggtacgaagtaccagcgtttccctgactggctggaccattggctccagcacaggaaacagatcggcctcctgtccttcttctgcgcggcactgcatgccctatactccttttgccttccactcagacgcgctcatcgctacgacttggtgaacttggccgtcaaacaggtgctcgccaataagtcccacctgtgggtggaggaggaggtgtggagaatggaaatttacctgagcctcggggtgctggcactcggaacactctctttgctggcggtgacctccctcccctcaatcgccaatagtctgaattggagagagttttcatttgtacagtcttctctgggctttgtggccctcgtgctttcaaccctccacaccttgacgtatggctggaccagagcttttgaagagagccgctacaagttttacttgcccccaacctttaccctgaccctcttggtgccatgtgtggtcatccttgcaaaggccctgtttcttctgccctgcatctctcggagactggccaggattcgacgaggctgggaaagagagtcaactataaagtttaccttgcccacggatcatgctttagctgagaaaacttctcatgtgtag

SEQ ID NO: 242550 - DNA, 1374 bp, synthetic construct
  misc_feature 1..1374: note = Description of Artificial Sequence: Synthetic coding sequence
  source 1..1374: mol_type = other DNA
atgcctgaggaaatggacaagcccttaattagcctccacctggtggactcagactcctcattggccaaggttccagacgaggccccaaaggtcggcatcctgggctccggagacttcgcacggagcttagctacgcgcttggttgggagcggcttcaaagtggttgttggttcccggaacccgaagaggacagcgaggctgtttccatcagcagcccaggtcacatttcaggaggaggccgtgtccagccccgaggtaatttttgtagctgtctttagagagcattacagttccctttgttccctgtccgaccagctggctggtaagatactggttgacgtttcgaatcctaccgagcaggagcacctccagcatcgggaaagcaatgctgagtacctggcctccttgttccccacctgcacagtggtaaaggcattcaacgtcattagtgcgtggacactccaggccggtcccagagacggcaatcgtcaggtccctatctgcggggatcagcccgaggcaaagagagctgtctcggagatggcacttgcaatgggttttatgccggtggatatgggtagtcttgcatctgcatgggaggttgaggccatgccgttacggctgttgccagcctggaaagtgccaaccctgctggccctgggtctgttcgtctgcttctacgcatacaatttcgtcagagatgtactgcagccctacgtacaggagtcccagaacaagttcttcaagctccctgtctcggtggtcaacacgacccttccgtgcgtggcctatgtgctgcttagcctggtgtatctcccaggcgtccttgctgctgcattgcagctaaggcgaggaaccaagtaccagcggttcccagactggctcgaccattggctccaacatcgcaaacaaatcggtctgttatcattcttctgtgccgcactccatgctctatacagtttctgcttgccgctgcggagagcccacagatatgatctggtcaaccttgctgtaaaacaggtgctggccaacaagagccatctctgggtcgaggaagaagtctggcgcatggaaatttacctcagcctcggagtgctggcgctgggaaccctgtcactgctcgctgtcacgagcctcccatccattgccaattcactgaattggagggagttctcattcgtccaatgtgtggccacaagctccgcaggcaacacaggctccggaaccagaaggcccgagtcacaatcccaagacccacaccttccggcaccacatcaccagacgtccttccttggccctcgttccttttgttgcagcctggtgcctgtgagcactccttacgggcatcaggaggatctctcctggacacgctag

SEQ ID NO: 242551 - DNA, 1467 bp, synthetic construct
  misc_feature 1..1467: note = Description of Artificial Sequence: Synthetic coding sequence
  source 1..1467: mol_type = other DNA
atgccagaggaaatggataagccactgatatcccttcacctggtggattcagactccagtttagccaaggtgccagatgaagcgcctaaggttggcattctagggagcggagactttgccaggtccctggcaacaagactggtaggctcagggtttaaggtcgtagttgggagccgcaaccccaaacggacagctagattatttccctcggcggctcaggtcacttttcaggaggaagccgtgtcaagcccggaggtgattttcgtggccgtgtttagagaacattatagctcgctgtgtagcctttctgatcagcttgccggaaagatccttgtcgacgtgtccaatccgacagagcaggagcacctccagcacagggaatcaaacgcagaatatttagcctccctgtttcccacctgcaccgttgtcaaggcttttaatgtgatatctgcctggacgttacaagcgggaccgagggacggtaaccgtcaggtcccaatctgcggtgatcagcccgaggccaaaagagctgtgtcagaaatggcactcgctatgggctttatgcccgtagatatgggcagtctggcatctgcctgggaagtcgaggccatgcccttgcggctgctgccagcatggaaagtacctacgctactggccttggggctctttgtgtgcttttatgcctacaactttgtgcgggatgtcttgcaaccttacgtgcaggaatctcagaataagttcttcaagcttcctgtctccgtggtcaatacaacgttaccctgtgtagcgtacgtcctgctgtctctagtgtatctcccaggggttcttgcagcagccctccaacttagacgtggtacgaagtaccagcgattccctgattggctggatcattggctgcagcacaggaagcagatcggcctgctgtccttcttttgcgctgccctgcacgccctatactctttttgcctgcctttgcgtagagcccatagatacgatcttgtgaatctggcagtcaaacaggtgcttgctaacaagtcacatctctgggtcgaagaagaggtgtggaggatggagatctatctaagtctgggtgtcctggccctcgggacactcagcctccttgccgtgacctccctgccatctatagcaaattccctgaattggcgggaattcagttttgtccagtcttcgctcgggtttgtggccctggtgctctcgactctacatacgttaacatacggatggactcgcgcttttgaggagagcaggtataaattctaccttccaccaacattcacccttacgctgttggtcccatgcgtggttatcctggccaaggctctatttctgctgccatgcattagcagaaggctggctaggattcgacggggatgggagcgggaaagtaccataaagtttactcttcctaccgaccatgcccttgcagaaaagacttcccacgtatag

SEQ ID NO: 242552 - DNA, 1374 bp, synthetic construct
  misc_feature 1..1374: note = Description of Artificial Sequence: Synthetic coding sequence
  source 1..1374: mol_type = other DNA
atgccagaggaaatggataagccactgatcagcctccatctggtggattccgattcctctctggcaaaagtgcctgatgaggctcctaaggttggaatcttggggagtggagactttgcacgcagcctcgctacccgcctcgtgggaagtggttttaaagttgtcgtcggatcacggaaccctaagcgcactgccaggttatttccctcggcggcacaggtgacttttcaggaggaggccgtctcctccccagaagtgattttcgtcgcagtgtttcgcgaacattacagttcgttgtgttcactgtccgaccagctggcaggaaaaatactggtggacgtaagcaatccaactgagcaggagcatctacagcacagggaaagcaacgccgagtaccttgcctcactatttcccacctgtacagtggtgaaggcctttaacgtcatttcagcttggaccctgcaagccggtccacgggacgggaaccggcaggtgcctatctgtggggatcaaccagaggctaaacgtgccgtttctgaaatggctctggccatgggcttcatgcctgtggacatggggtcactggcatcagcttgggaagtggaagccatgcccctgcgcttgctgcctgcatggaaagtgccaaccctattggcccttggtttgtttgtttgtttctacgcgtacaatttcgtgagagacgtcttacagccttatgtacaggagtcacagaacaaattcttcaagctgccagtcagcgtggtgaacactacactgccgtgcgtggcctacgtgttgctcagccttgtctatctgcccggtgtgctggctgccgcactccaactccgaagaggaacaaagtaccagcggtttccagattggctggaccattggctgcagcaccgcaaacagatcggcctgctctcgtttttttgtgcagctcttcacgccctgtactctttctgcctgcctcttaggcgcgcacaccgctacgacttagtgaacctagccgtgaagcaggttctggcaaataaatcccacttgtgggtggaagaagaagtgtggaggatggagatctacctgagcttaggtgtactggcgctggggacactgtctctgctggccgtaacctcactacctagcatcgctaactccctgaattggagggaattctccttcgtgcagtgcgtggctacatcttcagcagggaatacagggtccggaacacgcaggccagaatcacaaagtcaggaccctcacctccccgcaccacaccaccaaacaagcttcctcggccctcgcagtttctgctgttctttggtgcctgtgagtaccccctacggccatcaggaagatttatcgtggactaggtag

SEQ ID NO: 242553 - DNA, 432 bp, synthetic construct
  misc_feature 1..432: note = Description of Artificial Sequence: Synthetic coding sequence
  source 1..432: mol_type = other DNA
atggaaatttacctgtccttgggagtcctcgctcttggcacgctttcactgctcgcagtcacttctctcccctccattgctaactcgctgaattggagagaatttagtttcgttcaatcctccctcgggttcgtggctttggtcttatccaccctgcataccttgacgtatggctggacccgggcttttgaggaatctcgctacaagttctacctgccgccaacatttactctcactcttcttgtcccctgtgtagtcatccttgctaaggctctgttcttgctcccatgcatctcaagaagacttgccagaatacgtagagggtgggagagggagtctactatcaaattcactcttcctactgaccatgccctgagcccactagggtttctgttccttgttgtgcaatcaggaattaccgtgtgcaagtag

SEQ ID NO: 242554 - DNA, 852 bp, synthetic construct
  misc_feature 1..852: note = Description of Artificial Sequence: Synthetic coding sequence
  source 1..852: mol_type = other DNA
atggaaaagacctgcatagacgctctcccactcactatgaatagctccgagaaacaggagacggtctgcatctttggtactggagacttcggccgttccctcggtctgaaaatgctgcaatgcggctattctgtggtctttgggtcaaggaacccacagaaaacgacactgcttccatctggcgctgaagtcctgtcctactctgaggctgcaaaaaagtcaggaattatcatcattgccattcaccgtgagcactatgacttcttgaccgaactgactgaagtgctgaacggcaagatacttgtggatattagcaataacctaaaaatcaaccagtatccagagagcaacgcggagtacctagcccacttggtgccgggagcccatgtggttaaggctttcaacactattagcgcatgggcacttcaatccggagccttggacgcttcacgccaagcaatcctgaagaaagagaacccattctcaacctcatcagcctggctgagcgacagttatgtggccctggggattctcggattttttctgtttgtgttgctgggaatcacttcgcttccaagtgttagtaacgcagttaactggagggagtttagatttgtgcagtccaagctcggctacctgactctcatactctgtactgctcacactctagtctatgggggaaaacggtttctctccccttcgaacttaagatggtatctgcccgctgcatatgtcctgggcctcattataccctgcacagttctcgtgattaaattcgttcttattatgccttgtgtcgacaacacactgacccgtatcaggcagggatgggagaggaattctaaacattag

SEQ ID NO: 242555 - DNA, 1380 bp, synthetic construct
  misc_feature 1..1380: note = Description of Artificial Sequence: Synthetic coding sequence
  source 1..1380: mol_type = other DNA
atggaaaaaacttgtatcgacgcacttcccctgaccatgaacagttcagaaaagcaggaaaccgtctgcatctttgggaccggagactttggccgaagcttgggtcttaagatgctgcagtgtgggtatagtgtggtgtttgggagccggaatcctcaaaagaccactctgctgccgtcaggcgcagaggtactttcctatagcgaagcagccaaaaaatcaggtatcattattatagccatccacagagagcattacgattttctgacagaattaacggaggtgctgaacgggaagatcctggtcgacatttctaataatctgaaaattaatcaatatcctgagtccaatgccgagtaccttgcccacctcgttccgggtgcccacgtggtgaaggcttttaacacgatatcagcgtgggcattgcaatcaggtgcactggacgccagccgccaggtgttcgtgtgcgggaatgatagcaaggctaaacagcgggtaatggatatcgtaaggaatcttggcctgacacctatggatcagggtagtcttatggctgcgaaagagatcgaaaagtacccactgcaattatttcctatgtggaggttcccattttatctgtcggctgtcctgtgtgtatttctgtttttctactgtgtgatccgggatgtgatatacccatacgtctacgaaaagaaagacaacacttttaggatggcaataagtattccgaacagaatcttccccatcaccgcgttgactctactggccctggtttatctccctggtgtgatcgccgcaatactgcagctctatcgcggaactaagtataggaggtttcccgactggctggatcactggatgctgtgccgcaaacagttgggcttggtcgcgttagggtttgctttcctgcatgtgctctatacactggttattcctatacgctactacgtccgctggcgcctgggcaatctaacggttactcaggcgatactgaagaaggagaatccatttagcacatctagcgcatggcttagcgatagctacgtggcattagggatcctcggctttttcctgttcgtacttctgggcattacatctctcccaagcgtttccaacgccgtgaattggagggaatttaggttcgtgcagtccaaactaggatatttgactctgattctgtgtacggctcacaccctggtatacgggggtaaaaggtttctgtccccttcaaacctgaggtggtacctccctgctgcgtatgttctgggccttatcattccttgtaccgtgctcgtaattaaattcgtcctcatcatgccttgcgtcgataatactctgaccagaataaggcagggctgggagaggaattcaaagcactag

SEQ ID NO: 242556 - DNA, 1080 bp, synthetic construct
  misc_feature 1..1080: note = Description of Artificial Sequence: Synthetic coding sequence
  source 1..1080: mol_type = other DNA
atgcccgctcatctgctgcaagacgatatctcctcgtcctacacaacaacgaccaccatcacggcgcctcccagccgcgtgctacagaacggcggtgacaaattagaaacaatgccactctatctcgaagacgacattcgccctgatattaaagatgacatttatgatcccacctataaagacaaggagggaccttccccaaaggtggaatatgtctggcgaaacataatactgatgtcccttttacatctgggagccttgtacggaattacgctcatacctacttgtaaattctacacatggctctggggcgtcttttactatttcgtgagtgctctgggaataactgctggtgcccaccggctgtggtcccaccgttcctataaggctagactgccccttcggctcttcctcattatagcaaatactatggcattccagaacgacgtatacgagtgggccagagatcacagagcccaccacaagttttccgagacacacgccgacccacataactctcgcagaggttttttcttctcccacgtgggctggctcttagtgcgaaaacacccggctgtgaaagaaaaaggatcaactttagatctctctgacctggaggctgaaaagcttgtgatgttccagaggaggtattacaagccaggcttactcatgatgtgtttcattctccccaccctggtcccttggtacttttggggagagacctttcagaactccgtgttcgtcgcaacattcctgaggtacgccgttgtgttaaatgctacttggcttgtgaactccgccgctcacctgttcggatatagaccttatgataaaaacatttcccctagagaaaatatcctcgtatctctcggggctgtgggagagggtttccacaactatcaccactcctttccatatgactattcggccagtgaatacaggtggcacatcaacttcaccacgtttttcatagattgcatggccgctctcgggctcgcttatgatcgtaaaaaggtgtctaaagctgcaattctggccaggataaagcgcactggcgatgggaactacaaatccggatag

SEQ ID NO: 242557 - DNA, 729 bp, synthetic construct
  misc_feature 1..729: note = Description of Artificial Sequence: Synthetic coding sequence
  source 1..729: mol_type = other DNA
atgccagcacacctgctccaagatgacatttctagctcctatacgaccacaactaccattactgctcctccgtccagggtactgcagaatgggggtgacaagcttgaaactatgcccttgtacctagaggatgatattcggcctgatattaaagacgatatctacgatccaacttacaaggacaaggagggaccaagtcccaaagtagaatatgtctggagaaatatcattctgatgtccctcctacatctcggtgctctctacggaataaccctcatacctacatgcaagttctacacatggctgtggggtgtcttctattactttgtgtctgctctggggatcaccgccggtgctcaccgactctggagccatcggtcctacaaggctcgcttgccactgcgtctgtttcttatcattgctaatacaatggctttccagaatgacgtgtatgaatgggccagggatcaccgcgctcaccataagttctcagaaactcacgccgacccgcataactcccggaggggattcttcttttcccatgtcggttggctgttggtgcgaaagcatccagcggttaaggagaaaggatcaaccttggacctctccgacctggaggctgagaaattggtgatgtttcagagacgctactacaaaccagggttgctaatgatgtgtttcatccttcccactctcgtgccttggtatttctggggggaaacattttag

SEQ ID NO: 242558 - DNA, 813 bp, synthetic construct
  misc_feature 1..813: note = Description of Artificial Sequence: Synthetic coding sequence
  source 1..813: mol_type = other DNA
atggcgtgcagaccacgttccccccctcgacatcagtctcgctgtgacggagatgcttcacccccatcacccgctagatggtcgcttggccgtaaacgccgagcagacggcagacggtggcgtcccgaagatgccgaggaagcagagcataggggagctgagcggagacctgagagctttacaacacctgagggcccaaaacctagaagccgatgcagtgattgggcctccgcggtggaagaggacgagatgagaacacgggttaataaggaaatggccagatacaagaggaagctccttattaacgattttggtcgagaaagaaagagttcatctggcagctcagacagcaaggagtctatgagtacagtccctgctgattttgagacagacgaaagtgtgttgatgaggaggcagaagcagatcaattatgggaaaaacacaattgcttacgaccgttatatcaaagaagttccgcgacatttgcggcagcctggaattcaccccaagactcccaacaagttcaagaagtactctagacggagctgggatcaacagatcaaactctggaaggtcgcccttcatttctgggacccacccgctgaggaaggctgtgacctacaagagatccatcccgtggacctggagtccgctgagagctccagcgaacctcagactagctcacaggatgactttgatgtttactcggggacaccaactaaggtcaggcacatggattcccaggtggaagacgaattcgaccttgaagcttgtctgacagagcctttgcgagacttttctgcaatgtcctag

SEQ ID NO: 242559 - DNA, 5327 bp, synthetic construct
  misc_feature 1..5327: note = Description of Artificial Sequence: Synthetic coding sequence
  source 1..5327: mol_type = other DNA
atggcgctgagcctctggcctctactgctcctgctcctgctgctcctcctgctgtccttcgccgtaaccctagcaccaacagggcctcactccctggacccaggactgtcgttcctcaagtccttactgtccacgttggaccaggctccgcaagggagcctctccagaagccgttttttcactttcctggcgaatatctcctcttcctttgaaccaggaaggatgggcgagggacccgtcggagagccgcctcccttacaaccaccggcactcagactgcatgacttcctcgtgaccttgcggggtagccccgactgggaacctatgctgggcctgctgggtgatatgctggccctgctgggtcaggaacaaaccccacgagactttctcgtgcaccaagccggagtgctcgggggactggttgaagtgctcctgggcgctttggttccgggtggacctccaactcctacccggccaccatgtaccagagacggaccatctgactgtgtcctggctgctgattggcttccttccctccttctattattggaaggtaccagatggcaggccctcgtgcaggtgcaaccttccgtggatcccaccaacgcaacggggttggacggaagggaagcggcacctcactttctgcagggactcctgggcttactcacgccaacgggcgagcttgggagcaaggaagccctgtggggagggctcctgcgcaccgtgggagcccctctttatgccgcatttcaagaaggtctgcttcgtgtgacccatagcctccaagacgaagttttttccatcctgggacaacctgaaccagatacaaacggccagtgtcagggtggcaatcttcagcagctgttactgtggggtgttcggcacaatctgtcatgggacgttcaggccctgggctttctgagcggcagcccacctcctccacccgctttgctgcactgcttgagcaccggtgtgccactcccccgtgccagccaaccctccgcgcacatctcgcctaggcaaaggcgtgctattacggttgaagccctgtgcgagaatcacctggggcctgcacctccctattcaatatccaatttctcgatccatctgttatgccagcacacaaagcccgctacgcctcagcctcacccctcaacaacagccatctgtcagactgctgtttggtatgctgttagctgggccccaggtgcacaggggtggttgcaagcttgtcatgaccaatttcctgatgaatttctggatgctatctgttctaatttgagctttagtgcactctcaggcagcaacagaaggctagtcaagagattgtgcgcaggccttctccctccacccacttcctgcccggaggggctgccccctgtacctctgacacccgatatcttctgggggtgctttcttgagaacgaaacactgtgggctgagagattgtgtggggaggcgtcacttcaggctgtgccccctagtaaccaggcctgggtacaacatgtgtgccaaggcccaacccccgacgtgactgcgtctcctccctgtcacatcggaccatgtggtgaaagatgtccagatggtggcagtttccttgtcatggtatgcgccaatgacaccatgtatgaggtccttgtgccgttttggccttggttggcaggacaatgtaggatatcccgtggcggaaatgacacttgctttctggaaggactgctggggccattgctcccctccctgcccccactcggtccgtcccccctgtgcctgacccccggaccattcttgctcggcatgttgtcccaactgcccaggtgtcaatcgtccgtgccagctttggctcaccctacccggttgcactacctgctgcgactgttgaccttccttcttggaccaggggctggcggagctgaggcccagggcatgctgggaagagcactgcttctgtcctcactgccggacaactgctccttctgggatgctttcagacccgagggtcgaaggagcgtactaaggactattggcgagtacctggagcaggacgaggagcagccaacaccgtcggggttcgaacccaccgtgaacccatcttctggaatatcgaagatggaactgctggcatgttttagccccgtactgtgggaccttctgcagagggagaagagtgtttgggctctgcagattctcgtgcaggcctatctgcacatgcctcccgaaaacctccagcagttagtgctctctgccgaaagggaggcagctcagggatttctaactctgatgctccagggcaagctgcagggcaaactccaggtgccaccttctgaagagcaggcactgggcaggctgacggccttgctactgcaaagatacccacgtctcacatcacaactgtttattgatttgagccccctgattcccttcctggctgtatctgatctcatgcgctttccaccttcattacttgctaatgacagcgtgctcgcagcaatacgggactactcacccggaatgcggcctgaacaaaaagaggcgctggctaagagactgttagcacccgaactctttggagaggtgcctgcatggccacaagaattgttgtgggccgtcctcccgctactaccacatctcccactggagaattttctgcagctaagtccccatcagatacaggcactggaggatagctggccagctgccggtctgggacccggtcacgctagacatgttttacgatctctggtgaatcagtccgttcaggacggcgaggagcaggtaaggcggcttgggcctctagcctgctttctcagcccagaggaactgcagagtctggttcccctatctgaccccacgggcccagtggaacgcggtctgttagagtgcgccgcaaacggtacactgagtcctgaggggagagtagcgtatgagttattaggagtactccgctcaagtgggggtgctgtgctgtcccccagggagctccgcgtctgggcacctctattttctcagctcgggctgaggttcctgcaggagctatctgaacctcaacttcgggctatgctcccagtgctccagggcactagtgtgacccccgctcaggccgtgcttctgctcggacggctgctgccgcgacatgacctcagcctcgaagagctctgctctctgcatcttctgctgcccggactcagcccccaaaccctacaagccataccacgtcgcgttctagtgggcgcatgttcttgcctcgcccctgagctctcccggctttccgcttgccagactgctgcgctcttgcagacattccgagttaaagatggcgtaaagaacatggggaccacaggcgcagggcctgccgtgtgtatccctggccagccaattcctacaacgtggccagattgcttattaccactcctgcctctcaagctactgcagctagactctttagccctgctggccaatagaaggcgctattgggaactcccctggtccgagcagcaggcccagttcctgtggaaaaaaatgcaggtacctaccaacttgactctgcggaatctgcaggcactaggtacactggccggaggaatgagctgcgaattccttcagcaaattaactcaatggtcgattttctggaggtggtacacatgatataccagttgccaacccgtgtgcgaggcagtttacgcgcttgtatttgggccgagttacagagacgtatggccatgcccgagcccgaatggacaactgtaggcccagagttgaacggcctggattccaaactgctcctagatctgcctatccagctgatggatcgactcagcaacgaatctattatgctagtggtggaactcgtgcagcgggcacccgagcagctgttagccctgacgcccctgcaccaggcggcactcgcggagcgtgccctccagaacttggcccctaaggagacacccgttagcggagaggttttggagaccctcggtccgctcgtagggttcctcggtacggagtcgaccagacagattcccctgcaaatcctgttgtctcatctcagccagttgcagggcttctgtctgggcgaaacttttgctacagaactgggatggctgctactgcaggagagcgtgctcggaaagcctgaattgtggtctcaagatgaggtggaacaggctggaaggctggtgtttactctgtccacggaggctatcagcctgattccacgcgaggctctcggtcctgagaccctcgaaagactcttggaaaaacagcagtcttgggagcagtcaagagttggccaactgtgcagggagccccaactagctgcgaagaaggcagccctggtggccggagtggtaaggccggcagcagaggacctgccagagccagtaccaaattgcgctgatgtccgtggaacctttcccgcagcatggtctgctacgcagattgcagagatggagctctctgattttgaggattgccttacactcttcgccggagatccgggattagggcctgaggagctgcgcgcagctatgggaaaagctaaacaactctggggaccccctagggggtttagacccgaacagatcctccagctcgggaggctgctcataggacttggcgatagagaactccaggaacttatcctggttgactggggcgtgctatccacccttgggcagatcgacggctggtcaacaactcagctgcgcattgtggtctcatcctttcttcgccagtctggcaggcacgtgtcccaccttgatttcgtccacttaacagcgctgggatacaccctttgtggccttaggcccgaggaacttcagcacatctcttcctgggaattctctcaagccgctctctttttaggcacactgcacctacaatgttctgaagagcagctcgaggttttggcacacctcctcgtactgcctggcggattcgggccaatctccaattggggtccagaaatattcactgaaattggaacaatcgcagccggtatcccagacctggcattgagtgcacttcttagaggccagatccagggggttactcctctcgcaatttccgtgattccaccaccaaagttcgcggtggtcttttctccaatccagctgtcatccctgacttctgcacaggcggttgccgtcacacccgaacagatggccttcctttcaccagaacagcggagggccgtggcttgggcccagcatgaaggaaaagaatccccagagcagcaggggagatccaccgcctggggtctgcaggattggtcaaggcctagctggtcactggtgttgactattagtttcctgggacatctgttgta

SEQ ID NO: 242560 - DNA, 1056 bp, synthetic construct
  misc_feature 1..1056: note = Description of Artificial Sequence: Synthetic coding sequence
  source 1..1056: mol_type = other DNA
atggccttgtccctgtggccgttgctgttgctgcttctccttctcctcttgctgagcttcgccgtgacccttgctccaacaggccctcactctctggaccctgggctgtctttccttaagagcttgcttagcactctcgatcaggctccacagggaagcctgagtaggtcaagattctttaccttccttgctaacatcagctctagcttcgagcccggaagaatgggagaggggcctgtgggcgaacctccaccccttcagccgcctgccctgagacttcacgattttttggttaccctgcgcggatctcccgactgggagcctatgctcggcctcttaggtgatatgttagcactacttggacaggagcaaacgcccagagatttccttgtccaccaggccggagttctgggtggcttagtggaggtgttactgggtgctctggttccaggtggtccaccaaccccaacacaaccaccctgcactagagatggcccaagcgattgcgtgctagccgctgactggctgcctagtttgctgctgttgcttgagggtacacgttggcaggcacttgtgcaggtgcaacccagtgttgaccccacaaacgcaaccggcctggacgggagagaagcagctccgcactttctgcaggggttactggggttgctaactccaacaggcgaactgggaagtaaggaggccctgtggggtgggctactacgaactgtgggcgcacctctgtacgctgcattccaggaagggctgctgcgagtaactcatagtctccaggatgaggtgttctcgatccttgggcaaccggaaccggatactaacggtcagtgccaaggcggaaatctccagcagctgctgctgtggggggttagacataacctctcttgggatgtgcaggccctggggttccttagtggatcccccccaccccctccagccctgcttcactgtctgagtaccggcgtgccgcttccacgcgcttcacagccatctgcccatattagtcctagacaacggagggccattaccgtcgaagcgctgtag

SEQ ID NO: 242561 - DNA, 5327 bp, synthetic construct
  misc_feature 1..5327: note = Description of Artificial Sequence: Synthetic coding sequence
  source 1..5327: mol_type = other DNA
atggccctgagcctgtggcctctccttctactgctcctgctgctgcttctgctgagttttgccgtcacgctcgcacctacaggaccgcacagcctagaccccggtctttcttttctgaagtccctgctctctaccctggaccaggcccctcaagggagcctctcacgaagccggttttttaccttcctggccaatatctcttcctcttttgagcctggcagaatgggagagggaccggtcggtgagccccctcccctgcagcctccggctctccggttgcacgactttttagttactctgcggggaagcccagactgggaacccatgcttggtcttctgggcgatatgctcgcactgctcgggcaggagcagaccccccgagacttcctcgtacatcaagcgggtgttctaggcggactggttgaagtcttactgggggcactcgtgccgggtggtcctcctaccccaacgcgcccaccatgcacacgggatggtccctctgattgtgtcctggccgcagactggctgccctcactgctactgctgttagaaggaactagatggcaggccctggtgcaggtccagccaagcgtggatcctaccaatgccaccggccttgatgggcgtgaggcggctccccattttctgcagggactactgggattgcttacgcccactggggaactgggcagcaaggaagccctgtggggcggtttactacggacagttggtgctcctttgtacgctgctttccaggaggggttgctgcgggtcacccacagcctgcaggacgaagtgttttcgattttgggccaaccggagccggacactaacggccagtgccagggcggtaacctccagcagctgttgctttggggcgtccggcacaatctgagctgggacgtgcaagccctgggattcctttctggctcaccccctcctccacccgctctcctccattgtttatccactggggtccctctacctagggccagccagccttcggcacacatctcccctcgacagagaagagcgatcacagtagaagccctatgtgagaaccacttaggtccagctccaccctactccatctctaatttctccattcacctgctgtgccagcacacaaaacctgctacacctcagccacacccaagcaccacagcaatctgtcagaccgccgtgtggtatgccgtgagttgggctcctggcgctcagggatggctccaggcttgtcatgatcagtttccggacgagttcctggacgcaatatgttccaacctgtccttctccgccttgtctggatccaacaggcgcctggtcaaacgtctttgtgcaggtctcttacccccacctacatcttgtcctgaggggctgccacctgtacctctaacccccgatattttctggggatgctttttagaaaacgaaaccctttgggctgagaggctctgcggcgaagcctctctacaggctgttcctccatctaaccaggcgtgggtccaacacgtgtgccagggccctacccctgacgtgaccgcttccccaccctgccacattggcccttgcggagagaggtgtccagacggtgggtctttcttggtcatggtctgtgcaaacgacactatgtatgaagtcctggtgcctttctggccttggttggctgggcagtgtagaatcagccgtggcggaaatgacacatgtttcctcgagggcttgttggggcctctgctaccctcgctgcccccacttggaccttcccccctttgtctcacacccggtccgtttctcttggggatgttatcccagcttccaaggtgccagagtagcgtcccggctctggcccacccaacgcggcttcactatttgctgcgtctgctgaccttccttctgggcccaggggcaggaggcgcagaagcccaggggatgttggggagagcgctgttgctttcatccctccctgacaactgtagcttctgggatgcctttaggcccgagggcaggagatccgtgctgagaacgataggcgagtacctcgaacaggatgaagagcagcctaccccaagtgggttcgagcctacggttaacccaagttcaggaatcagcaaaatggagcttctcgcctgtttctcacccgtcctgtgggaccttcttcaacgggagaaatctgtgtgggcattgcagatcctggttcaggcgtatttacacatgccccctgaaaatctccagcagctcgtcctctcagctgagagggaagccgcacaaggctttttgaccctgatgctgcagggcaagctacagggcaaattgcaggttcctccatctgaggagcaggccttgggcaggcttactgcactcttattacagaggtatccaaggctaaccagtcagttattcatcgatctgagtcccttaattccatttctggccgtgagcgatctgatgaggtttccacccagcttgttggcgaatgatagcgtactggccgctattcgcgactatagccccggaatgagacctgagcagaaggaggcactggctaaacgtctcctcgcccctgagctgttcggcgaggtgcctgcatggccacaggaactgttgtgggccgtcttgccactgctgcctcacctcccccttgagaactttctccaactgtctcctcatcagatccaggccctcgaggactcctggcccgcagctggcctcggaccgggtcacgctaggcatgtgctacggtcgcttgtgaaccagtcagtgcaggacggtgaggagcaagttaggagattggggccacttgcatgttttctgtcccccgaagaacttcagtccttggtgcccctcagcgacccaaccggccctgtcgagagagggcttctcgaatgcgccgcaaacggcaccctgtcgccagaaggcagggtggcctacgagctgctcggcgtgcttcggtcatcggggggtgccgtgctgtcccctcgggaactgcgtgtgtgggctcccctcttcagtcagttgggactgcggttcctccaggaattaagtgaaccccaattacgagcaatgctgccagtcctacagggcaccagcgttacgcccgcacaggccgtgctgctcctgggcaggttgcttcccaggcacgacttgtctttggaggaattatgcagcctccatctcctactgcccggtctgagcccccagacgctgcaggctatcccgagaagagtcctcgtcggggcttgctcttgcttggctcctgaactatctcgactgtctgcttgccagaccgctgcactactccagaccttcagagtcaaggacggcgtcaagaatatgggcaccacaggcgctgggcctgccgtgtgcatcccaggtcagccgattcccaccacatggcctgattgtttgctccctttactgccactcaagctccttcaactggactccctggctctgctggccaatagaaggaggtattgggaactgccctggtctgagcagcaggcccaattcctgtggaaaaaaatgcaggtgcctaccaacttaaccttgcgcaatctgcaagcattaggaactttagctggaggcatgtcatgcgagtttttacagcagattaactccatggttgactttcttgaagtcgtccatatgatctaccagcttccaactcgagttcgcggttccctgcgggcatgtatttgggccgaactgcagagaagaatggccatgccggagcccgagtggaccactgtcggtccagagctgaacggccttgacagtaaactcctgctggatttacctatccagttaatggacaggctctccaatgaatcaatcatgttggtggtcgaactcgtgcagcgagccccagaacaactccttgcgttgacacctctccatcaggctgctctggcagagagagccttacagaacctggctcctaaagaaacacccgtgagcggagaagtgctggagactctcgggccactggtgggtttcttgggcaccgagtccactaggcaaattcccttgcagatacttctgtcacatctgtcccagctccagggcttctgtcttggggaaacattcgctaccgaactcgggtggcttctgctccaagagtctgtgctgggcaagcctgagctgtggtcccaggacgaggtcgagcaagccggtcggctggtgtttaccctatccacagaagcaattagcctgataccaagggaggcactgggcccagagacactcgaacgattgttggagaagcagcaatcgtgggagcagtctcgggtcggccagttgtgtagggaacctcagctggctgccaagaaggccgctctggttgccggtgtggtgcgacccgctgctgaagacctgcccgagccagtcccgaactgtgcagacgtcaggggcacttttcctgctgcctggtccgccacgcaaatcgccgagatggagctctcagattttgaggattgtctgactctcttcgcaggcgatcccggattgggcccagaggagctgagagccgctatggggaaagccaagcagctttggggccctcctcgcggatttaggcctgagcagatccttcaactaggccgtctgctgatcgggctcggcgatagggagctccaagagctgattctggtggattggggtgtgctctctactctggggcagatcgacgggtggagtaccacccaactgcgcatcgttgtctccagctttctgaggcagtccggccgacatgtctcccatctagatttcgtacacctgactgccctgggctatacactgtgcggactgaggccagaagaactgcagcatattagctcgtgggaattttcacaggctgcacttttcctgggaacactccatctgcagtgctctgaggagcaactggaagtgttagcccatctactagtgctccctggtggcttcggtcccatttctaactggggccctgagatcttcacagaaatcgggactatcgctgccggtatacctgacctagctttgagcgctctccttcgcggacagattcagggcgtgacgcctctagctatcagcgtgatcccaccacccaagttcgccgtcgtgttttcccctattcagttgtcatccctgacctctgcacaggctgttgcggtgaccccggagcagatggcattcctgagtccagagcagcgcagggctgtagcttgggcccagcacgaggggaaggagagccccgagcagcagggtcgctccacagcctgggggctgcaggattggagtaggccctcttggtctttagtgctaacaatttccttcctcgggcatctgctgta

SEQ ID NO: 242562 - DNA, 1056 bp, synthetic construct
  misc_feature 1..1056: note = Description of Artificial Sequence: Synthetic coding sequence
  source 1..1056: mol_type = other DNA
atggcactgtctctgtggccgttactgctgctcctgctgctgctcctactgctgtctttcgccgtgaccctcgccccaaccgggccacactcattggatccaggcctaagcttcttgaagtcacttcttagcactctagatcaagcccctcagggatccctgtcgcgcagccggttttttacttttctggcaaatatttcctcctcttttgagccagggcgaatgggcgagggaccggttggcgagccacccccactgcagccacccgctttgaggctgcacgactttctcgtaacccttcgagggtcaccagactgggagcccatgctgggtctgttaggagatatgctggccttgcttggacaagaacagacccccagagactttctcgtgcaccaggctggcgtactcggtggcttagtggaagttctactgggtgccctggtaccaggtgggccacctactccaaccaggcccccttgcactagggatggacctagcgactgcgttctggccgctgactggcttccttcattgctgctgttgctagaaggaacacgctggcaggccttagtgcaggttcagccttccgtggatccaacaaatgcaacagggctcgacggcagagaagccgctcctcacttcttacaggggctgttaggtctgcttaccccaacgggcgaactaggtagtaaggaggccctgtggggcggactactgagaacagtgggagcccctctctacgcagctttccaggagggcctgctgcgagttacccattcactgcaggacgaggtcttttctattctgggccaaccagaacccgacacaaatggacagtgccagggcggtaacctgcagcagctgctcttatggggggtgaggcataacttgagttgggatgtccaggctttggggttcttatccggatcacccccaccaccacctgctcttttgcattgcctgtccacaggtgtgccactgcccagggccagtcaacccagtgcgcatatcagcccgcgacagagaagagccataaccgtggaagctctgtag

SEQ ID NO: 242563 - DNA, 2100 bp, synthetic construct
  misc_feature 1..2100: note = Description of Artificial Sequence: Synthetic coding sequence
  source 1..2100: mol_type = other DNA
atggcccttagtctgtggcctctgctgcttctccttcttctgttgctgctgctgtcattcgctgtgacattggcccctactggtcctcacagcttggaccctggattgtcctttctgaaatctcttctgagtacattagaccaggcacctcagggctccttgtctaggtcacggtttttcacctttctggccaacatcagctccagttttgaaccgggacggatgggggaagggcctgttggagaaccacctcctctgcagcctccagctctcagactgcatgacttcctcgtcacattaaggggctctcccgattgggagcccatgctaggtcttctgggcgatatgctggctttactggggcaggaacagacccctagagactttctggtgcatcaggctggagtccttggtgggctggtggaagtgttgctgggtgccctagtgcccggtggaccccctacacccacccagccaccctgtacccgagacggtccgagcgactgtgtcttggccgctgactggctgccttccttgttgctgctgctcgaggggactaggtggcaggctctggtacaggtccagccatccgtcgatcccacaaacgcaaccggcctggatggtcgggaggcagcaccccactttctgcaggggttgctcggcctgctcacaccaactggtgaactgggcagtaaagaagcactgtggggcggactgcttagaacggtgggcgctcctctctacgctgcattccaggaggggctgttgagagtcacccatagcctgcaagatgaagtcttttccatcctcggccagcctgaaccagacacaaacggtcagtgtcagggaggaaatctgcagcagttacttctctggggagtgaggcacaatcttagttgggatgtccaagcacttggcttcctgagtggtagccccccaccgccacctgcactcttgcattgcctgtcgaccggcgtgcctctgccgagggcatcacagccttcggcccatatcagcccaaggcaacgtagagccatcaccgtggaagcattgtgtgagaaccaccttgggcctgccccaccttacagcataagcaatttttctatccacctcttatgccagcacacaaagcccgctaccccccaacctcatccatcgacgacagccatttgtcagaccgcagtctggtatgctgtgtcatgggctccaggcgcacagggatggcttcaagcgtgccatgaccagttcccggacgagttcctcgacgccatctgttcaaacctcagtttcagcgccttgagcggctcaaatcgcagactcgtgaagcgactgtgtgctgggctgctgccccctccgacttcttgcccagaaggattgcctcccgtgcccctgacacccgacattttctggggatgctttcttgaaaatgagaccctgtgggctgaacgcctgtgtggtgaggcctcactgcaggccgtcccacccagtaatcaagcctgggtccagcacgtctgccaggggccaacgccagatgttacagcatccccaccctgccacattggcccatgcggtgaacggtgccctgatggcggttcttttctggtcatggtgtgtgctaacgataccatgtatgaagtgctggtccccttctggccatggctcgccggacagtgccgcatcagccgaggcggaaatgacacatgtttcctcgaggggcttctggggcctctcctcccttcattgcctcctctcggcccttcccccttgtgtctcactccagggccatttctactggggatgctctcgcaacttcctagatgtcagagcagtgtgcctgccctcgctcatcctactcgattgcattaccttctgaggttgttaaccttccttcttgggcctggagctgggggtgctgaggcccagggaatgctgggacgggcactccttctgagttcactccctgacaactgttctttttgggacgcattccgacctgaggggcgaaggtccgtcctgagaacgattggcgagtacaacaaaatgagatcctcacagcctcaccaagcactcaatccactgtcaaccccggctctggtctag

SEQ ID NO: 242564 - DNA, 3009 bp, synthetic construct
  misc_feature 1..3009: note = Description of Artificial Sequence: Synthetic coding sequence
  source 1..3009: mol_type = other DNA
atggagctactggcttgcttttctccagttctttgggacctgctccagagggaaaagtccgtttgggcactgcaaatactcgttcaggcttacctgcacatgcctccagagaacttgcagcagctggtcctgtcagccgaaagagaagcggcacagggcttcctgaccctgatgctacaggggaaattgcagggaaaactacaggttccacctagcgaggagcaagctctggggaggttaactgctctcctgcttcagcgctatccccgactcacctctcagctgtttatagatttaagccctctgatcccatttttggcagtgtctgatctgatgagatttcctccttctctcctcgcaaatgactctgtacagcagggctatagaggcagcgaggagaactctctggaggaggataagggtctgaggccaatgacccctaggagccttgctgcaatcagagattactcccccggtatgcggccagagcaaaaagaggccctggctaagcgtctgctggctcctgagcttttcggagaggtaccagcctggccacaagagttactctgggctgtgttgccacttctgccccacctgccccttgaaaatttcctccagctgtctccacaccagattcaggctttggaggacagttggcccgcagccggactggggccagggcacgcccgacatgtcctgcggagccttgtgaatcagtcagtccaggacggagaggagcaggtgagaagactggggccattagcctgttttctgtcccccgaagaactgcagtcactcgtgcccctgtcagaccccaccggacccgtggaacgtggcctgctggagtgtgcggcaaacggcacactgagcccggaaggcagagttgcttacgaacttctgggggtgctgaggtcaagcggcggtgcagtgctgagccctcgagagctgcgcgtgtgggccccactctttagtcagttaggtttaagattcttacaggaattgagcgaacctcagctaagagctatgttgcccgtgctccagggcacgtctgtgacccctgcccaagcggtgcttcttctggggcgactgttaccaaggcatgatctgctgcaactagacagcctggccctgctggccaacagacggcgttactgggaacttccatggagtgaacagcaagcacagtttctgtggaagaagatgcaggtgccaacaaatctgactctcaggaacctgcaggccctggggacgttggctggcggtatgtcatgtgagttcctgcagcagattaattcaatggtggacttcctggaagtggtgcatatgatctatcaactcccaactagagttaggggaagcttgcgggcttgcatatgggccgagcttcagcgtcgtatggcaatgcccgagccggaatggacaaccgtgggtcccgagctgaatggcctcgatagcaagcttctcttggacctgccaatccaactgatggacagattatctaatgagagcataatgctggtggtggaactggtgcagcgggcacctgagcagctcttagcccttacccctctccaccaggccgctctcgccgaaagggctctccagaacctggccccaaaagaaacccccgtgagcggcgaggtgctggagacactcggcccattggttggatttctcggcactgagtccacccgccaaatcccactccaaatcttgctgagtcatctgagccagttacaaggtttttgtctcggggagacattcgccacagaactgggatggctgctcttgcaggagagcgtgttaggcaaacctgaattgtggagccaggatgaagtggagcaggccggtaggctcgtgtttactctgagcactgaggccattagcctcatcccacgcgaggctttaggaccggaaactctggaaaggctattagagaaacagcagagctgggagcagagtagggtgggccagctctgtcgtgagccacagctggccgctaagaaagccgcactggtggcaggtgtggttcggccagccgctgaggacctgcccgagcccgttcctaattgcgccgatgtgcggggaactttccctgcggcttggtcggctacgcagatcgctgaaatggagctgtctgatttcgaggactgtctcacgctgtttgctggcgatcctggtttagggcctgaggaactgagagccgctatgggcaaggcgaagcagctatggggaccgcctagagggttccggccagagcagattttacagctcggcaggctgttgattggccttggagatagagagttgcaagagctcattctcgttgattggggagtattaagtacgttaggccagatcgacggatggtccactacacagctgcgcattgttgtcagcagcttcctgaggcaaagcggccgtcatgtaagccacttagacttcgtacatctaacggcgctgggctacacactctgtggcttaaggcccgaggaactccagcacatttcaagctgggagttctcacaggctgcccttttcctggggactctgcatctgcaatgcagcgaagagcaattggaagtgctcgctcacctattagtcctgcctggaggatttggccctatatccaactgggggccagaaatcttcactgaaattggaacaatcgcagcaggcatacccgacctggccctgagcgcattgctgagagggcaaattcagggagtgactccacttgctatttctgtcatcccaccgcctaagtttgccgtggtgttttcgccaatccagctatcctcattgacatcagcccaggccgtggccgtcaccccagagcagatggcctttctgagccctgagcagagacgcgcagtcgcttgggcacagcacgagggaaaagaatctcccgaacagcagggtagatccaccgcctggggacttcaagactggtcaagaccatcctggagcttagtgctaacaatctcatttctagggcatctgctgtag

SEQ ID NO: 242565 - DNA, 1890 bp, synthetic construct
  misc_feature 1..1890: note = Description of Artificial Sequence: Synthetic coding sequence
  source 1..1890: mol_type = other DNA
atgtttcgggaccaggtgggtgtcctcgccggatggttcaagggttggaatgagtgcgagcagacagtggccctcctatccctcctgaaacgcgtctcccagactcaggcacgattcctccagctctgcctcgaacactctctggctgactgcgccgagctccatgtgctcgagagagaggcaaatagtccgggaatcatcaatcagtggcaacaggaaagcaaggataaggttatctcactgctactgacacacctgccattactgaagccaggcaacctcgatgcaaaagtggagtacatgaaactgctgccaaaaatccttgcgcatagcatcgagcacaatcagcatattgaagagtcacgccagttgctgagctatgctctaatacacccagccacctctctggaagataggtccgcattagctatgtggctcaaccacctggaagatagaacttctacaagcttcgggggacagaataggggaagatccgattccgtggattacggtcagacccattattatcaccaacggcagaactcagatgacaagctgaatggctggcagaactctcgagactctgggatttgcatcaatgcatccaattggcaggacaagagcatggggtgcgaaaatggccacgtgcccttatactcttcgtcatctgtgcccactacaatcaacacaatcggcacaagcacctcaacaaacgttcccgcttggctgaaatctctcaggctgcacaaatacgctgcccttttttcccagatgacatacgaggagatgatggcactgacggagtgtcagctggaggctcagaatgtgacaaagggagcgcgtcataagatcgtgataagtattcaaaagctgaaggaacgccagaatcttctgaagtctctggagcgggacattatagagggcggtagtctgcgcatccctctacaggagcttcaccaaatgatcctgactcccatcaaggcatactcatccccgagcacaacgcccgaagcacgcagacgtgagccccaggcaccgaggcaaccttctttgatgggtcccgagtctcaatcgcccgactgtaaagacggcgctgccgcaacaggcgctaccgccaccccttcggcgggagccagcggaggcttgcaacctcaccagctgagttcctgcgacggagaattagccgtcgctcctctccccgagggagatttgccgggacagtttactagagtgatgggaaaggtatgtacccagcttctggtgagcagaccagacgaagagaacatatcaagttatctccagctgattgacaagtgtctgatccacgaagccttcaccgaaacccagaagaagaggctgctctcctggaaacagcaagttcagaaactgttcagaagtttcccacggaaaacactgctcgacatttccggttaccggcagcagcgcaaccgagggtttggccagtctaacagcctgcctaccgctggctcggtgggaggtgggatggggcgtcgaaaccccaggcaatatcagatacccagcaggaacgtcccttctgcacggttgggcctcctgggcacgagcggtttcgtaagttccaaccagagaaatacgacagcaactcctactataatgaagcagggcagacaaaatctgtggtttgcgaatcccggtggcagtaatagtatgcctagtcggactcactcatccgtgcagcgtacccgcagcctgcctgtccatacttcaccacaaaatatgctaatgtttcagcagcccgaattccaactccctgtcaccgaaccagacataaacaataggctggagagcctgtgcctgagtatgaccgagcatgccctcggtgatggcgtggacaggacgagtacaatctag

SEQ ID NO: 242566 - DNA, 1893 bp, synthetic construct
  misc_feature 1..1893: note = Description of Artificial Sequence: Synthetic coding sequence
  source 1..1893: mol_type = other DNA
atgatgtttagagaccaggtgggcgtgctggccggatggtttaaggggtggaacgagtgcgaacagactgtcgctctgctttcattgttgaagagagttagtcagacccaggctcggttcctgcagttgtgcctcgagcacagcctggccgattgtgcagaactgcatgtgttggagcgcgaggcaaactctcccggtatcattaaccagtggcagcaggaaagtaaggataaagttattagcctcctcctgactcacctccctttgcttaagccgggaaatctcgatgccaaagtagagtacatgaagctcctcccaaagattctagcgcacagtatcgaacacaaccagcacatagaggagtcaagacagctattgtcatatgcgctgatacatcccgctacctcgctcgaagatagatctgccctggcgatgtggcttaaccacctggaggacagaacctctacgtcgttcggcggacagaaccggggtcgaagcgactcagtcgactatggccagacccactattatcatcagcggcagaacagcgatgataagcttaatggatggcagaattcccgagactccgggatctgtataaatgcatccaattggcaggacaaatctatgggttgcgaaaatgggcatgttcccctgtacagctcttcgtccgtcccaaccaccatcaacaccattggcacttcaacaagcacaaacgtgcctgcttggctgaagtcactgaggcttcataaatatgccgctttgttctctcaaatgacatatgaggagatgatggctctcaccgaatgtcagctcgaggcccagaatgtaaccaaaggggctagacacaagattgtgatttctatccagaaactcaaagaaagacaaaacctgctgaagtccttagaacgagatattattgaaggcggatctcttcggataccattacaggaactgcaccagatgattctgacccccattaaggcttattcatctccctccactacacccgaggctaggagaagagaaccccaagctccaagacagcctagtcttatgggtcccgagtctcaatcgcccgattgtaaagatggcgctgcagccaccggcgctaccgccaccccatccgctggtgcgtctggaggattgcagccccaccaattatccagctgtgacggtgagctggcagtagcgcctctgcccgagggcgacctgcccggtcaatttacccgtgtgatgggaaaggtttgtactcaactcctcgtttcacgcccagacgaggaaaacatatcgtcatacctacagctcatcgacaaatgcttgattcatgaggcttttaccgagacacagaaaaaaagactcctctcttggaaacagcaggtccagaagttgtttcggagtttcccccgaaagacattgctcgatattagcggataccggcagcaaagaaatcgtggatttgggcagagtaatagcctgccaaccgctggctcagtcgggggagggatggggcgtcggaaccccagacagtaccaaatacccagtcgtaatgtgccttcggcacgcctcggtttgctggggaccagcggattcgtgtcaagcaaccagaggaacaccacggcgacccccacgattatgaaacagggacggcagaatctgtggttcgcgaatccagggggaagtaactccatgcctagcaggacacacagcagcgtccagagaacacgctcactgcctgtacatacctccccacaaaacatgctgatgtttcagcagccggagttccaattacctgtcaccgagccagacatcaacaaccggttggagtccctctgcctgtctatgaccgagcatgccctaggtgacggtgtggatcgcacaagtacgatttag

SEQ ID NO: 242567 - DNA, 2154 bp, synthetic construct
  misc_feature 1..2154: note = Description of Artificial Sequence: Synthetic coding sequence
  source 1..2154: mol_type = other DNA
atgtttcgtgatcaagtgggcgtcctcgccggttggttcaaaggatggaacgaatgtgaacaaaccgtggcactcttgtcactgttaaaacgcgtatcacagactcaggccaggtttctgcaactgtgcttggagcactctctggcggactgtgcagaactccacgtgctcgaacgagaagccaatagtccaggaattattaatcagtggcagcaggagagcaaggataaggtgatttccctgttgttgacccacctgcccctgctcaaaccaggcaacctcgatgcaaaagttgagtatatgaagttgctgcccaaaatcctagcacattcgatcgagcacaatcagcacattgaagagtctagacagctgttatcttatgccctgatccaccctgctaccagcctggaagacagatctgctctggctatgtggctgaatcaccttgaggatagaactagcaccagttttgggggacagaatcggggtcggagcgatagcgttgactatggacagactcattattaccaccagcgtcaaaactccgatgataagcttaatgggtggcagaattcacgggattccggcatctgcatcaacgctagcaactggcaggacaagagcatgggatgcgagaacggccacgttcccctgtatagttcttcatcagtgcctactacgatcaatactattggtacgagtacctctactatcctgtctggccaagcccaccacagtcccctaaagaggtcagtgagccttacgccacccatgaacgtccctaaccagcctctgggacacggctggatgtctcacgaggatctgcgcgcaagggggcctcaatgcctcccatccgatcatgcacctttgtcgccccaatcctctgtggcatcaagcgggtcgggcggtagcgaacacctggaagatcagacaacagccaggaatacattccaggaagaagggtcggggatgaaagatgtaccagcctggctcaagtcgctccgtctacacaagtatgctgcgctgttctcacagatgacatatgaggagatgatggctttaaccgagtgtcaactcgaggcccagaacgtgactaagggcgctcggcacaagatagttatctcaatacagaaacttaaagagcgccagaatctgcttaagtccctggagcgagatataatcgagggtggatcactaagaatcccactccaggagttacaccaaatgattctcactcctatcaaagcctattccagcccatctacaactccggaggccaggcggcgtgagcctcaggcccctagacagccctctcttatgggccctgaaagtcagagcccagattgtaaagatggagctgctgctacaggcgctactgccacccccagcgccggtgcctctggcggtcttcagccccaccagctgagcagttgtgatggggagctagctgtggctcctctccccgagggcgacctccccggacaatttacaagagtgatggggaaggtgtgtactcagctcctggtttccagaccagacgaggagaacatctcaagctaccttcagttgatagacaagtgcttaatccacgaagcttttacagaaactcaaaaaaagaggctgctcagctggaaacagcaggtgcagaagctgtttcggtcttttcccagaaagaccctccttgacatctcaggataccgccaacagcgcaacagaggctttggacagtccaattccctgcctacggctgggtcagttggcggaggcatggggagaagaaatcccagacagtatcagataccatcacgaaacgttccatccgccagactcggacttctaggcacctctggcttcgtatcctctaatcagcggaatacaactgcaacccccaccataatgaaacaagggaggcagaatctatggtttgcaaatccgggtggcagcaattctatgcctagccgaacccacagcagcgtgcaacgcacacgcagtctgccagtgcatacaagcccgcagaacatgcttatgtttcagcagcccgagtttcagctcccagtgacagagccagacatcaataacaggttggaaagtctgtgtctctctatgactgaacacgccctgggggacggcgtggaccgcacctcaaccatttag

SEQ ID NO: 242568 - DNA, 2157 bp, synthetic construct
  misc_feature 1..2157: note = Description of Artificial Sequence: Synthetic coding sequence
  source 1..2157: mol_type = other DNA
atgatgttcagggaccaggttggcgtgcttgctggatggttcaaaggttggaacgagtgtgagcagacagtcgctctcctgtccttgctgaaacgggtcagccaaacccaggctcgcttcctgcaactctgcctggagcactcattggccgactgtgcggaacttcatgtcctggagagagaagctaactcacccggaatcattaatcagtggcagcaagagagcaaggataaggtgatctcccttctgttaacccacctgcccctcctcaagccaggcaacctggatgctaaggtagaatacatgaagctcctacctaaaatactcgctcactctatcgaacacaaccagcacattgaagaatcccggcagctgctttcctatgccctgattcacccggcaacaagtttggaggaccggagcgcgctggccatgtggcttaatcatctggaggacaggacttccacatcttttgggggtcagaatcgaggacgaagtgacagcgtggattacgggcaaacccactactaccatcagcgccaaaacagcgatgacaagttgaacggctggcagaacagcagagattcgggcatctgtatcaatgcatccaattggcaagacaagtctatgggttgcgaaaacgggcacgttccactgtatagcagctcttctgtccccaccaccatcaacaccatcggcacttccacaagtactatcctgtccgggcaggcacaccatagtccactgaaaaggtcggttagtcttacacctccaatgaacgtgcccaaccagccactgggacatgggtggatgagccacgaagatctccgggctaggggaccacaatgtcttccctctgaccatgcaccattgagcccccaaagcagtgtcgctagttccgggtctggcggaagtgaacatttggaggaccagacaaccgctaggaacacttttcaggaggagggatccgggatgaaagacgtgcctgcctggctcaaatctctgcggctccacaagtatgccgcactttttagccagatgacatatgaagaaatgatggccctaaccgaatgtcagctggaggcacaaaacgtcactaagggggcacggcataaaattgtaatttcaatccagaagcttaaagaacgacagaatctgctcaagtctctggagcgcgacatcattgaaggaggcagcctaaggatacccttacaggagttgcatcagatgatactcacccctattaaggcatactcctcccctagtaccacacccgaggctcgtagacgcgaaccccaggcacctcgccaaccctcattgatggggccagaatcccagagtccagattgcaaggacggagccgcagcaacaggagctacagccaccccaagcgccggagcatctggcggactacagccccatcagctgagcagctgtgatggggagctggctgtggccccattgcctgagggagatctgcctggtcagttcactcgagtaatgggcaaggtatgcacgcagctgctagtgtctagacccgacgaggaaaacatctccagctatcttcagctcatagacaaatgcttgatccatgaagcttttaccgagacacaaaagaaacgcctcctctcatggaagcagcaggtgcagaaactgttcaggagttttccacggaaaacactcctggatatctctggctatcgacagcagcggaataggggattcggacagagcaattccctcccgacagctgggtcagtgggcggagggatggggagaaggaacccaaggcagtaccagattccatctcgcaatgtaccgtcagctcgcctggggttgctcggaacatcaggttttgtgtcttctaaccaaagaaacacaaccgccacacctaccatcatgaagcagggaagacagaacctctggttcgctaaccccggtggctctaacagcatgccttccagaacacacagcagtgtgcagagaacccgtagtctacctgtgcatacatcgccacagaacatgctgatgtttcaacagcccgagttccagctgcctgtcaccgagcctgatatcaacaacagactggaaagtctgtgtctgtcgatgacagagcacgcacttggagacggggtggaccggacaagcacaatttag

SEQ ID NO: 242569 - DNA, 2157 bp, synthetic construct
  misc_feature 1..2157: note = Description of Artificial Sequence: Synthetic coding sequence
  source 1..2157: mol_type = other DNA
atgatgttcagggaccaggtcggggtgctggccggatggtttaaaggatggaacgagtgtgaacagaccgtggccctgctgagtctactgaagagagtgtcccaaacccaggccaggtttctacagttgtgcctggaacatagcctagccgactgtgcggagctccacgtcctggaacgtgaagcaaattcaccaggaatcattaaccagtggcagcaggagtcgaaagacaaagttatcagtctgcttttgactcatctccctcttcttaaacccggaaatctcgacgctaaagtggaatatatgaagctgctgcccaaaattctcgcccactctatcgagcacaaccagcatatcgaagaatccagacagctgctgagttacgctctcatccaccccgctacctcacttgaagataggtccgcactcgctatgtggctgaatcacctggaagacagaacctcgacaagcttcggaggacaaaaccggggacgatcggatagcgtggactatggtcagacacactattaccatcagaggcagaactccgacgataaactgaacgggtggcaaaattcacgcgattccgggatctgtatcaacgcctctaactggcaagacaagtcaatgggctgcgagaatgggcatgtgccactttactcttcatcctccgtcccaacgacaattaacacaatcgggacgtccacatccactattctttcaggccaggcccaccactctcctctgaaacgctccgtgagtttaacaccaccaatgaacgtgcccaaccagccattgggccacggctggatgagccacgaggacctgagagccagggggccacagtgtctgccctccgatcacgcccctttgtctccacagagctccgtggctagcagcggtagtggcggaagcgaacacctcgaagaccagacaacagcacggaacaccttccaagaagagggaagcggtatgaaggacgtcccggcttggcttaaaagtcttaggcttcacaagtatgcagccctgttctcccagatgacctatgaggaaatgatggctctcaccgagtgtcagctcgaggcccagaacgtgactaaaggagctcgtcataagatcgtgatatcaattcagaaactgaaggaacgccagaaccttctcaaatcccttgaaagggacatcatagagggagggtccctcagaattcccttacaggaattgcatcaaatgatcctgactccgatcaaggcctattcctctccaagtacaactccagaagcccgacgaagagagcctcaggcccctagacagcctagtttaatgggccctgaatctcagagccccgactgcaaagatggggcagccgctactggcgctaccgccactcctagcgctggcgcaagtggcggattacagccacatcagcttagctcttgcgatggagagctggctgtcgctcccctccctgaaggcgaccttcccggtcagttcacgcgagtgatgggcaaggtctgcacacagttactggtaagccggcctgatgaagaaaacatctcatcctatttgcagctgattgacaagtgtttgatccacgaagcgttcaccgagacccagaagaagcgtctcctctcgtggaaacaacaggtccagaagttgttccgctcgtttccccgaaagacactgcttgatattagcggctatcggcagcagcggaaccgagggtttggacagtccaacagcttaccgactgcgggaagcgtagggggagggatgggcagacgcaatcctcgacagtatcaaatcccgtctcgtaacgtacccagtgccagactgggcttactcggaacttccggtttcgtgtcttccaaccagaggaacacaacagcgacgcctacgatcatgaaacagggaaggcagaacctctggttcgctaaccccggagggtctaatagtatgccgagccgaactcattctagcgtgcagaggactagatccctgccggtgcacacttctccccagaatatgcttatgttccagcaacctgagtttcagctcccggttacagagccagatattaataacagactagagtccctgtgtctctccatgacagagcatgctctgggggacggagtggacaggacctccacaatatag

SEQ ID NO: 242570 - DNA, 1038 bp, synthetic construct
  misc_feature 1..1038: note = Description of Artificial Sequence: Synthetic coding sequence
  source 1..1038: mol_type = other DNA
atgatcttgacccctatcaaggcctattcaagccccagcacaacacctgaggccagacgtcgtgagcctcaggccccacggcaaccgagcttaatggggccagaatcccagtcccctgactgcaaagacggcgctgcagccacaggagcaactgcaactccttcagccggtgcatctggaggactgcagccgcaccagctaagctcttgtgatggcgagttggccgttgcccctttgccggagggggacctccccggacaatttacacgcgtgatgggaaaagtgtgtacccagctcctggtgagccgcccagacgaggagaatatcagctcctatctgcagctgatcgacaaatgtctgatccatgaggcctttacagagacacagaagaaaagactcctgagttggaagcagcaggttcaaaagctttttagaagttttcctaggaagaccctgctggatatctccggttatcgccagcaacgcaaccggggattcggccaatctaatagcttgccaacagccggtagcgtcggtggtgggatgggacgcagaaacccccgtcagtatcagattccttcccgtaatgtaccttccgcccgactaggactcctggggacctctggctttgtgagttcaaatcaaagaaacactactgcaactccgactattatgaaacaagggcgtcagaacctgtggttcgcaaaccctggagggtctaatagtatgccttctcgcacacactcctccgtgcagaggaccaggtccctgcctgtgcacactagcccccaaaatatgttaatgttccagcaaccaggcagtcaggtgcattccggcttgtgcttgaccgatctgaggggttggctcagcttgtctggagcaccttcgatgccggctctgacagttcctaaatccagtcagggagaatttcaactccctgtaactgagcccgacattaacaatcgcctcgaaagtttgtgcttaagcatgactgaacacgcactaggggatggcgtggatcgaactagtaccatttag

SEQ ID NO: 242571 - DNA, 981 bp, synthetic construct
  misc_feature 1..981: note = Description of Artificial Sequence: Synthetic coding sequence
  source 1..981: mol_type = other DNA
atggcaggacccaaccagctatgtatccgaaggtggaccactaagcacgtcgccgtctggctcaaggatgaagggttttttgagtatgtggatattctctgtaacaaacatagactcgacggcatcaccctcctgacattgaccgagtacgacctccggagcccacccctggaaatcaaggtcttaggcgatattaagcgcctgatgctcagtgtccgcaagctgcagaaaattcacattgatgtgcttgaagagatgggctataattctgatagccccatgggctcaatgacccccttcatcagcgcgctacagagtaccgactggctctgtaatggggagctttcccacgattgcgacgggccaatcacagatttaaattcggaccaatatcagtacatgaacggcaagaacaagcacagcgtgagacgacttgatcctgaatactggaagacaattctctcctgtatctacgtcttcatcgtgtttgggtttacaagtttcatcatggtgatcgtacacgaacgcgtgcccgatatgcaaacttatccacctcttccggacatatttcttgactccgtgcctcgcatcccatgggcattcgccatgacagaggtgtgtgggatgattttatgctatatctggttacttgtgctccttcttcacaaacaccgatccatcctcctcaggagactctgttcacttatgggcactgtcttcctcctcaggtgttttacgatgttcgtgacctctctgagtgttcccggacagcatctgcagtgtactgggaaaatctacggctccgtgtgggagaagctgcatcgcgcatttgctatttggtccgggttcggaatgacactgacaggagtccatacatgcggcgactatatgttcagcggacacacagtggtgttgacaatgctgaattttttcgtgaccgagtgcaagtacctgttctcggcatccatgagaattaggtag

SEQ ID NO: 242572 - DNA, 1437 bp, synthetic construct
  misc_feature 1..1437: note = Description of Artificial Sequence: Synthetic coding sequence
  source 1..1437: mol_type = other DNA
atgcccgcaagaagtagacataggccccgtctacacagtggcagcccgcctagggccccaccaccaccacttgaagcacttcactccggggaagccggacgggcacccgacagcgatggcggatcggatgcggacagcgaagtcggcccaggctcaccaacccggacagctgaggctgctgaggaggagatggcaggacccaaccagctgtgcattagaaggtggacaaccaagcacgtggctgtctggctgaaagacgaagggttttttgagtatgtcgacatactatgcaataagcatcgtctggatgggatcaccttgttaaccttaacagaatacgatcttcgtagcccccctttagagatcaaggtcctgggcgatatcaagcggttaatgctgtccgtcaggaagctacaaaaaatccacatagacgtgctggaggagatgggctacaactcagatagcccgatgggtagcatgactcctttcatttctgctctgcagagcaccgattggttatgcaatggggaactttcacatgattgtgatgggccaatcaccgacctgaacagcgaccagtatcagtacatgaacggaaaaaataagcattccgtcaggaggctggacccagagtattggaagacaatcctttcttgtatatatgtcttcattgtgtttgggtttacctctttcatcatggtgatcgtccacgaacgcgtgccagacatgcagacatatcctccactgccagacatctttcttgactcagtccctcgaatcccgtgggcatttgctatgacagaggtatgcggaatgattctgtgctacatctggctgcttgtactgctgcttcacaaacataggtccattttgctgcgccgtctgtgttctttaatgggcacggtgttcctcttgaggtgctttaccatgttcgttacatccctcagtgtaccaggacagcacctgcagtgcaccggcaaaatatacggctccgtatgggagaaacttcatcgggctttcgctatctggtctggtttcgggatgaccttaactggcgtacacacatgcggagattatatgttcagcggccatactgttgtgctcacaatgttaaacttctttgtcactgaatacaccccacggtcttggaacttcctgcacacactgagctgggtgctgaacttattcggtattttctttatccttgctgcccatgaacattacagcattgatgtgtttatcgccttctacattaccacccggctgttcctctattaccacacacttgctaatacacgcgcttaccagcaatcaagaagggctcggatctggttccctatgttttccttttttgagtgcaacgtgaacggcacagtgcccaatgagtactgctggccattcagtaagccagctattatgaaacgcctgatcggttag

SEQ ID NO: 242573 - DNA, 765 bp, synthetic construct
  misc_feature 1..765: note = Description of Artificial Sequence: Synthetic coding sequence
  source 1..765: mol_type = other DNA
atggcagggccaaaccaattatgtatccgacgatggaccacaaaacacgtggcggtgtggctgaaggatgaggggttcttcgaatatgtggatatactgtgtaataagcataggctggacggcattactctacttaccctaacagaatacgacctgcgcagccctccactagagattaaggttctgggagatattaaaaggctcatgttatctgtgcgcaaactgcagaagatccatatcgacgtcctggaggaaatgggttacaatagtgactcccctatgggatccatgacccctttcatcagtgcccttcagtctaccgattggttgtgcaatggagagctctcacatgactgcgacggcccaataaccgatctcaattcagaccagtatcaatacatgaatggaaagaataagcactccgtccgtcgtcttgacccagagtattggaagactatcctgagttgcatatatgtctttatcgtctttggcttcacgagctttatcatggtcattgtccacgagcgtgtacctgatatgcagacttatccacccctgcctgacatctttttggatagcgtcccaaggattccctgggcctttgctatgacagaagtgtgcgggatgattctgtgctacatttggctgctggtgttgctgcttcataagcaccggagcatactgctcagacgattgtgttcccttatgggaactgtgttcttgctgaggtgctttaccatgtttgtgacatccttaagtgtctag

SEQ ID NO: 242574 - DNA, 1248 bp, synthetic construct
  misc_feature 1..1248: note = Description of Artificial Sequence: Synthetic coding sequence
  source 1..1248: mol_type = other DNA
atggctgggccaaatcagctgtgcatcagacgatggaccacaaagcacgtggccgtgtggctcaaggacgagggctttttcgagtatgttgacattctatgtaacaagcatcggttagatgggatcacactgctgactctgactgaatatgacctgaggagcccacccttagagataaaagtactgggcgacatcaagaggctgatgttgtcggtgaggaagctgcagaagatccatatcgacgtactggaggagatgggttacaacagcgactcacctatgggaagcatgaccccctttatatccgccctgcagagcacagactggttatgtaatggcgagctgagccacgactgtgatggcccaatcactgaccttaatagtgaccagtatcaatatatgaacggcaaaaataaacatagcgtgcggcgattggaccccgaatattggaagacaatcttgagttgtatttatgtttttatcgttttcggtttcacctctttcataatggtcatcgtccacgagcgtgtgccagacatgcagacctatccaccattgcccgacatctttctcgactcagtgcccaggattccttgggcgttcgcgatgaccgaggtatgtggcatgatactgtgttacatttggctgttggttctgctgctgcataaacatagaagtatcttactgcgacgcttgtgctccttaatgggcacagtgttcctgttacggtgctttactatgttcgtcacatctctaagtgtccctggacagcatctacaatgtacagggaagatctatgggtctgtgtgggaaaagttgcaccgggcattcgccatctggagtggatttggcatgacactgacaggagtgcacacatgtggcgattacatgtttagtggacacaccgtagtgcttaccatgctgaatttttttgtcacggagtacacgcccagaagttggaacttcctgcacacactgagctgggtactgaatctcttcgggatcttttttatcctcgcggctcacgagcattatagcatcgatgtgtttatcgcattctacattaccacaagactctttctctactatcacacgctggccaatacccgggcatatcaacaatccaggcgggctaggatctggtttcccatgttctccttttttgagtgcaacgttaacggaacagtacccaacgagtattgctggcctttctcgaagccagctatcatgaaacggcttattggctag

SEQ ID NO: 242575 - DNA, 4770 bp, synthetic construct
  misc_feature 1..4770: note = Description of Artificial Sequence: Synthetic coding sequence
  source 1..4770: mol_type = other DNA
atggctaagcagttgaatttaccggagaacactgacgactggaccaaggaagacgtgaatcagtggttggaaagccacaagatagatcagaagcacagggagatcctcacagaacaggacgtcaatggagccgtgcttaagtggctgaaaaaagagcacctggttgatatgggtatcacccacgggcctgccatccagattgaggaactgttcaaagagcttcgcaaaacagccattgaggattccatccagactagtaagatgggcaagccctccaaaaatgctccaaaggatcagacagtgtctcagaaggagaggagggaaaccagcaaacagaaacagaaaggtaaagagaatcctgatatggcgaatccctccgccatgtctactaccgcaaaaggaagcaagagtctaaaggtcgaactaatagaggataaaattgactatactaaggaacggcagccctcaattgatctcacttgcgtgtcctaccctttcgacgaattttcaaacccgtatcggtacaaattagattttagtctccagcccgagaccggacctgggaatcttattgaccccattcatgaattcaaggcatttacaaacaccgctactgccaccgaagaagatgttaagatgaaatttagtaacgaggtgttcagatttgccagcgcctgtatgaacagcaggaccaatggaactattcacttcggcgtgaaggataagccgcatggcaaaattgtaggcatcaaagtgacaaatgacactaaagaagccctgatcaatcatttcaacttgatgatcaacaaatactttgaggaccatcaggtccagcaggcgaagaagtgtattcgggaacctagattcgtcgaggttttgctgcctaactccaccttgagtgaccgctttgtcatcgaagtagacatcattccacagtttagcgaatgtcagtatgattacttccagatcaagatgcagaattataacaataaaatttgggagcagagcaaaaaatttagcctgtttgtccgcgatggaacctccagcaaggatataacaaagaacaaggttgatttccgggcttttaaggcagatttcaaaactcttgcggagagcagaaaggctgcagaagagaaatttcgtgctaaaacaaacaaaaaagagcgtgaaggccctaaactagttaaactgctcaccggaaaccaggatttgcttgataacagctattatgaacagtacatccttgtgacaaacaagtgtcacccagatcagaccaaacacctggattttcttaaagagataaagtggtttgccgtgctcgagtttgaccctgaatcgaatatcaacggagtggttaaggcctacaaagaatccagagtcgccaacctgcactttcctagtgtttacgtggagcaaaagactaccccaaacgagacaatctccaccctgaatctttatcaccagccctcatggattttttgcaatggacggctggatttagacagtgaaaagtacaagccttttgatccatcttcgtggcagagagagagagcttccgatgtgaggaaacttattagcttcctgacacatgaagatattatgcccagaggcaaattcctggtggtcttcctgctcctaagtagcgtggatgaccctagagatcccctgatcgagactttctgtgctttttaccaggatctaaaggggatggagaacatcctgtgtatatgtgtgcacccacacatcttccaggggtggaaagatctgctcgaggctagactgataaaacaccaggacgaaatctcctcacagtgcatttcagcactcagcctggaggagataaatggcaccatcttgaagcttaaatcggttactcaaagtagcaagcgtctcctcccatccatcgggctgtcgacagtgctgttaaaaaaagaagaggacatcatgaccgcgctggagattatctgcgaaaacgaatgcgaaggtactctactggagaaggataagaacaagttcctggagttcaaagcgtcaaaggaggaggacttctacagaggaggcaaagtgagctggtggaatttctacttcagttccgagagttattcttctcctttcgtgaaacgcgataaatatgagcgcttggaggctatgatccagaattgtgctgactccagcaagccaacgtctacgaagataattcacctctatcaccatccgggatgcgggggaacaaccctagccatgcacattctctgggagctgagaaaaaagtttaggtgtgcagttctgaaaaataaaaccgttgacttttctgaaatcggagaacaagtcacaagtctcataacatatggcgctatgaatcgccaagagtatgtacctgtcctgctgttagttgacgattttgaagagcaggataacgtgtacctgctgcagtattccatacaaacggctatcgcaaaaaagtatattcgctacgagaaaccgctggtaataatcttaaactgcatgaggtctcagaatcccgaaaagagtgcgaggatacccgattctattgcagtaattcagcagctgtctccaaaggaacagcgcgctttcgaactgaaactcaaggagataaaagaacagcacaaaaacttcgaagatttctacagtttcatgataatgaagacgaactttaacaaggaatacatcgaaaatgtggtccgcaatatccttaagggtcaaaacatatttacaaaagaagccaaacttttctcgttcctggcactcttaaactcgtacgtccctgatactactattagtctgtctcaatgcgaaaaatttctaggaatagggaataagaaggcattttggggtacagagaaatttgaggacaagatgggtacctattccaccattttaattaagacagaggtaatcgagtgtggtaattactgcggcgtgcgaatcatacattccttgatagcggaatttagtctcgaggagttgaagaaatcctatcacttgaacaagtcccagattatgctcgatatgctgactgagaatctgttttttgacaccggaatgggcaagtcaaaatttctgcaggatatgcacaccttactgctgaccagacacagggacgagcatgaaggggagactggaaactggttctctccgtttatcgaagcactgcacaaggacgagggcaacgaagctgtcgaagcagttctgttggagtcgattcacagattcaaccccaacgcgttcatttgtcaggccctcgcgaggcacttttacattaaaaagaaggatttcggtaatgccctgaattgggctaagcaagctaagatcatcgagcctgataattcatacatcagcgacacactgggacaggtctataagtctaagatcaggtggtggattgaagagaacggagggaacgggaacatcagtgtggacgacctgatcgcgctgctcgatcttgcggagcacgctagctctgcttttaaagagtctcagcagcagtccgaggaccgggagtacgaggtgaaagagagactgtaccccaagagtaagcggagatacgacacctacaatattgcgggatatcaaggagaaatcgaggttggtctgtacaccattcagatcttacagttaatccctttttttgataacaaaaacgagctgtctaagcgttacatggttaacttcgtgtcaggtagcagtgacataccaggcgatcctaacaacgaatataagttggcactgaagaactatatcccttacttaacaaagctgaagttctcactgaagaagagctttgatttcttcgacgagtatttcgtgcttttgaagcccagaaataatatcaagcagaacgaagaagccaagacccgcaggaaagtggccggatatttcaaaaaatacgttgacatcttctgtttactggaagagagccaaaacaacaccgggctgggttccaagttttcagaaccactacaggtggaaaggtgtaggaggaacttggtggccctcaaggcagacaaattctccggtctgttagagtatttaattaagtctcaggaggatgctatcagcacaatgaagtgcattgtgaacgaatatacatttctcctggagcaatgcaccgtgaaaatccagagcaaagagaaactcaacttcatacttgccaacatcatacttagctgcattcagcctacctcaagactggttaaacctgtcgagaagttaaaagaccagcttagggaggtgctacagccaataggcctaacgtaccaattctctgagccctactttcttgcaagtctgctgttctggccggaaaaccaacagctcgatcagcattccgaacagatgaaagagtatgcacaggcactaaagaacagctttaaggggcaatataagcatatgcaccgcacaaagcaacccatcgcttactttttcctggggaaggggaagagactcgaaaggttggtgcataaaggaaaaatcgatcagtgtttcaagaagaccccggacataaattccctgtggcagtcaggcgatgtttggaaggaagagaaagtgcaggaattattgctgcgcttgcagggtcgcgctgaaaacaattgtttgtatatcgagtacggcattaacgagaagattaccatccccattacacctgcgtttcttggacagctccgttccgggaggtcaatagagaaggtgagcttctatctgggattcagcatcggaggccctctggcatacgacatcgaaatcgtgtag

SEQ ID NO: 242576 - DNA, 3852 bp, synthetic construct
  misc_feature 1..3852: note = Description of Artificial Sequence: Synthetic coding sequence
  source 1..3852: mol_type = other DNA
atggccaaacaactgaatttaccagagaatactgatgactggacaaaagaggacgtcaaccagtggttagaatcacataaaatcgatcagaaacatcgggagattctgaccgaacaggatgtcaatggcgctgtgcttaaatggttaaaaaaagaacatctggtagatatggggattacgcacggaccggcaattcagatcgaggagctttttaaggaactgcgcaagactgccattgaagactccatacagacgtccaagatgggcaagcctagcaagaacgcaccaaaggatcagaccgtatcgcaaaaagagcggagagagactagcaaacagaagcagaaaggtaaggagaacccggacatggcaaacccttcagccatgtctacgaccgccaagggctcaaagtccttaaaggtggagctcatagaagataagatcgactatacgaaagaacgccagccatccattgacctcacatgcgtcagctaccctttcgatgaattttccaatccttaccggtataagctagacttcagcctgcaaccagagaccggaccaggaaacctgatagatccaattcatgagtttaaggcctttacgaacactgccaccgcaactgaagaggatgttaaaatgaagttcagcaatgaggtctttcgctttgcttcagcatgtatgaatagtcggaccaatggcaccatccactttggggtaaaagacaaaccacatgggaagatcgtgggcattaaggtgactaacgataccaaagaggctctgataaatcacttcaacttgatgatcaacaaatatttcgaggaccaccaggtgcaacaggctaagaaatgtatccgggaaccccgattcgtggaggtgctcctccctaactctacgctgtcagatcgatttgtcatcgaggtggacatcatcccccagttctccgaatgccagtacgactactttcaaatcaaaatgcagaactataataataagatctgggaacagtccaaaaaattcagcttgttcgtgcgcgacggaaccagttcaaaggatatcactaagaacaaagtggactttcgtgcctttaaggccgactttaagacattagccgagtctagaaaggctgcagaagagaagttccgggctaaaacaaacaaaaaggagcgggaagggcctaaactcgttaagctgctgactgggaaccaggatctgcttgataacagctattacgagcagtatatactcgtgaccaataaatgccaccctgaccagacaaaacacctggactttctcaaagagatcaaatggtttgcggtgttggaattcgaccctgaaagtaatatcaatggcgtagtgaaggcatataaagagagcagagtagcaaatctgcactttcccagcgtttatgtggaacagaagactactccaaacgaaacaataagcactctcaatctctatcatcagccatcctggatcttttgtaacggtagattggacttagattcagagaagtacaaaccctttgatccttcaagctggcaaagagaacgggcttccgatgtcaggaaactgataagtttccttacgcacgaagatattatgcctagggggaagttcctggtggtttttttactcctaagctcagttgatgaccctagagaccctttaatcgagacattctgcgccttttaccaggatctgaaggggatggagaatatactgtgcatctgtgtgcatccacatattttccagggatggaaagacttgctggaggcccgtctgatcaaacaccaggatgagatatcgtcacagtgtatcagtgccctgagcttggaagaaattaatggcacaatactgaaacttaaatctgtgacacaaagttccaaaagactcctccccagtatcggcctcagcaccgtgctgctgaaaaaggaagaagatattatgaccgctctggagataatttgcgaaaatgagtgtgaggggactctgctggaaaaagataagaataagttcctggaattcaaagcctctaaagaggaggatttctatagaggcggaaaggtttcgtggtggaacttctacttttcttccgaatcctacagctcaccatttgtcaagcgcgacaaatacgagaggctggaggctatgatccaaaattgcgcagacagttcaaagcccacctcaaccaagatcattcacctgtatcatcaccccggttgtggaggtactaccctggcaatgcacatcctgtgggaacttaggaaaaaatttcggtgcgcggttctcaagaacaagaccgtggatttctcggagatcggagagcaagtcacatccctaattacttacggcgctatgaatagacaggagtatgtcccagtactgcttctagtggatgactttgaggagcaagataatgtgtacttgcttcaatattctattcagacagccatagctaagaagtatatccgatacgagaaacctctggtgattattctcaactgtatgcgctcccaaaaccctgagaaaagcgcccgaattcctgacagtatcgctgtgattcagcagttatcacccaaagagcaacgggcttttgaactgaaactgaaagagatcaaagagcagcacaagaattttgaagacttttattccttcatgatcatgaagacaaactttaacaaagaatatattgagaatgtcgtgaggaatatcctaaagggccaaaatattttcacaaaggaagcaaagttgttcagctttctagcccttctaaattcatatgtgcctgacactaccattagcctctcccagtgcgagaaatttctgggaatcggtaacaagaaggcattctgggggacagagaaattcgaggacaaaatgggaacatactctactatcttgataaagacagaggtgatcgagtgtggtaattactgtggagtcagaataatacattccctgatcgccgaattcagcctggaggaacttaaaaaatcttaccatctgaacaaatcccagattatgcttgatatgctcacggaaaaccttttcttcgacacaggtatgggaaagtctaagtttctgcaggatatgcataccctgctacttacgagacacagagatgaacacgaaggggaaacaggaaactggttttctccttttatcgaggccttacataaggacgaaggtaatgaggcagtcgaggctgtgttactggagagcatccaccgctttaatcccaacgccttcatttgccaggctctcgctcgtcacttctatataaagaagaaagactttggcaatgcacttaactgggccaagcaggccaagatcatcgaacctgataatagttacatatcagatacgctgggacaagtctacaagagcaaaatcaggtggtggatagaggaaaacgggggaaacgggaacatatctgtcgatgatctaatcgctttactggacctggccgagcatgcctcatcggccttcaaggagagccagcaacagagcgaggacagggagtacgaagttaaagaaagattgtacccaaagagcaaacgcaggtatgacacatataatatcgccggataccaaggagaaattgaggtgggcctgtacaccattcaaattctgcagctgatccccttcttcgacaataaaaacgagctgtctaaacgctacatggtgaacttcgtctccggttcctcagatatccccggagatccaaacaacgaatacaagctggcacttaaaaattacatcccctacctgactaagctcaagtttagcctgaagaagagtttcgatttcttcgacgaatatttcgtactcttgaagcccaggaacaattag

SEQ ID NO: 242577 - DNA, 4755 bp, synthetic construct
  misc_feature 1..4755: note = Description of Artificial Sequence: Synthetic coding sequence
  source 1..4755: mol_type = other DNA
atgagtaagcaggtttctctgcctgaaatgatcaaagattggaccaaggagcatgtcaagaaatgggtgaacgaggaccttaagattaatgagcagtacggtcaaatcctcctgtcggaggaagtgaccggcctggtgctgcaggagctgaccgaaaaggacttggttgagatgggcctgccttgggggcctgcgctgctcataaagcgcagctataacaagttgaactccaagtcacctgagtccgacaaccacgaccccggtcagctggataatagcaagccctctaagacagaacatcagaagaatcccaagcacaccaaaaaagaggaggagaactccatgagcagcaacattgactatgaccctcgggaaattcgtgatattaagcaagaggagtctattttgatgaaagagaacgtgctcgatgaggtcgcaaacgctaagcacaaaaaaaagggcaaactgaaaccagagcagctaacctgtatgccttatccttttgatcagtttcacgatagccaccgttacattgagcactacacactacagcccgagaccggagcgctgaatttaattgaccctatccacgaattcaaggcactcactaacaccgagaccgcgaccgaggtggatataaaaatgaagttttcgaacgaggtctttaggttcgcctccgcctgcatgaactctcgtacaaatgggacaatacatttcggcgtcaaagacaagccccacggggagattgtcggcgtgaagatcacttccaaggctgcattcatagatcattttaacgtcatgatcaaaaaatatttcgaggaaagtgagattaatgaagcgaagaagtgtataagggagcctcgcttcgtagaggtgctgctacaaaacaacacccctagcgatagatttgtgatcgaagtagatactatcccgaaacatagcatttgtaacgataaatatttctacatccaaatgcaaatatgcaaggacaaaatctggaagcaaaatcagaatctgtcactgttcgttcgcgaaggagcatcatcgagagatattttggccaactccaaacagcgagatgtcgattttaaggcctttctgcaaaatctgaagtcgctcgtcgccagtcgcaaagaggccgaagaggagtacggcatgaaagccatgaagaaggaaagtgagggtctgaaattagtaaagctgctcatcggaaatcgtgattccttggacaacagttactacgactggtacatccttgtgacaaacaagtgtcacccgaaccagatcaagcacctggatttcctaaaagagatcaaatggtttgccgtgctggaattcgaccctgagtcgatgattaacggggtggtgaaggcttacaaagagagtagagtggctaacctgcattttcccaatcagtacgaagacaagaccacgaacatgtgggagaagatctccactctaaatctgtatcagcagccctcgtggatattctgtaacggcaggagcgaccttaagagtgagacctataagccactcgagcctcacctgtggcagagagagcgcgcaagcgaagtgcggaagctgatattgtttctgactgatgaaaatataatgacaagggggaagttcttggtcgtcttcctgttgctgagttctgttgaaagccccggtgaccctctcattgagactttctgggctttctaccaggctctgaagggtatggagaatatgctttgtatctctgtcaatagccacatatatcagaggtggaaagatctcttgcagactcgcatgaaaatggaagatgaactgacaaatcacagcatttccactctgaacatcgaactggtgaacagcacaatcctcaagctgaagtctgtcacgcggagtagtaggcggtttctacccgctcgcggttcatccagtgtcatcctcgaaaaaaagaaggaggatgtacttaccgccctggaaattttgtgcgagaatgagtgtacagagaccgacattgaaaaggataagtctaagttcctcgaattcaagaagtcaaaggaagaacatttctatcgtggtgggaaagtgtcctggtggaatttctatttctccagcgaaaactattcatctgattttgtgaaaagggattcatacgagaagctgaaggacctgatacactgttgggcagaaagcccaaaacccattttcgcaaaaattatcaatctctaccaccaccctggctgtggcggaacgaccctggccatgcatgttctctgggacctgaagaagaattttcgctgtgcggtcctcaaaaataagaccacagattttgctgagatcgccgaacaagtgattaatctggttacataccgggctaagtctcatcaggattacatccctgttttattgctggtggacgattttgaagaacaagaaaacgtgtactttctgcagaacgcgatccattccgttcttgccgagaaggatctcagatacgagaagacgctggtgatcatcctgaattgtatgagatcacgcaacccagacgaatcagctaaactagcagattccattgccctcaattatcaactgagctctaaggaacagcgggctttcggcgcaaaactcaaagagatcgagaagcagcataagaattgtgagaatttttatagtttcatgataatgaagagcaacttcgatgagacctacatcgaaaatgttgtgagaaacatcctgaaaggccaggatgtggattctaaggaggcacagttgatatccttcctggcattattatcgagttacgttaccgactccaccatatctgttagccagtgtgaaatttttctgggtattatttacacttctactccctgggagcctgagagcctcgaagataaaatggggacctatagcaccctgctgattaagaccgaggtggcagaatacggacgttacacaggagtcagaatcattcaccccctcattgctctgtactgtctgaaggaacttgagaggagctatcatcttgataagtgtcagattgccctcaatatcttggaggaaaacttgttctatgattccggtataggaagagataagtttcaacatgacgtgcagacgctcctgttaaccagacaaagaaaggtctacggtgacgagacagatacgctgttctcccctctcatggaggctctccagaacaaagatattgagaaggtattgtctgcgggatccagaagatttccacagaacgcctttatctgccaggccctggcgaggcacttctacattaaagagaaggactttaacaccgctcttgactgggccagacaggcaaaaatgaaggcccctaagaacagttacatcagcgatacacttggccaagtctacaaaagcgaaattaaatggtggttagacggaaataaaaattgtcgctccatcactgtgaacgacttgacacacctacttgaagccgcagaaaaggcttcacgagcctttaaggagagccagcggcagactgatagtaagaactacgagactgagaattggagccctcaaaaatcccagcgccgttatgacatgtacaatacggcgtgctttcttggcgagatcgaggtgggattatatacgatccaaattctccagctgaccccattttttcacaaggagaacgagttgagcaaaaagcacatggtacagttcctttccggaaagtggactatcccacccgaccccagaaacgagtgttatcttgcccttagtaagttcacctctcacctgaagaatctccagtctgatcttaagcgatgctttgactttttcatcgattatatggtgctgctgaaaatgcgctacacccagaaggagatagctgagatcatgcttagtaaaaaggtttctcgatgttttcggaagtacaccgaattattttgccacctggacccatgcctcctgcagtcgaaggagagtcagctgcttcaagaagaaaattgtcgcaaaaagctagaggcacttagagccgatagattcgccggattgctcgaatacctgaaccccaattataaagacgcgaccactatggaatctattgtcaacgagtacgctttcctgctgcagcagaactctaaaaaacccatgacaaatgaaaaacaaaatagtattctggccaatattatcctgtcatgtttaaagcccaacagtaagctcatccagcctctcactaccctgaaaaagcagctgagagaagtgcttcagtttgtgggcctatcacaccagtacccgggtccatacttcttggcatgcctgttgttttggccagagaatcaggagttggaccaagattctaaattaattgagaaatatgtcagctctctgaaccgcagctttaggggtcagtacaagcgaatgtgtcggagcaaacaagcgtcgaccctgttctatctgggaaagcgcaagggtctgaacagtatagtgcacaaagctaaaattgaacagtactttgataaggcgcagaacacaaattccctctggcattccggcgatgtctggaagaaaaatgaagtaaaagatttgctgcggagactgaccggccaggccgagggaaagctaatcagtgttgaatacggaactgaagagaaaatcaaaatccccgtgattagcgtgtacagcgggccactgaggtctggcagaaacattgaaagagtttctttctatttaggcttcagcattgaaggccctctggcatatgacattgaggtgatctag

SEQ ID NO: 242578 - DNA, 1221 bp, synthetic construct
  misc_feature 1..1221: note = Description of Artificial Sequence: Synthetic coding sequence
  source 1..1221: mol_type = other DNA
atgtcaaaacaggtgtccctgccagaaatgataaaggattggaccaaggagcatgttaaaaagtgggtgaacgaagatttgaaaataaatgaacagtacggacaaattcttctgtctgaagaagtgaccggcctcgtgctgcaggaactcacagaaaaggacctcgtggaaatggggctcccatggggtcctgctctgctgatcaaacggagctacaataagctgaactcaaaatcgccagagtccgacaaccacgatccagggcagctcgacaactctaaaccctccaagacagagcaccagaaaaaccctaagcataccaagaaagaggaagagaattctatgtcttcaaatatcgattacgacccacgggaaatccgagacattaaacaggaggaatcaatccttatgaaggaaaacgttttggacgaagtagccaacgccaagcacaagaagaagctggaggccctgagggccgatcgcttcgccggtttactcgaatacctcaatccaaactataaggacgccactacaatggagtcaattgtcaacgagtacgccttcctgcttcagcagaactccaaaaagccaatgacaaatgaaaagcagaattccattctagcaaacatcatcctgtcatgtctcaagcccaattcaaagttaattcagcctcttactaccctgaaaaaacagctgcgtgaggtcctccagtttgtcggattgagccaccaatacccaggaccatactttttagcttgtttgctgttttggccagagaaccaggaactggaccaggacagtaagctgattgagaagtacgtatcgtcactgaatagatcattcagggggcagtataaacgcatgtgcaggagtaagcaggcgagcactctcttttatcttggcaagcgaaagggtctgaatagtatcgtgcataaagcaaagattgagcaatattttgacaaagcgcaaaacaccaactctctgtggcacagcggggacgtgtggaagaaaaatgaagttaaggacctccttagacggcttactgggcaggcagaggggaagctcatatccgtggaatacgggacagaggaaaaaattaagataccggtgatttctgtctacagcggccctctccgaagcgggcgtaatatagaaagggtctcattctacctgggattttcaatcgagggcccactggcctatgacatcgaggtcatatag

SEQ ID NO: 242579 - DNA, 4755 bp, synthetic construct
  misc_feature 1..4755: note = Description of Artificial Sequence: Synthetic coding sequence
  source 1..4755: mol_type = other DNA
atgagtaagcaggtttcattgccagagatgatcaaagattggactaaggaacacgttaagaagtgggtaaacgaagatcttaagattaatgagcagtatggccagattttattgagcgaggaggttacaggcctggtcctacaggagttaacggaaaaagaccttgtggagatgggacttccatgggggccagctctgctcattaagcggtcctacaataaactgaattctaagtcgcccgagagtgataaccatgatccgggacagctggacaacagcaaaccatctaaaaccgaacatcagaaaaaccctaagcacaccaagaaagaagaggagaacagtatgtcttctaacatcgattacgaccctcgagagatcagagatatcaaacaggaggagagcatcttgatgaaagagaatgttcttgacgaggtggcgaacgcaaaacacaagaaaaaggggaagcttaaacctgagcaattgacatgcatgccttaccccttcgatcagttccacgactcacatcggtatattgagcattatactttgcaacccgagactggggctctgaaccttatagacccaatccatgagttcaaggcgctgaccaacaccgagactgccaccgaagtggacattaaaatgaaattcagcaacgaagtcttccggttcgcctctgcctgtatgaatagcagaaccaatggaacgatacacttcggcgtcaaggataagccccatggcgaaatcgtaggcgtgaagatcacctccaaagcagcctttattgaccattttaatgtaatgatcaaaaagtactttgaggaaagcgaaatcaatgaggctaagaaatgcatccgcgaacctcgcttcgtcgaagtcctgttacagaataacacaccctccgaccggtttgtcattgaagtagacacaattcctaaacattccatatgcaacgacaaatacttctatatacagatgcagatctgcaaagacaagatttggaagcaaaaccaaaacttgtcactgttcgtgcgggaaggcgcatcaagtcgcgacatcttagcgaactcaaagcaacgcgatgtcgacttcaaagcttttcttcagaacctcaagtctctggtagcttctagaaaggaggccgaagaggagtatgggatgaaagcaatgaagaaggaatccgagggcctaaagctcgtcaagttactgataggaaatcgggactccctggataatagttattatgattggtacatcctggtcaccaacaaatgccatcccaaccagatcaagcacctggactttctgaaagaaataaagtggtttgccgtgctggaattcgatcctgagagtatgattaacggcgtggtcaaagcatacaaggagtcccgcgttgcaaacttacacttccctaaccagtacgaagataagactactaacatgtgggaaaagatctccacgttgaatctgtatcaacagccgtcatggatattctgcaatggtagaagcgatttgaaaagcgagacctacaaaccattggagcctcacttgtggcaacgcgagagggcctccgaagtcaggaagctgatactgttcctgaccgacgagaacatcatgacccggggaaaatttctcgtggtttttttgttactgagttccgtggagtccccgggtgatcctctgatcgaaacattttgggcgttctatcaagcccttaaggggatggagaatatgttatgcatcagcgtcaactctcacatctatcagcgctggaaggacctgctacagacacgtatgaagatggaagatgaactgacaaatcacagcatctcaactttgaatatcgaactcgtcaactcaaccatcctcaaactcaaaagtgtcaccaggagttctcgaagatttctgcccgcaagaggctcctcctctgtgatactggagaagaagaaggaggatgtattgaccgcgctagagatcctttgcgagaacgaatgtacagagacagacatcgaaaaggataagtccaagtttctcgaatttaaaaagtctaaagaagagcacttttatcgcggtggcaaagtgagctggtggaacttctacttttcgtcagagaactactccagcgatttcgtgaaacgggactcctatgagaaactcaaggatctgatccattgttgggctgaaagtccaaagccaatttttgcaaagataataaacctgtaccaccaccccggttgcggtggtaccaccttagcaatgcacgtgttgtgggatctcaagaagaattttaggtgcgccgtgctgaagaacaaaactacagattttgccgaaatcgcagagcaggtcataaacctggtaacttacagagctaagtcacaccaggattacattccagtgctgcttctggtcgacgattttgaggaacaggagaacgtgtacttcttgcagaacgcaatacactcagttttggccgagaaggacctgaggtatgagaagaccttggtcatcatactgaattgtatgaggagccggaatccggatgagagcgctaaacttgccgactccatagcgctgaactatcaactcagcagtaaagagcagagagcattcggcgctaagctgaaggagatcgagaaacaacataagaattgcgagaatttctattctttcatgataatgaaatctaactttgatgaaacatatattgagaatgtggtccgaaatattctgaagggacaggacgtggacagcaaggaagcacagctgatctcctttctggccctgctgtcttcatatgtgacggactctaccatctcggtttcccaatgcgagattttcctggggattatctatactagcacaccctgggagcctgaatccctcgaggataaaatggggacctacagtactttgctgattaagaccgaagtggccgagtacggcaggtacactggcgtcaggatcatccacccactcattgcgctgtactgcttgaaagaactggaacggtcctatcacctggacaagtgccagattgctcttaacattctggaagagaacctcttctacgactcaggaatcggcagggataagttccagcacgacgtgcagaccttgttgctaacccgccaacgcaaagtatacggggacgaaaccgacaccttgttcagccccctgatggaagctctgcagaacaaagatatcgaaaaggttctgtccgccggtagtaggaggtttcctcagaacgcctttatttgccaagcccttgctagacacttttacataaaagaaaaagactttaatacagccctggactgggcgagacaggctaagatgaaagccccaaaaaactcttacatcagcgatactctgggacaagtctacaaatccgagataaaatggtggcttgacgggaataagaactgccggtccataacggtcaatgacctgactcacctgctagaggctgctgaaaaggctagccgggcttttaaggaaagtcagcgacagacagacagcaaaaactatgaaaccgagaattggtcaccacagaaatcgcagcggcgatatgatatgtacaacacagcatgcttccttggagagattgaggtggggctctataccatccaaatcctgcagttgacaccttttttccacaaagagaatgaacttagcaagaagcacatggtacagttcttatctggcaaatggacaattcccccagaccctcggaacgaatgttatctcgccctctctaagttcacctctcacctcaagaacctacagagcgatcttaaaaggtgttttgacttcttcatcgactacatggtacttctaaaaatgaggtatacgcagaaagagatcgctgagatcatgctctctaagaaagtgtctagatgttttaggaaatacacggaactattttgccatctggatccttgcctgcttcagagcaaagaatctcagctcctccaagaagagaattgccgcaagaaactggaggccttgcgcgctgatagattcgccggactcctggagtacttgaaccctaactataaggacgccaccacgatggaatccattgtgaatgaatatgccttccttttgcagcaaaattcaaaaaagccgatgaccaacgagaagcagaactcgatccttgctaatattattctttcctgtctgaagccaaactcaaaactgattcagcctctgacaactctgaaaaagcagctaagagaggttctccagtttgttggactgtcacaccagtaccctggtccttactttctagcctgccttttattctggccggagaaccaagagctggaccaagactccaaactgatcgagaagtacgtgagttcgctaaatcgctcatttcggggacaatataagaggatgtgcaggagcaagcaggcatcaaccctcttttatcttgggaagcgcaaaggtttgaactctattgtgcacaaggcaaagattgagcaatacttcgataaggcacagaacaccaactcactgtggcactcaggagacgtgtggaagaaaaacgaagtgaaggacctacttaggagattgacaggtcaggctgagggtaagttgatttcagtggagtatggcaccgaggagaagatcaagattcctgtgatatccgtctattccggaccactgcgatccggtagaaacatcgagcgcgtgtccttctacctgggtttttcgattgaagggcctctggcatacgacatagaggtgatatag

SEQ ID NO: 242580 - DNA, 213 bp, synthetic construct
  misc_feature 1..213: note = Description of Artificial Sequence: Synthetic coding sequence
  source 1..213: mol_type = other DNA
atgtctaagcaggtctccctcccggagatgatcaaggattggaccaaggagcacgtgaagaagtgggttaatgaggacctgaaaatcaacgaacagtacggacagatactcctgtccgaagaggtgaccggactggtcctgcaggaactaacagagaaagacctggtcgaaatgggactgccatgggggcctgcactcctgatcaagcggtag

SEQ ID NO: 242581 - DNA, 4755 bp, synthetic construct
  misc_feature 1..4755: note = Description of Artificial Sequence: Synthetic coding sequence
  source 1..4755: mol_type = other DNA
atgtccaagcaagtctccttaccagaaatgataaaggattggaccaaggaacacgtcaagaaatgggtgaatgaggatctgaagataaatgagcagtacggacaaatccttctgtccgaggaagtgacaggcctcgtcctccaggagctgactgagaaggatctagtagagatgggcttgccctggggacccgcactgctgataaagaggtcttataataagctgaattctaaatctccagagagcgacaatcatgaccctggacaattggataattccaagccttctaagaccgaacatcaaaaaaatcctaaacacacaaagaaggaagaggaaaactcaatgtcaagtaacattgactatgaccccagggaaattcgggacataaagcaggaagagtccatccttatgaaggagaacgttctcgatgaagtggccaatgccaaacataagaagaagggtaaattgaagcccgagcagctcacctgcatgccatatcccttcgaccaattccacgactcccaccgctacatcgagcattatacactgcagccggagacgggcgctctgaacctcatcgacccaattcacgaattcaaagccctaaccaatacagagacggccacagaagttgatatcaaaatgaagttttcaaacgaagtgtttagatttgccagcgcctgcatgaattcacggaccaacggtacgattcattttggcgtgaaggataaaccccacggcgaaatagttggggtgaagattacatccaaggctgccttcatcgaccattttaacgttatgatcaagaaatacttcgaagagagcgagataaatgaggccaagaaatgcattcgggagccaagatttgttgaggtccttctccaaaataacacgccttccgatcgcttcgtgattgaggttgacaccataccgaagcacagcatatgcaacgataaatacttctatattcagatgcagatttgcaaggataagatttggaagcaaaaccagaacttgtccctctttgtccgggaaggagcctccagtagggacattcttgccaatagcaagcagagagatgttgattttaaggcctttctccagaacttaaaatctctggttgcctcccgcaaagaggcagaggaagagtacggcatgaaggctatgaagaaggagagtgagggtcttaagctcgtgaagctattaattggcaatcgcgattccctcgataattcttactatgactggtatatcctcgtaacaaataaatgccaccctaatcaaattaagcatctcgatttccttaaggaaattaagtggttcgctgtcctggaattcgatcccgagagtatgatcaatggcgtggtgaaagcctataaagagtcaagagtcgccaatctgcactttcccaatcagtatgaagataaaaccacaaacatgtgggagaaaatatctacactaaatctgtatcaacagccaagctggattttctgcaacggacggagtgatcttaaatcagagacttataaaccccttgaaccacacctgtggcagcgggaacgcgcatccgaggtcaggaagttgatattatttcttacagatgaaaacattatgacacgcggtaagtttctggttgttttcttgctgctttcatctgtcgagtcccccggagacccattaatcgagaccttttgggctttttatcaagccctgaaaggtatggaaaatatgttgtgcatatcggtgaatagccacatctatcaacggtggaaagatctgttgcaaacaagaatgaaaatggaggatgagctgactaatcattccatcagcaccctgaacatcgagctggtgaatagtacaattctaaaactcaagagcgtaaccagatcgtcccgacgcttcttgcccgctagaggatcctcatctgtcattcttgaaaagaagaaagaggatgtccttaccgccctcgaaatcctctgcgaaaacgagtgtacagagacagatatcgaaaaggacaagtccaaattcctggagtttaaaaagagtaaggaggagcacttttacaggggtggaaaggtatcatggtggaacttctacttttcaagtgaaaactatagcagcgatttcgtgaagagagactcttacgaaaagctaaaggatctgatccactgttgggcagagagtcctaagcccatcttcgccaaaatcattaatctctatcatcaccccggttgcggcggtacgaccctggctatgcatgtgctgtgggacctaaaaaagaattttaggtgtgccgtactcaaaaacaagactacagacttcgcagagatcgccgagcaggtgattaacttagtgacttaccgggcaaagtcacaccaggattatatccccgtcctgttgctggtcgatgattttgaggagcaggagaacgtctacttccttcagaacgctattcatagcgtgcttgccgagaaagacctgcggtacgagaagactctggttatcattctgaactgcatgcgctctcgtaatccggatgagagtgcgaaattggccgacagcattgccctgaactatcaactgtcaagtaaagagcagcgagctttcggcgctaagctgaaggagattgaaaaacagcacaagaactgcgaaaatttctacagcttcatgatcatgaaaagcaacttcgacgaaacatacatagagaatgtagtgagaaacatccttaagggccaggacgtggactccaaagaggcccaacttatttcttttctcgctctgttatcctcttatgtgaccgactcaaccatctcggtgtcccaatgcgaaattttcctggggataatatatacttctacaccctgggaaccagaaagtctcgaggacaagatgggcacctatagtacgctgttgatcaagaccgaggttgccgagtacggcaggtacacaggcgtgcgaattatacaccccctcatcgctctgtattgtcttaaggagctggagcgcagctatcacttggataagtgccagattgccttgaacatcctcgaggagaaccttttttatgattccggtatcggacgcgacaaattccagcatgatgtacagaccttgcttttaaccagacaaaggaaggtgtacggtgatgagaccgataccttattcagcccacttatggaggccctgcagaacaaagatattgagaaagtgctctccgcgggttcgaggcgcttccctcaaaacgcctttatctgccaggcattggcacggcacttttatatcaaagagaaggactttaacaccgctctagattgggccaggcaggctaaaatgaaggccccaaaaaatagctacatctccgataccctcgggcaggtctataagtccgaaatcaaatggtggctagatggcaacaaaaattgtcgctctattacagtcaacgatctgactcatctgttggaagccgcagaaaaggcttctagagcgtttaaagagtcccaaagacaaacggactctaaaaattacgaaaccgaaaattggagtccacaaaagtcccagaggcgctatgacatgtacaatacagcctgtttcctgggagaaattgaagtcggcctgtatactattcagattctgcagttaactccgtttttccacaaggagaatgagctcagcaagaagcatatggtccagtttttaagtggtaagtggacaattccacctgacccccgaaacgagtgctatctggccctgagcaaattcactagtcatctaaaaaacctgcaatccgacctgaagaggtgtttcgatttctttattgattatatggtgctgctcaagatgcggtatacccagaaggaaatcgccgaaatcatgctgtccaaaaaggtgagtcgatgtttccggaagtacactgaactgttctgtcacctggacccctgcctgctgcagagtaaggagagccagctgttgcaggaagagaactgcagaaagaagctggaggccctcagggccgaccgcttcgctggactcctggaatatttgaacccaaactacaaggacgcgacgacgatggagtccattgtaaacgagtacgcctttctcctccagcagaacagtaaaaagcccatgactaacgaaaagcaaaacagcatcctggccaacatcatactgagctgcctcaaacccaattccaagcttatccagccacttactactttaaagaagcagctcagagaagtgctgcagttcgtgggcctttcccaccagtacccgggaccatacttcctggcatgtctcctgttctggccagagaaccaagagctcgaccaggattctaaactaatcgaaaaatacgtatcctccctgaatcgctccttccggggtcagtacaagcgtatgtgccgcagcaaacaggcaagcacgcttttctatctggggaaaaggaagggacttaactccattgtccataaagctaaaattgagcagtattttgataaggcccagaacacaaacagcttatggcacagcggcgatgtctggaaaaaaaatgaagttaaggatctgcttcggcgactcactgggcaggccgaaggtaaattgatcagcgtggagtacggtacggaagaaaagattaagattcctgtgatctcagtatatagtggaccactccggtcaggccgtaatattgaacgggtctccttttatctcggcttcagcattgaaggaccactcgcgtacgatatcgaggttatttag

SEQ ID NO: 242582 - DNA, 213 bp, synthetic construct
  misc_feature 1..213: note = Description of Artificial Sequence: Synthetic coding sequence
  source 1..213: mol_type = other DNA
atgtccaaacaggtgagccttccggaaatgataaaggactggacaaaagagcacgtgaagaagtgggtaaacgaggacctgaagatcaacgagcagtacgggcagatcctactttctgaggaggtgacaggcttggtgctgcaggagttgacggaaaaggacctggtcgagatggggttgccatggggtcccgctctcctgattaaacgctag

SEQ ID NO: 242583 - DNA, 213 bp, synthetic construct
  misc_feature 1..213: note = Description of Artificial Sequence: Synthetic coding sequence
  source 1..213: mol_type = other DNA
atgagcaaacaggtgtcactcccggaaatgataaaggactggactaaggaacacgtgaagaaatgggtgaacgaggacctgaagattaacgagcaatacggtcaaatccttctgtcggaggaagttactgggctggtgctgcaagaactgacagagaaagacttagtggagatggggctgccctggggcccagcccttctaataaaaaggtag

SEQ ID NO: 242584 - DNA, 213 bp, synthetic construct
  misc_feature 1..213: note = Description of Artificial Sequence: Synthetic coding sequence
  source 1..213: mol_type = other DNA
atgagcaagcaggtatcactgcctgaaatgattaaggactggacgaaagaacatgtaaagaaatgggtgaacgaggacctgaagatcaatgaacagtatggccagatcctcctgtcagaggaagtgacaggactcgtgcttcaggaattgactgagaaagatctggtcgagatgggtctgccatgggggccagcattattaatcaagcggtag

SEQ ID NO: 242585 - DNA, 957 bp, synthetic construct
  misc_feature 1..957: note = Description of Artificial Sequence: Synthetic coding sequence
  source 1..957: mol_type = other DNA
atggcaccatgggcggaggcagagcacagcgcacttaaccccctgagggcggtgtggctgactttaaccgccgcattcctgttaacccttttactgcagctcctgccccctggcctcctccctggctgcgctatcttccaggaccttatcagatatggcaaaaccaagtgcggcgaacctagccgaccggcagcctgtcgcgcatttgatgtaccaaaaagatacttttctcacttctacataatatctgtgttgtggaatggatttctcctctggtgtctgacccaatccctcttcctcggggcaccctttccaagctggctacacgggctgcttcggatccttggggctgcccagtttcagggtggagaactggcactatcagccttccttgtcctggtgtttttgtggttacactccctccggcgtctgttcgaatgcctgtatgtgtccgtgttctctaacgttatgattcatgttgttcaatattgtttcggacttgtatactacgttctggtcggattgaccgtgcttagtcaggtcccaatggacggtaggaacgcttatattaccgggaagaaccttctgatgcaggcccgatggtttcacatactggggatgatgatgtttatctggtctagtgcccaccagtataagtgtcacgtaattctgggaaacctgcgaaaaaacaaggccggagtggtgattcactgtaaccatcgtattcccttcggtgactggttcgagtacgtaagtagcccgaactatttggccgaactaatgatctacgtttctatggccgtgactttcggcttccataatctgacatggtggctggtggttaccaatgtgttttttaatcaggctttgagtgcatttctgagtcaccagttttacaaatctaagtttgtatcttacccaaagcaccgcaaggcttttcttccttttctgttttag

SEQ ID NO: 242586 - DNA, 711 bp, synthetic construct
  misc_feature 1..711: note = Description of Artificial Sequence: Synthetic coding sequence
  source 1..711: mol_type = other DNA
atgacacgatgccctgcagggcaggcagaggtggaaatggccgagttgtacgttaagcccggaaacaaggagcggggatggaatgatcctcctcagttcagttacggtctgcaaactcaggcagggggtccaaggcggagcctgctcacaaagcgggtcgcggctcctcaggacggcagcccacgtgtgccagcatccgaaaccagcccgggacccccacctatgggcccacccccaccctcgtccaaggcccctcgctcgcctcctgtcggctccggcccagcaagtggcgtggagcccacctcctttccagtggaatccgaagccgttatggaagatgttttacgcccattagagcaggcgcttgaggactgtaggggccatacacgaaaacaagtttgtgacgatatctccaggcgactggcccttttgcaagaacagtgggccggtggcaagctgagcatccccgtgaagaagagaatggcccttttagtccaagaactctcctcgcatcgatgggacgcggctgatgatatccaccggtcgctcatggttgaccacgtcacagaggtctctcaatggatggtgggcgttaaaaggttgatcgcagaaaagagatccctgttctctgaagaggccgctaatgaggaaaaaagtgctgctacggctgagaaaaatcatactatccccggatttcaacaggccagctag

SEQ ID NO: 242587 - DNA, 681 bp, synthetic construct
  misc_feature 1..681: note = Description of Artificial Sequence: Synthetic coding sequence
  source 1..681: mol_type = other DNA
atggaaggctgtgtttcgaatctcatggtttgcaacctcgcttattccgggaaactggaagagcttaaagaaagcatcctggccgataaatcactggcaacccgaacagatcaagacagtcgcacagctctgcactgggcttgttctgcaggccacaccgagatcgtcgagttccttcttcaattgggggtgcctgtaaacgataaggatgatgctgggtggagcccactccacattgccgcttcagccggaagggatgagatcgtcaaggcccttcttggcaagggtgctcaggtgaatgctgtgaaccagaatggttgcactccgctccattacgcggcttctaaaaatcgccatgagattgccgtaatgctgcttgagggcggagcaaatccagacgccaaagatcactacgaggccactgccatgcacagagcagctgcaaagggaaatttgaaaatgatccatatactgctttactataaggccagcacaaatatccaggacacggagggcaatactccattacaccttgcttgcgacgaggaaagagtcgaagaggccaagttgctcgtaagccagggcgcttcaatttacatagagaacaaggaggagaaaactcctcttcaggtggccaaaggcggactcggcctgatcttgaagcgaatggtagaaggatag

SEQ ID NO: 242588 - DNA, 780 bp, synthetic construct
  misc_feature 1..780: note = Description of Artificial Sequence: Synthetic coding sequence
  source 1..780: mol_type = other DNA
atggccacggccactggagtggcagaggaacggctgcttgccgcactagcgtacctacaatgtgccgtcggctgtgctgtattcgcccgtaatcgccagacaaactcggtgtacggaaggcacgccctgccttcccatcggcttagagtccccgctagagccgcttgggtggtacaggaattaccctcactggcccttccgctttaccagtacgcatccgaatctgccccacgccttagatcagctccgaactgtattttgcttgctatgtttctcgtgcattacggtcatcgttgcctgatatatccttttttgatgcggggaggtaagccaatgcctcttctcgcttgtaccatggcaattatgttctgtacatgtaacggctacctgcagtcgcgctacctgagccattgtgccgtctatgccgacgattgggtgaccgacccacggtttttgatcgggttcggtctgtggcttaccggtatgctgattaatatacactccgatcacatcctgagaaacctgagaaaaccaggcgacactgggtacaagattcctaggggaggcctttttgagtacgtgacagcagcgaactactttggcgagattatggagtggtgtggctatgctctggcctcttggtcggttcagggggctgcatttgccttttttactttctgctttttaagcggaagggctaaggagcaccacgaatggtacctgcgaaagttcgaggagtatcccaagtttagaaaaatcattatcccgttcctcttctag

SEQ ID NO: 242589 - DNA, 585 bp, synthetic construct
  misc_feature 1..585: note = Description of Artificial Sequence: Synthetic coding sequence
  source 1..585: mol_type = other DNA
atggaacatgctgcacagccttggagatggcaaaggagacgtggctggagaagatcagcctgctggccccgaagccctacatgttcggccccttgggctgccagatcgtctagagcaatcgtgcgcagaacacagtgtaccgccgctacaaggtgcccggctacggggagcgaatgccgacgagggcctccgggatggtgtcgcagctgtcctagatggccctgtaggtcaacctctactcccgcatctccacctagagtgagcgccgcaaggccgactgcttctagctggccctgctcctctagcacaacagggatcgggaacgtcggtatgcaagcattagccgtttgcctgcacccaaaatgccagcctatggtccccatcgtctgccctgatcttaatcacgatagtaagactcagagagagatcgccggaatcagatgctcctacagtctgttgggaaacacagccgcttccaggcggatccctacatctttaatgacccaacacttaaatgctcacctcctcgccaatacatgcttcgctgtgaatcagtatgaagtgtttcttggggttctggcatag

SEQ ID NO: 242590 - DNA, 639 bp, synthetic construct
  misc_feature 1..639: note = Description of Artificial Sequence: Synthetic coding sequence
  source 1..639: mol_type = other DNA
atggaacacgccgcacagccatggagatggcaaaggaggagggggtggagacgctctgcctgctggcccagatccccaacctgtagcgcgccatgggctgccagatccagtagagctatcgttagacggactcaatgcaccgccgctacacggtgtccagccactggctctgagtgtaggagggggccaccaggttggtgtagatcatgccctcgatggccatgtagaagcacttcaacaccagcgtccccacctagggtcagcgccgcaagacccactgctagctcctggccctgcagctcctcaacaacaggaattggcttcggcctgtggctgactggcatgttaatcaacatccatagcgaccacattctgaggaacctccggaaacctggagataccggttataagatacctcggggaggcctgttcgaatacgtgaccgcagccaactatttcggggaaatcatggaatggtgcggatacgctctggcaagttggagtgtccaaggtgccgcatttgcgttcttcactttctgctttctatcgggcagggccaaagaacaccacgaatggtatctgaggaagttcgaggaatatcctaagtttagaaaaatcataattcccttccttttctag

SEQ ID NO: 242591 - DNA, 858 bp, synthetic construct
  misc_feature 1..858: note = Description of Artificial Sequence: Synthetic coding sequence
  source 1..858: mol_type = other DNA
atgttgctcgcaacattcaagctctgcgccggatcatcttatagacatatgcgtaatatgaaaggcctacgccaacaggccgtgatggccatctcccaggagctgaacagacgagcgctcggcggtcccacaccgtctacctggatcaatcaggttcgtaggaggtcgagcctacttggttcgcgtcttgaggaaacactgtactcagatcaggagctggcttacttacaacaaggagaagaagcaatgcagaaagccctcggcattctaagtaaccaggaggggtggaaaaaggaatcgcagcaggacaatggggacaaggtgatgtctaaagtcgtacctgatgtcgggaaggtgtttcgcttggaagtggtcgtcgatcaacccatggagcgcttgtatgaggagctggtggagaggatggaagcaatgggggaatggaacccgaacgtgaaggagattaaagtgctgcaaaagattggcaaagacacatttattacccatgagctggccgctgaagccgctggcaacctggtgggtcctagagattttgtctcagtaaggtgcgccaaacggcgaggttcaacttgcgtgctggcagggatggcaacggattttggcaacatgcccgaacagaaaggtgttatccgggctgagcatggtcccacctgtatggtgctgcacccgcttgccggaagcccttctaagacaaaactcacctggcttctttcgattgatctgaaaggttggttaccaaaatcaatcattaaccaggtgctgagccagacacaggtggatttcgccaatcatctgcgtaaaaggctggagtcacatccggctagtgaagctagatgctag

SEQ ID NO: 242592 - DNA, 744 bp, synthetic construct
  misc_feature 1..744: note = Description of Artificial Sequence: Synthetic coding sequence
  source 1..744: mol_type = other DNA
atgttgctggcaacctttaaactatgtgcgggtagctcctatcgccatatgaggaacatgaaaggcagccggctggaggaaaccctgtacagcgatcaggaactggcttatttgcagcagggggaggaggccatgcagaaagctctcggcattctgagcaatcaggagggttggaaaaaggagtcacagcaagataatggtgataaggttatgtcgaaggtggtccctgatgtcgggaaagtgtttaggctcgaggtagtggtggaccagcctatggagcggctgtacgaagagcttgttgagcgcatggaggccatgggggaatggaaccctaacgtgaaagagataaaggtgctgcagaaaattggaaaggatacctttattactcatgagttggctgctgaggccgctgggaatctggtcggtcctagagatttcgtcagcgtcaggtgtgctaaaagaagaggatcaacctgcgtgcttgccggtatggctactgactttgggaacatgcctgagcaaaagggagtgatcagagccgagcatggacctacctgtatggtcctccatccacttgcaggtagccctagcaaaactaaactcacttggctcctctccatcgaccttaagggatggttacccaaaagcatcataaaccaggtgttgtcacagacccaggtggattttgccaaccatctacggaagcggctcgaaagtcaccctgctagcgaagcacggtgttag

SEQ ID NO: 242593 - DNA, 969 bp, synthetic construct
  misc_feature 1..969: note = Description of Artificial Sequence: Synthetic coding sequence
  source 1..969: mol_type = other DNA
atgtcatcttccccttgggagcccgcaaccctccgccgagtatttgtcgtgggagtcggcatgacaaagtttgtgaaacccggagctgagaactcaagagactatcccgaccttgcggaagaagccggaaagaaggcccttgcagatgcccagatcccgtactctgcggtggaccaggcctgcgtggggtatgtcttcggtgtagccgaatgtgtcctggcgctaggcttcgagaagatgagtaaaggatcattagggatcaaatttagcgacagaaccatacctactgacaagcacgtcgatttgctgattaataagtatggtctgagtgcacatccggtcgccccacaaatgtttggttatgcaggaaaagaacacatggagaagtatgggaccaagattgaacactttgcaaaaattggttggaagaatcacaagcatagtgtcaataacccttactcacagtttcaggatgaatacagtctggatgaagtgatggccagcaaagaggtatttgactttttgaccattctccagtgctgtcctaccagcgacggcgcagccgcagcgatactcgctagcgaagcattcgtacaaaagtacggactgcagagcaaggcagttgagatccttgcacaagagatgatgacggacctgccctccagctttgaggaaaagagcattatcaaaatggtcggattcgatatgtcaaaggaggccgcacggaagtgctacgaaaagtccggactcacacctaacgacatcgacgtcatcgaattgcacgattgcttttcaacaaatgagttactgacatacgaggccctgggcctgtgtcccgagggacaaggagctacactcgttgatcggggagacaatacatacggaggaaagtgggtcattaatccaagtggcggactaatttctaagggccaccctctgggggcaaccggcggtcactcatgttcatag

SEQ ID NO: 242594 - DNA, 1644 bp, synthetic construct
  misc_feature 1..1644: note = Description of Artificial Sequence: Synthetic coding sequence
  source 1..1644: mol_type = other DNA
atgagttcatcgccctgggaacctgccacgttaaggagggtgttcgttgtcggagtgggaatgacaaagtttgtgaagcctggggctgaaaattcccgggactatcccgatctggccgaggaggctggtaagaaggccctggctgatgcgcagatcccctactccgctgtagatcaggcctgcgtgggctacgttttcggggactctacttgtggccagagagccatttatcattcccttggaatgacaggcataccgatcatcaacgtgaataacaactgcgctacagggtctaccgccctattcatggctagacagttgatacaagggggagtcgccgaatgcgtgctggcactggggttcgagaaaatgtctaaaggctcgctggggattaagttttctgaccgaaccattcctaccgacaagcatgtggacctactgatcaataaatacgggttaagtgcccacccagtggctccccagatgtttggctacgctgggaaggaacatatggaaaaatacggtaccaaaattgaacactttgccaagattgggtggaagaaccacaagcactccgttaacaatccgtattcccagtttcaggatgagtacagcctggacgaggtaatggcctcgaaagaggtctttgacttcctaaccattctccagtgttgcccaacctcagacggcgcagcagccgctatcctcgctagtgaagcatttgtgcaaaaatatgggctgcagtctaaagccgtcgaaatcttggctcaagagatgatgactgacctccctagtagcttcgaggagaaaagcatcattaagatggtcggatttgatatgagcaaagaagcagcacgtaagtgttatgaaaagtcgggactcaccccgaacgacattgacgtgatcgagctgcacgattgtttttccacaaatgaattgctcacttacgaggctttggggctatgccctgagggtcagggtgctactcttgtcgatcgaggtgataatacatacggaggcaagtgggtcataaacccgtctggcggactcatcagcaagggccacccgctaggcgcaaccggactggctcagtgcgcagagctgtgttggcagctcaggggcgaagcaggtaaacgtcaggtccccggtgcaaaagtagcccttcaacataatctgggcattggcggagcagtcgtagtaacgctctacaaaatggggttccccgaagccgctagttcttttcggacccatcagatcgaggccgttccaacctcaagcgcgagcgacggatttaaagccaatctggtgtttaaagagatcgagaagaagctggaagaagagggcgagcagttcgtcaagaaaattgggggaatatttgcttttaaggttaaggatgggcctggaggcaaagaggcgacttgggttgtggatgtcaagaacggaaagggctccgtgctaccaaatagcgacaaaaaagccgactgtacaatcactatggcagattctgactttttagctcttatgaccgggaagatgaatcctcagtcagccttttttcaaggtaaactgaagataacaggcaatatgggtctggctatgaaacttcagaacctccagctacagccaggaaacgcaaaactgtag

SEQ ID NO: 242595 - DNA, 1572 bp, synthetic construct
  misc_feature 1..1572: note = Description of Artificial Sequence: Synthetic coding sequence
  source 1..1572: mol_type = other DNA
atgtcatcatccccgtgggaaccagcaactctccgtagagttttcgttgtgggcgtggggatgaccaagtttgtgaagcccggagccgagaacagtagggattacccggatctggctgaggaggctggggactctacctgcgggcagcgagctatttatcactcactcgggatgacagggatccctatcattaatgttaataataattgcgcaactggctctaccgctctgttcatggcaagacagcttattcaagggggagtggcagagtgtgtgctagccctgggttttgagaagatgtctaaaggaagccttggtatcaagttttccgaccgcacaatccccacagacaagcatgtcgatctgcttatcaataaatatgggttaagtgcacatcctgtggcgccacagatgttcggatacgcgggaaaggagcatatggaaaagtatgggacaaaaattgagcattttgccaagattggatggaagaatcataagcactctgtaaacaatccttacagtcagtttcaggatgagtattctctcgatgaggtgatggcctccaaggaagtgtttgacttccttacgatattacaatgctgtcctacaagcgatggggctgctgctgccattttggcatctgaagcctttgttcagaaatatggactgcagtccaaggctgtggaaatcttagcacaggaaatgatgaccgatctcccctcttcctttgaagagaaatccatcattaagatggtcggcttcgatatgtccaaggaggcggctcggaagtgttacgagaaatccgggctgaccccaaacgacatagacgtgatcgagctgcacgattgtttctctaccaacgagctgctgacttacgaagcactgggtttatgtccagaaggacagggtgccacactggttgatcgcggagataacacttacggcggaaagtgggtgatcaacccatccgggggattgatttctaaaggacatccgttaggcgctaccggcctggcacaatgtgctgaattgtgctggcagctgcgcggtgaggcgggtaaacggcaggtgcccggagccaaagttgccctccaacacaacctcgggataggcggagccgtagtagtgacactatataagatggggttcccagaggcagctagcagctttagaactcaccagatagaggctgtgcccacaagcagcgccagcgatggctttaaggctaatctggtgtttaaggaaatcgagaaaaagctcgaagaggagggagagcagttcgttaaaaagatcggcggtatcttcgcgttcaaggttaaagacggacccggaggcaaggaagcaacatgggtggtggacgttaagaatggaaagggcagtgtattgcccaattctgataaaaaggctgattgcacaatcacaatggctgatagtgatttcctcgccctgatgacaggcaaaatgaatccgcagtccgcattcttccagggaaagctgaagatcactgggaacatgggcctcgctatgaagctgcagaacctgcagctgcagcctggaaacgcaaaactatag

SEQ ID NO: 242596 - DNA, 180 bp, synthetic construct
  misc_feature 1..180: note = Description of Artificial Sequence: Synthetic coding sequence
  source 1..180: mol_type = other DNA
atgggctttccggaggccgcttcgtcttttcgcacacaccagattgaggctgtcccaacctcttcagcatctgacggttttaaagccaacctggtattcaaggagatcgaaaagaagcttgaggagataaggcggttgaccgctcagagtcagtggttgacacagaccagctggttatag

SEQ ID NO: 242597 - DNA, 423 bp, synthetic construct
  misc_feature 1..423: note = Description of Artificial Sequence: Synthetic coding sequence
  source 1..423: mol_type = other DNA
atgggatttcccgaggccgcaagaactcaccagatcgaggccgtgcctactagcagcgcatccgacggctttaaagccaatctcgtgttcaaagagatcgaaaaaaaactggaagaggaaggggaacaatttgtgaaaaaaattgggggaattttcgcttttaaagttaaggacgggccagggggaaaagaagccacctgggtcgtcgatgtaaaaaatgggaagggtagcgttctacccaacagcgataaaaaagcggactgtactatcactatggctgattcagacttccttgccctgatgactggtaaaatgaaccctcagtctgcattctttcagggcaagctcaagattacgggtaacatgggcctagccatgaagctccagaatctccagctccagcccggtaatgcaaagctctag

SEQ ID NO: 242598 - DNA, 432 bp, synthetic construct
  misc_feature 1..432: note = Description of Artificial Sequence: Synthetic coding sequence
  source 1..432: mol_type = other DNA
atgggcttcccagaagcagcaagcagcttccgcacccaccaaatagaagcggtacccacttcctcagccagcgacggatttaaagccaacctggtctttaaagaaatcgagaagaaactggaagaggaaggggaacaatttgtcaaaaagattggaggtatctttgccttcaaggtcaaggatggtccaggaggaaaagaggccacctgggtcgtcgatgtgaagaatggtaagggatctgtgctccccaattcagataagaaagctgactgtacaatcacaatggcggattctgatttcttagcgctgatgaccggaaaaatgaacccccagagcgcttttttccaggggaagcttaaaatcactgggaacatgggcctggccatgaagctccagaatctgcagctgcagcccggaaacgcaaaactgtag

SEQ ID NO: 242599 - DNA, 180 bp, synthetic construct
  misc_feature 1..180: note = Description of Artificial Sequence: Synthetic coding sequence
  source 1..180: mol_type = other DNA
atggggttccccgaggcagcatcttccttccgaacgcatcagattgaggccgtgcccactagctcagcctctgacggttttaaggccaatctcgtctttaaggaaatagaaaagaagctagaagagataaggcgcctgaccgcccagtcacaatggttaacacagacctcctggctctag

SEQ ID NO: 242600 - DNA, 1401 bp, synthetic construct
  misc_feature 1..1401: note = Description of Artificial Sequence: Synthetic coding sequence
  source 1..1401: mol_type = other DNA
atgactggcatcccaattattaacgtgaataacaattgtgcaactggcagcaccgctctattcatggctaggcagctcatccagggcggagtggcagagtgtgtactcgcgctaggctttgagaaaatgtcaaagggatcacttggcattaagttcagtgaccgcacgatccccacagataaacacgtggatctgctgatcaacaagtatgggctttcagcacatcccgtagccccacagatgtttggttacgctggcaaggaacacatggagaaatatgggaccaaaattgagcattttgccaagatcggatggaagaaccataaacattctgtcaataatccttatagccagttccaggacgaatactctcttgatgaggtaatggcgtcgaaggaagtgttcgactttctgacaattctgcagtgctgccccacttctgacggagccgctgcagctatcctggcttctgaggcattcgtacagaagtacggattgcagtctaaggccgtcgaaatcctcgcccaggaaatgatgacagacctgccatcctcgtttgaagagaagagtatcattaaaatggtgggcttcgacatgagcaaagaggccgctcgtaagtgctacgaaaagtctggactcacaccaaacgacatcgacgtgatagaactgcacgactgcttcagtacaaatgagctgcttacctacgaggccctggggctgtgccctgaagggcagggagccactttggtggatagaggagataatacatacggaggtaaatgggtgattaatccttccggcggactgatcagcaagggccaccccctgggggctaccggattggcacagtgcgccgaactgtgttggcaattacgcggtgaggccggtaagaggcaagttccaggcgcaaaagtggccttgcagcacaacttgggtatcgggggtgcagtggtggtgaccctctacaagatgggtttccctgaggcggcatcgagtttccgaacgcaccagattgaggctgtgcccaccagcagtgcttccgatgggttcaaggctaacctggtgttcaaggagatcgaaaagaaactggaagaagaaggcgagcagttcgtcaagaaaattgggggtatttttgctttcaaagtgaaggatggaccaggtggcaaggaagccacctgggttgtggatgtcaagaatggaaaaggcagcgtgctgcctaactccgataaaaaagccgactgcacaatcaccatggcagatagcgactttctagccctaatgaccggcaagatgaatcctcagtcagcattttttcagggcaagttgaaaatcaccggcaacatgggcctagccatgaagctccaaaacctacagctgcagcctggtaacgccaagctttag

SEQ ID NO: 242601 - DNA, 1512 bp, synthetic construct
  misc_feature 1..1512: note = Description of Artificial Sequence: Synthetic coding sequence
  source 1..1512: mol_type = other DNA
atgtcgtcctcaccgtgggaacctgcaaccctccggagagtgtttgtcgtgggcgttgggatgacaaaatttgtgaaacctggcgcagagaactcccgggattaccctgatctagcagaagaggcagggaagaaggcactcgccgacgctcagattccatactccgcggtcgatcaggcatgcgttgggtatgtctttggagtcgctgagtgtgtcttggcactagggttcgagaaaatgagtaaaggctcactgggcatcaaattctcagataggacaattccaacagataagcatgtggatttattgatcaacaagtacggcttaagtgcccaccccgtggcacctcaaatgtttggctatgccggaaaggaacatatggagaagtatggtaccaaaatcgagcacttcgctaagattggatggaagaaccataaacacagcgtgaataatccatattcacagttccaggatgagtactctttggatgaggtgatggcttcaaaagaagtgttcgacttcctcactattcttcaatgttgtcccacatccgatggcgcagcagccgctattctcgcaagtgaggcttttgtccaaaagtacggcctccaaagtaaggccgtggaaattctggctcaggaaatgatgactgatctgccgtcctccttcgaagaaaaatccataatcaaaatggtgggattcgatatgagcaaagaggccgcacggaagtgttacgaaaagtctgggctcactccaaatgatatcgacgtgatagagctccatgattgtttctccacaaacgagttactgacttacgaagccctgggcctttgtccggaaggacaaggggctaccttggtcgatagaggcgataatacctacggtggaaagtgggtgattaatccatctggcggactgatatcaaaggggcatccactcggagctacaggcttggcgcagtgcgccgagttgtgctggcagcttcgaggggaggctggaaagcgtcaggtgccaggggctaaggtagctttacagcataatctgggaattgggggtgctgtggtggttacgttgtacaagatgggattccctgaagccgcatctagcttccgtacacaccagatcgaggcagtacctacctccagcgcatccgacgggttcaaggcaaacttggtattcaaagaaattgagaaaaagttggaagaggagggggaacagtttgtgaaaaaaatcggcggtatcttcgcttttaaggtgaaggacggtccgggagggaaggaagccacctgggttgttgatgtaaaaaatggaaaggggtctgtcctgcccaatagtgacaagaaggctgactgtacaatcacaatggccgactccgacttcctggccttgatgactggtaagatgaacccccagagcgcctttttccaagggaaacttaagattactggcaatatggggctggcaatgaaactccagaacctgcagctacagccgggtaacgcgaaactgtag

SEQ ID NO: 242602 - DNA, 1653 bp, synthetic construct
  misc_feature 1..1653: note = Description of Artificial Sequence: Synthetic coding sequence
  source 1..1653: mol_type = other DNA
atggtcggcgaagagaagatgtctctgcggaaccgcttgtcgaaatccagggagaatcccgaagaggacgaagaccagcgaaaccccgcaaaagagtcactagagacaccctccaatggccgaatagatataaagcagttgatcgccaagaagattaaactaaccgccgaagcagaagaactgaagccattcttcatgaaagaggtcgggagtcattttgacgatttcgtcactaacctgatcgagaagtctgcttccctggacaatggcggttgcgcgctgacaactttcagcgtgctggaaggagagaagaacaaccatagggcgaaggacctcagagccccacctgaacaaggcaaaatctttatagctaggcgctcccttttggacgaactgctcgaagtcgaccatatccgcaccatctaccacatgttcattgctctgctcattctgttcatactcagcacattggtggtggattacatcgatgagggtagactcgtattggagttcagtctgctgtcatacgcatttggcaagttcccaactgttgtgtggacttggtggattatgttcctgagtaccttcagcgttccttactttctgttccaacattgggcaacagggtacagcaaaagcagccatcccctcattaggtccctttttcacggttttctcttcatgatctttcaaatcggcgttttgggatttggtcccacgtatgtcgtgcttgcttatactctccccccagcctcacgatttatcatcatcttcgagcagatcagatttgtgatgaaagctcactcattcgtacgcgagaatgtgccgagggtcctgaactcagcaaaggagaagtcgtctacagtccccatccccactgtcaatcagtacctgtacttcctcttcgctcccacactgatctacagagactcatacccgagaaacccgacggtccggtgggggtatgtcgccatgaaatttgcccaggtgtttgggtgttttttctacgtttactatatcttcgaaaggctgtgcgctcctctcttccgaaacattaagcaggaaccgttctctgccagagtgctggtcctctgcgtgtttaactcaatcctccctggtgtgttgatactcttcttaacctttttcgcttttctgcactgctggctgaatgccttcgctgagatgctgcggtttggcgataggatgttctacaaggattggtggaattctacttcttattccaattactacagaacttggaatgtggttgtgcatgattggttgtactactatgcttataaggattttctctggttttttagcaagcgctttaagtctgcggcaatgttggcggtgtttgccgtgagtgcagtagtgcatgagtatgcattggccgtgtgtctttccttcttctaccctgttctgtttgtgttatttatgttcttcgggatggcattcaactttatagttaacgacagtcggaaaaagcccatttggaatgtgttaatgtggacttctctgttcctagggaatggtgtcctgctgtgcttctattcacaagagtggtacgctagacagcactgtccactgaagaatcctacatttcttgattacgttcggcctcgaagttggacctgccgatatgtgttctag

SEQ ID NO: 242603 - DNA, 783 bp, synthetic construct
  misc_feature 1..783: note = Description of Artificial Sequence: Synthetic coding sequence
  source 1..783: mol_type = other DNA
atggtgggcgaagaaaaaatgagtcttcggaacagactgtccaagagcagggaaaatccagaggaagatgaggatcagcggaatcctgccaaagaatccctggaaacccctagtaacggcagaatagatataaaacagctcattgccaagaagatcaagctgaccgccgaagctgaagagctgaaaccgtttttcatgaaagaagttggctctcatttcgatgactttgtcaccaatctgattgagaagagcgcctcccttgacaacggcggatgtgccctgaccacgttctcggttctcgaaggtgaaaagaataaccatcgggctaaagatctgagggcccctccagagcaggggaagatctttatcgccagaagatctctgcttgacgagctacttgaggttgatcacattcgcactatctaccatatgtttattgccttacttatcttgttcattctgtctacccttgtagtagattatattgacgagggacgactggttctcgagttctctcttttaagttatgcatttggcaaattccctaccgtcgtctggacatggtggatcatgtttctgtcgacgtttagtgtcccatactttctctttcagcactgggcaactggttattctaagtcctcacatccgctgatcagaagtctatttcacggatttctgttcatgattttccagatcggggtgttggggttcggacctacctatgtggttctggcctacaccctgccacctgcttctaggtttataataattttcgagcaatag

SEQ ID NO: 242604 - DNA, 861 bp, synthetic construct
  misc_feature 1..861: note = Description of Artificial Sequence: Synthetic coding sequence
  source 1..861: mol_type = other DNA
atgaaggctcattcctttgtgcgggagaatgtcccacgagtcttgaactccgccaaagaaaaatcctcgaccgtgcccataccgacggttaatcaatatctttattttctctttgcaccgacgctgatctatagagactcttatcccaggaatcctacagtaagatggggatatgtcgctatgaaattcgctcaagtcttcggttgtttcttctatgtgtactacatctttgaacgcctgtgcgcacccctgtttagaaacataaagcaggaacccttcagtgccagggtgctggtgctgtgtgtctttaacagcattctaccaggagtgctcatcctgtttctgaccttttttgcttttttgcattgctggttaaatgctttcgccgaaatgcttcggtttggtgatcgaatgttttataaagactggtggaactcaacatcatattccaactattaccgtacctggaatgtggtggtccacgactggttgtattattatgcttataaagacttcttatggttcttctccaagaggtttaagtctgctgccatgctcgctgtgttcgcagtgagcgctgttgtccacgagtacgccctggccgtatgccttagctttttctaccccgtacttttcgtgctgtttatgttcttcggcatggccttcaactttattgtgaacgacagtcgcaagaaacctatatggaatgttcttatgtggacttcactgtttttgggcaatggcgtcctgttgtgcttctacagccaggagtggtacgcccgacaacactgcccactcaagaatccaacattccttgactatgtacgaccacgctcttggacctgtaggtacgtgttttag

SEQ ID NO: 242605 - DNA, 1458 bp, synthetic construct
  misc_feature 1..1458: note = Description of Artificial Sequence: Synthetic coding sequence
  source 1..1458: mol_type = other DNA
atgaaagaagtcggcagtcactttgatgattttgtgactaacctgatcgagaaatctgcctcactggacaacgggggatgcgcccttaccaccttcagtgtgctggagggcgagaaaaataaccaccgcgcaaaagacctgagagcccctcccgagcagggcaaaatctttatcgctagaagatctcttctggatgaactcctggaagtggatcacatcagaaccatatatcacatgtttattgccctgctcatcctcttcatcctcagcacacttgtcgtggactacatcgatgagggccgattggttctggagttttccctgctgtcatatgcattcggcaagttccccactgtcgtgtggacatggtggatcatgttcttgtccactttctccgtgccttatttcctgttccagcactgggccacaggttatagtaaaagcagtcaccccctgattcggtccttattccacggcttccttttcatgatttttcagattggcgtactgggatttggtcccacgtatgttgtcttggcgtatacactgccgcctgcctcccgctttatcattatttttgaacaaattagatttgtcatgaaagcgcacagctttgttcgcgagaacgttcctcgggtgttgaattccgctaaagagaagtcatcaacggtgcccatccctactgtcaatcaatacctctactttctgtttgcgcctactctgatctatcgggatagctatccccgtaaccctacagtccgttggggctacgttgctatgaaatttgctcaggtcttcggctgtttcttctacgtctattacatcttcgaacggttatgcgccccactgtttcggaatatcaagcaggaacccttttcggcccgagtcctcgtgctgtgtgtgtttaacagcatactgccaggcgtcctcattttgttcctgactttttttgcattcctccattgctggctgaatgcgtttgctgaaatgttacgatttggcgatcgaatgttttacaaagactggtggaactctaccagctactctaactattaccgcacttggaatgtggtggttcatgactggctctactactatgcatataaggactttctgtggtttttcagcaagaggttcaaaagcgctgccatgctggcggtatttgccgtgagcgctgtcgtgcacgaatatgcccttgccgtgtgcctgtcttttttctatcctgtcctatttgtgttgtttatgtttttcgggatggctttcaactttattgttaatgactctcgcaagaaacccatttggaacgtgttgatgtggacttcgttattcttgggcaatggcgtacttctgtgtttttattctcaagaatggtacgctcggcagcactgcccactgaaaaatccaacctttttggattatgtgaggccaagatcctggacctgccgatacgtattttag

SEQ ID NO: 242606 - DNA, 1479 bp, synthetic construct
  misc_feature 1..1479: note = Description of Artificial Sequence: Synthetic coding sequence
  source 1..1479: mol_type = other DNA
atggagctgaaaccgttctttatgaaagaagtgggttcccatttcgacgatttcgtgactaacttgattgagaagtccgcatcactggataatgggggttgtgcacttactactttcagtgtgctggagggggaaaaaaacaaccaccgcgctaaagatcttagggcaccaccagagcagggcaagattttcattgctcggaggtcattgctagatgaactgctggaggtggaccatatcaggaccatttaccatatgttcattgcactgttaattcttttcatcctgagtaccttagtggttgactatatcgacgagggacgcctggttctggagttctccctcctctcttatgcattcggcaagtttccgactgtcgtgtggacatggtggataatgttcctgtcgacattttccgttccttattttttgttccagcattgggctactggctactcaaaatcatcacacccgctcatccgctccctttttcatggtttcctttttatgatattccagatcggagtccttgggttcggacccacatatgttgtgctggcttacaccctgcctcctgctagtcgatttattatcatttttgaacagatccgatttgtgatgaaagcccactcttttgtgcgggagaatgtcccacgcgtcctgaattcagctaaggaaaaatccagcacagtgcctattcccacagtgaaccagtatctttatttcctctttgctccaactttaatataccgcgacagctaccccaggaaccctaccgtacggtggggttacgtcgcaatgaaatttgctcaggtgttcgggtgcttcttctacgtctattatatcttcgaacgcctctgtgcgcctttatttcgcaacattaaacaggaacccttcagcgccagggtgctcgttctatgcgtcttcaattctatactcccaggtgtcctaattctgttccttacgttcttcgccttcctccattgctggctgaatgctttcgcggagatgctgcgtttcggcgacaggatgttctacaaggactggtggaactcaacctcatactcaaattattatcgtacctggaatgtggtagtccacgactggctctattactacgcatacaaagacttcctctggttcttcagcaagaggtttaaaagcgcagcaatgctggccgtgttcgccgtgagtgccgtcgttcacgagtacgctctggcagtgtgtctctcctttttctacccagtgctgttcgtcttgttcatgttcttcgggatggcctttaactttatcgtgaacgattcaaggaagaaacccatctggaatgtactgatgtggacctcgctgttccttggcaacggcgttctcctgtgcttttatagtcaggagtggtacgcgagacagcactgccctctgaaaaatcctacatttttggactacgtgcgcccacgttcatggacttgtcgctatgtattttag

SEQ ID NO: 242607 - DNA, 1569 bp, synthetic construct
  misc_feature 1..1569: note = Description of Artificial Sequence: Synthetic coding sequence
  source 1..1569: mol_type = other DNA
atggaaccgggtggggcacgtctcaggctccagaggaccgaaggcttaggaggcgaaagggaacgacaaccctgtggggatggaaacaccgaaacacaccgagctccggacctagtacagtggactagacacatggaagcggtgaaagcacagctactggaacaggcacaggggcaactaagggaactgctggaccgagcaatgagagaggccattcagagctaccccagtcaggataaaccgctcccacctccacccccagggagtctgtcacgcacacaggaaccttctctgggaaagcaaaaagtttttatcattcggaaaagcctcctcgatgaactgatggaagtacagcactttagaactatttaccacatgtttattgcaggactgtgtgtgttcattatttcaactctggccatcgacttcatcgacgaaggtagattactgctggagtttgacctgctgatctttagctttggacagctcccacttgctttggtgacctgggtgcccatgttcctcagtactctcttagcaccttaccaggccctgagattgtgggcacgcggtacatggacccaagctactggactgggatgcgctctgttggctgcacacgcagtagttctctgtgccctaccagtgcacgttgcggttgagcaccaacttcctcctgccagcaggtgtgttctagttttcgagcaagtacggttccttatgaaatcctattcttttctcagagaggctgttcctggaactctgcgggcaagacggggtgaaggcattcaggctcctagcttttctagttacctttacttccttttttgcccaacccttatataccgggagacatacccacgaacaccatacgttcgctggaattacgttgccaagaatttcgcgcaagcactgggctgtgtcctttacgcttgtttcatcttaggcaggctgtgcgtcccggtctttgctaacatgagccgagaacccttcagcactagggcactggttctctctatactccatgcgactctgccaggtatttttatgctgttgttaattttcttcgcattcctgcactgttggttgaacgcctttgccgagatgctgcgctttggagacaggatgttctaccgtgattggtggaatagcacttctttcagcaattactatcgcacctggaatgtagtggtgcacgattggttgtactcttacgtttatcaagatggcctgagacttttgggcgctcgggcacgaggcgttgctatgctaggcgtgtttctagtgtcagctgtggcccacgagtacattttctgctttgttctggggttcttctatcccgtaatgctcattttatttctggtaatcgggggtatgctgaattttatgatgcacgatcagcgcacgggccctgcttggaatgtgctgatgtggaccatgcttttcttgggtcaaggcattcaggtgtcgctctattgccaggagtggtacgcacgcagacattgcccactgcctcaggccacattttggggacttgttaccccacgttcttggtcgtgccatacttag

SEQ ID NO: 242608 - DNA, 3426 bp, synthetic construct
  misc_feature 1..3426: note = Description of Artificial Sequence: Synthetic coding sequence
  source 1..3426: mol_type = other DNA
atggacgattctggggagctcggagggctcgaaactatggaaactctcacagagttaggagatgagctcaccctgggagacatcgatgaaatgttgcagttcgtatccaatcaagttggagagttccccgacctttttagtgaacagctgtgtagctcctttcccggaagcgggggaagcggctcttctagcggatcatcgggaagttcatcatcctccagcaacgggagaggatcctcctcaggagctgtagaccctagcgttcagagatctttcacacaggtgactctgccatccttttccccgagcgcagcctccccccaggctcccacgttacaggtcaaggtgagtcccacctctgttcccaccaccccccgagccactccaatactccagcccagaccccagccccagccccaaccgcagactcagctgcaacagcagactgtgatgattaccccgaccttttccactactccgcagacccgcattattcaacaaccccttatataccagaatgctgccacttccttccaagtgctacaaccccaggtacagagtcttgttacctcctcccaagttcagcctgtgaccatccagcagcaggtacagacggtgcaggcccagcgggtgttaacacagactgctaatggcaccctgcagacacttgctcccgctaccgtgcaaacagtagcggcaccacaggttcagcaggttcccgtgctcgtccagcctcaaatcatcaaaactgattcattggtccttaccacccttaagactgatgggagtcctgttatggctgcagtgcaaaaccccgctcttacggctctcactacaccgatccaaactgccgctctgcaggtgccaacactcgttggtagtagtggcacaatcctgacaacaatgcccgtcatgatgggccaggaaaaggtcccaattaaacaggtccctggtggagtgaaacagttagaacctccgaaagaaggagaacgtcggacaactcacaacattattgaaaaaaggtatagatcatcaattaatgacaaaattattgagttgaaagatttggtcatgggtacagatgctaaaatgcacaagtctggtgtgctacggaaagcaatcgactatattaagtaccttcagcaggttaatcataagctgcggcaggagaacatggtcttgaaattagccaatcagaagaataaactcttgaaggggattgatctcggatcccttgtggacaacgaggtggacctgaaaatcgaagactttaatcagaatgtcctgctgatgagccccccagcttcagactccggatctcaggcagggttctctccttatagtattgacagcgagccaggctcaccactcctcgacgatgccaaagtgaaggatgaaccggactctccacctgtggccttgggaatggtcgacagatctcggattctgctgtgtgtgttaacgtttctatgtctctcatttaatcccctaacatctctgcttcaatggggaggtgcacacgacagcgatcagcacccccattctgggagtgggaggtccgtcctctccttcgaatcaggaagcgggggatggttcgactggatgatgccaactctgctcctatggctcgtaaatggggtcattgtcttgtctgtgttcgtgaaactcttggtgcatggggaaccggttattagaccacactcacgatccagcgtgacattctggagacatcggaaacaggccgatctcgatttagcccgaggcgactttgctgctgcagccggtaacttacagacatgtcttgcagttctgggacgcgctctgccaacttcgcgtctagatctggcttgctccctgtcctggaacgtgatccggtattcactccaaaagttgcgactggtccgctggctcctcaagaaggttttccagtgcagacgtgccacacctgctaccgaggcaggattcgaagatgaggccaaaacgagcgccagggacgccgctctggcataccaccgattacatcaattgcacatcacaggcaagttgcccgctgggagtgcttgttctgacgttcacatggcactatgtgcagtgaatcttgctgaatgtgccgaagagaagataccgccatctaccctcgtggaaatccaccttaccgctgccatgggactgaaaactcgctgcggtggaaaactgggctttctcgcctcatatttcctgtcacgggcacaatcactgtgcgggccagaacacagcgcggtgccagacagcctgcgatggctgtgtcaccccttggggcagaagttcttcatggagcgaagttggtcagtgaagagtgcagcgaaagagagcctttactgtgcacagagaaacccggctgatcctatcgcccaagttcatcaagcattttgcaaaaacttgctggaaagagccatcgaaagtctggtaaaaccgcaggcaaagaagaaggctggtgatcaggaagaggagagctgcgaattcagctctgctctggaatatttgaaactcctgcatagtttcgtggattctgttggcgtcatgagccccccattgtcacgcagctccgtactgaaatcagcccttggtcccgacatcatttgccgctggtggacatctgccatcacggtggctatcagttggctccagggggacgatgctgctgtgaggtcccatttcaccaaggtggaacgaattcctaaagcccttgaggttacagagagcccactggtcaaggcaatctttcatgcttgcagggcgatgcatgccagtcttccaggaaaagctgacgggcagcagtcctctttctgccactgtgagcgtgccagcggacatttatggagttcattgaacgtgtccggagccacctccgacccagcgctcaaccatgtagtgcagctcctcacctgcgatctgctcctcagcctccggacggccttatggcagaaacaggcatctgctagccaggccgtgggagagacctatcacgccagcggcgctgagttggcgggatttcagagggacctcggaagcctgcgcagattagctcactcgttccgccctgcgtaccgcaaagttttcttgcatgaggccacagtcagattgatggccggagcttcacctactaggacacaccaactgctggaacatagtctccgacgacgcactactcagtccacgaaacatggcgaagtggatgcttggccgggtcagcgggagagggctacagcgatactgctggcgtgtcggcacctgcctctttcttttctttcctctcctgggcagagagcagttttactggccgaggccgctcgaacacttgaaaaagttggcgatcgcagatcttgcaacgactgccagcagatgatcgttaaactgggcggaggcactgcaatcgccgcttcatag

SEQ ID NO: 242609 - DNA, 2055 bp, synthetic construct
  misc_feature 1..2055: note = Description of Artificial Sequence: Synthetic coding sequence
  source 1..2055: mol_type = other DNA
atggacgactccggcgagctcgggggattggaaaccatggagactctgaccgaactaggagatgaactcaccctgggggatatcgatgagatgcttcagtttgtgtcaaatcaagtgggagagtttcctgacctgttcagcgaacagctctgttcctcgttccccggtagtggcggatcaggatccagctcaggctcctcaggttcatcttcttcttccagcaatggccgaggaagctctagcggcgctgtggacccctccgttcagcggtcattcactcaggtaacactaccttccttttcgccctcggctgcctcaccgcaagcccctacactgcaagtgaaagtgtccccaacatcggtccccactacgcccagggcaactcccatccttcagcctcggcctcagccacagccacagccacagacacagctgcaacagcaaacagtcatgataacccctaccttttcaaccactccccagacccggatcatacagcagccacttatatatcaaaacgcagccacttcatttcaggtgctccaaccccaggtacagagtctggttacctcttcccaagtccaacccgtcacgatacagcagcaggtgcagacagttcaagcccagcgggtgctcactcagaccgccaacggcacgctgcaaaccttagctcccgcaaccgtacaaaccgttgctgcccctcaggtgcagcaagtgcctgtgctggtccaaccgcagatcattaaaacagacagcctggtcctaaccactttgaagactgatgggtcaccagtaatggcagcagtccagaatcctgccctgacggccctgactacacccatccaaacagctgcacttcaagtacctaccctggttggtagctctggtacaatactgactactatgccagttatgatgggccaggagaaggtgccaatcaagcaggtcccagggggagttaagcaactggagccacctaaggagggcgaaaggcgaactacacacaacatcatcgagaaaagatatcggtcttccattaatgacaagattatcgagctcaaggacctcgtgatggggaccgacgcaaaaatgcacaagtccggagttcttagaaaagccatagattatataaagtacttgcagcaggttaatcacaaactgcggcaggagaatatggtgctaaaattagccaatcagaagaacaagctgttaaaggggatcgatctgggttcgctagtggacaatgaagtggacctcaagattgaggatttcaatcaaaacgtgctgctgatgagccctcctgctagcgatagcgggtctcaggcgggtttttccccctactcaatcgacagtgaaccagggtccccattgttggatgacgcaaaagtaaaggacgagcctgatagcccgcctgtggccttaggcatggtggacaggtctcgtatcctgctatgtgtgctgacgttcctatgcctgtctttcaatccgctgacttctctgttacagtggggcggtgcacacgactccgatcaacacccccactcaggcagtgggcgaagtgtgttgagctttgagtccgggagcggaggttggtttgattggatgatgcccactctcctgttatggctggtgaacggagtgattgtgctgagcgtatttgtgaaactgctcgtacatggagagcctgttattaggccccatagccgaagtagtgtcaccttttggaggcaccggaagcaggcggatttggacttggccagaggcgtctacggtaaaaaatctggcgctacgcactctatcgaagaggaactgaatattcatatttcccggggtactaggacccggaccctcttatccagcagacgtttttgcagttgctgtcgacaaccgaccaatctgccaggcagcttcgggccaggtaccgctcatctccctccaggcccaggtctgcaaccgttgctagagagggacccgcttcagccagccgaggccacacccggtgctctcgctgcgcaggaatctctccctgtgcccgcaggacatgcatcacactag

SEQ ID NO: 242610 - DNA, 3309 bp, synthetic construct
  misc_feature 1..3309: note = Description of Artificial Sequence: Synthetic coding sequence
  source 1..3309: mol_type = other DNA
atggatgattctggggagctgggaggtttagagaccatggaaaccctgaccgagctcggggacgaactgactctgggggacatcgacgagatgcttcagtttgtgtccaaccaggtaggggaattccctgatttgttttctgagcagctttgctcctcttttccgggaagcggcggatcaggcagctctagcggcagcagcggtagtagtagttcttcaagtaatggaaggggtagcagctctggggcagtggatccctcagtgcaaaggagcttcacccaggtgactttgcctagcttctccccttccgcagcatcaccacaggcccctacccttcaagtaaaggtctcaccaacatccgtgccaacaacgccacgcgcaactcctatcctgcagccacgtccccagcctcagcctcagccccagacacagttacagcagcaaacggttatgatcacccccactttcagcactacaccacagacccggattatccagcagccactgatttatcaaaacgctgccacaagctttcaggtcctgcagccccaggtacagtcccttgtcactagctcacaggtgcagcccgtgactatccagcagcaggtacagaccgtccaggcccagagggtcctgactcagactgcaaacggcaccctgcagacattggctcccgcaacagttcagacagtcgcggctccccaagtgcagcaggtgccggtgctggttcagccacagatcatcaaaactgacagtcttgttttgacaacacttaagacggacgggtctcccgtgatggctgctgtacaaaacccggcattgaccgcactgactacacctatccagaccgccgctttgcaggtccctactctggtcgggtcatcagggactatcctaacgaccatgcccgtcatgatggggcaggagaaggtgcctatcaagcaggtgcctgggggagtaaaacagctggaaccgccaaaggagggagaacgaagaacgactcataacattatcgaaaaacgataccgctcaagcattaacgacaagattatcgaactgaaggatctggtgatggggaccgacgctaagatgcataaatccggcgtcctcaggaaagctatcgactatattaagtacctccaacaggtcaatcataagctgcgccaggagaacatggtgttgaagctcgccaatcagaagaataaactgttaaaaggaatcgacctgggctctttggtcgataatgaagtggacctgaaaatcgaagatttcaatcagaacgtgctgctgatgagtcccccagcctcagattccggaagccaggcaggcttcagcccgtacagcatcgacagcgagcccggtagcccgctgttggatgacgccaaggtgaaggatgaacccgattcaccgccagtggcactgggaatggtggatcggtctcgaatcctactctgtgtcctgacgttcctctgtctctcctttaacccccttacatcactcttgcaatggggtggggctcatgatagcgaccaacacccacattccggatccggaagatctgttttgtcctttgagagcggatctgggggatggtttgactggatgatgccaaccctcctgctgtggctggtaaatggcgtcatcgtcctatcagttttcgtcaagctgctggttcacggtgagccagtgatccgaccacacagccgatcttctgtaacgttttggcgccatcgtaagcaggccgatctagatctcgccagaggagattttgctgccgcagccggtaatctccagacatgcttagccgtcctgggccgagctttacccacatcgagacttgatctcgcgtgttccctgtcctggaatgttattcgatactccctgcagaaattgagactggtgaggtggcttctcaagaaagtctttcaatgccgccgagccacccccgctactgaggcgggattcgaggatgaggccaaaacatccgcaagggacgcagcactggcataccaccgcctccaccagctgcatattacggggaagctgccggcaggcagtgcctgttcagacgtgcatatggctctttgtgctgtaaacctggctgaatgcgcggaagaaaagatcccaccgtccacactggtggaaatccatctgactgcagccatggggctgaaaacgagatgtggcggtaaacttggcttcttagcaagctacttcctgtcgcgtgcccagtcactgtgcggccctgagcatagcgcagtccccgactccctcaggtggctgtgccacccccttggccagaagttttttatggaaaggagttggtcagtaaagtctgccgcaaaggaaagcctgtattgtgcccagaggaatcccgctgatcccatcgcccaggtacatcaggccttctgcaaaaacttgctggaacgagccatcgaatccttggtgaaaccgcaggcaaagaagaaggctggcgaccaagaggaagaatcttgcgagttctcttcagcactcgaatacctcaaactcctgcattcattcgtggattctgtcggcgtaatgtctccccctctgagcaggtcttccgttctgaagtccgccttagggccagacatcatctgccgctggtggactagcgccataacggttgccatttcctggttgcagggggatgacgcagctgtccgctcacatttcaccaaagttgaaaggatccccaaggcattggaagtcactgaatcacccctggtaaaggctatctttcacgcgtgcagagctatgcacgcttcactcccgggaaaggcagatggccagcagtcctcattttgtcactgtgagagggcatcggggcacctttggagcagcctgaacgtaagcggtgccacgtcggaccccgcattgaaccacgtggtgcaattgctgacttgcgatctgttgctctcactgaggacggctctgtggcagaaacaggctagtgcctctcaagccgttggagagacgtaccatgcatcgggcgctgagctggcaggcttccaaagagatcttggttctctgaggagattggcccattccttcaggcccgcatacaggaaggtgttcctgcacgaggccacagtgaggctcatggccggtgcctctcctacaaggactcatcagctcctggagcactccctcaggaggagaactacgcagtcgacaaaacatggagaggttgatgcatggccaggtcaacgagaaagagcaaccgccatccttctcgcctgcaggcatttaccgttgagttttctgccttgtctgcagccatcgtag

SEQ ID NO: 242611 - DNA, 648 bp, synthetic construct
  misc_feature 1..648: note = Description of Artificial Sequence: Synthetic coding sequence
  source 1..648: mol_type = other DNA
atgcatgctagcttaccgggaaaagctgacggacagcaatccagcttctgtcactgtgagagagcctcaggtcacctgtggtcgtctctgaatgtgtccggggcaaccagcgatcctgcactgaaccacgtggtgcaactgcttacctgcgatctcctcctgagtttgagaaccgccctctggcagaagcaagcaagcgcctctcaggccgtcggagagacataccatgcatcaggagcagaactcgcgggatttcaacgcgacctgggctctctgagaaggctcgcccattcctttcgtccagcttatagaaaggtatttctgcacgaagccaccgtgcgcttgatggctggagcgtctccaaccagaacacaccagctcctggagcatagcctgcgccgaaggacaacccaaagcaccaagcacggtgaggttgatgcatggccaggacaacgggaaagagctaccgccattctactcgcgtgcagacatttacccctaagctttttatcctcccccggacagcgggcagtgctgcttgctgaagccgctcggaccctggagaaagttggggataggaggtcatgcaacgactgccagcagatgatcgtcaaactggggggaggcacagccatcgcagcgagctag

SEQ ID NO: 242612 - DNA, 900 bp, synthetic construct
  misc_feature 1..900: note = Description of Artificial Sequence: Synthetic coding sequence
  source 1..900: mol_type = other DNA
atggacctggtccttcgcgtggcagattactatttcttcaccccatacgtctaccctgcgacttggcccgaggatgacatctttcgccaggctatcagcctcctgatcgtaaccaatgtaggggcttatatcctctacttcttttgtgctacactttcatactattttgtgttcgaccatgctcttatgaaacacccccagtttctgaagaaccaggtccgcagagaaattaagttcacagtccaggcactcccatggatcagcattctgacggtggcgctttttttgttagaaatccgcggatacagcaagctgcacgatgatctcggggaatttccatacgggctttttgagttggtggtgtctatcattagcttcttgtttttcaccgacatgtttatatactggatccacaggggcttacatcataggcttgtgtacaaaagactccataagcctcaccatatttggaaaatccctacaccgttcgcctcacatgctttccaccccatcgacgggtttctccagagtctgccatatcatatctatcctttcatcttccccctccacaaagtggtatatctctcgctctacatcctggtaaacatttggacaataagtattcatgacggtgactttagggttccccagatactgcagcccttcattaacggctctgctcatcacactgatcatcacatgttctttgattacaactacggccaatacttcactctgtgggatagaatcgggggaagctttaagaacccatctagctttgaagggaaggggcctctatcctatgtgaaggagatgacagagggtaaacggtcatcacattctggcaatgggtgcaagaatgaaaagctctttaacggggaattcaccaaaaccgagtag

SEQ ID NO: 242613 - DNA, 900 bp, synthetic construct
  misc_feature 1..900: note = Description of Artificial Sequence: Synthetic coding sequence
  source 1..900: mol_type = other DNA
atggatctggtgttaagagtcgctgattattacttctttactccatacgtttaccccgcaacttggccggaggatgacatttttcggcaggcaataagtctgttaatcgtaacgaatgtgggtgcttacatcctgtacttcttctgtgccaccctgtcatactattttgttttcgaccatgctcttatgaaacatccacagtttctgaagaaccaagttcgccgtgagataaagtttaccgtgcaggctctgccttggatcagcatcctgacggttgcactctttctgctagagattagggggtactccaagctccatgacgacctcggggagttcccatacggactgttcgagctggtagtgtctatcatctcatttcttttcttcacagacatgttcatatattggatccacagaggcctgcatcataggttggtgtacaaacgtctccacaagccgcatcacatttggaagattccgaccccgttcgcatcacatgctttccacccgatagatgggttcttacagtctctgccctaccatatataccctttcatcttccccctacacaaagtggtgtatctctccctgtacatcctggtcaatatctggaccatttccatccacgacggggatttccgcgtgccccagattctgcagcccttcatcaatggaagcgcccatcacacagatcaccacatgttctttgattacaactatggacagtactttacactgtgggatcggattggcggtagtttcaagaacccaagctcttttgagggtaagggcccactgtcatatgtgaaggagatgacagaaggaaagcgctcatcccattctggcaatggttgtaagaatgaaaaattgtttaacggcgagtttacgaaaactgagtag

SEQ ID NO: 242614 - DNA, 192 bp, synthetic construct
  misc_feature 1..192: note = Description of Artificial Sequence: Synthetic coding sequence
  source 1..192: mol_type = other DNA
atggagggtgctggcgctggcagcggatttcggaaggagctggtgagcaggttactgcacctgcactttaaggacgataaaaccaaagaggccgctgttaggggggttaggcaggcacaggcggaagatgcactgcgggtggatgttgaccagctggagaaagtactgccccagctcctgctggacttctag

SEQ ID NO: 242615 - DNA, 246 bp, synthetic construct
  misc_feature 1..246: note = Description of Artificial Sequence: Synthetic coding sequence
  source 1..246: mol_type = other DNA
atggagggcgctggcgctggctccggttttagaaaagagctcgtgtcccgactccttcacttgcacttcaaggacgacaagactaaagtgtccggcgacgctctgcagttaatggtcgaattacttaaggtgttcgtggtggaggccgcagtgagaggcgttcgccaggcccaggcagaggatgccttacgcgtggatgtcgatcagttagagaaggtgctgccccagttgctcctcgatttttag

SEQ ID NO: 242616 - DNA, 2121 bp, synthetic construct
  misc_feature 1..2121: note = Description of Artificial Sequence: Synthetic coding sequence
  source 1..2121: mol_type = other DNA
atggggggtaagggtggtggagatacacggggaccagttctgtttccctgtcagctagcccaagcactgtcccctagacgcgcttttcctagagaactcaaagagaaaggtcagcggatgagctcccaacccgcaggaaatcagacctccccaggggctacagaggattactcctatggcagctggtatattgacgaaccccagggcggagaggagcttcagccagaaggagaggtgcccagttgtcacacgagcattccccctggcctctaccacgcctgtctggccagcctgtctatcctggtactccttttactcgccatgttggtgcgacgcagacaactctggcctgactgtgtgcggggtcgccctggcttgccttctcctgtcgatttcctggcaggagatagaccgcgtgctgtccccgcagctgtgttcatggtgctgctgagtagcctatgcttactcttgcctgacgaggatgccctgccctttctgactctcgcatccgctccatcccaagacggtaaaaccgaggcgccacggggagcctggaaaatcctgggcctgttttattacgcggctctgtactatcccctagcggcttgcgcaactgccggacacaccgccgcacatctcctgggctccaccctgtcctgggctcacctgggagtgcaggtgtggcagcgggcagagtgtccacaggtacccaaaatctacaaatactattctctcctagcctctctgccactgctgctcggcctaggttttctgagcctgtggtatccagttcagctcgtgcgctccttctctcgcaggaccggcgctgggtcaaaaggacttcagtcatcatatagtgaagagtatctccgaaatcttttgtgtcgtaagaagctgggatcttcctatcacacatctaaacatggcttcctcagttgggcccgtgtgtgcctcaggcattgcatttacacacctcagcctgggttccacctcccccttaaactggtactgagcgctacgctgactggaaccgccatctatcaagtggcgctactcctgctggtcggcgtggtccctactattcagaaggtgcgtgccggagttactaccgatgtttcctatctgctagctggtttcggaattgtgctttctgaagacaaacaggaagtggttgaactagtgaaacaccatctctgggccttggaagtctgctacataagcgcccttgtcctgtcctgtcttttgacctttctggtcttgatgcggagccttgttacccacagaaccaatctgagagctctacatcgcggagcagctctggacctgtccccgctacaccggtccccgcacccctcacgacaagccatcttttgctggatgagctttagtgcctatcaaacagcatttatttgcttgggtctgcttgtgcaacagatcatctttttcctggggacaaccgcactggcgtttctcgtcttgatgccagtgctgcacggcaggaacctcctcttgtttagaagcttagaatccagctggccattctggctaacacttgctctggctgtgatccttcagaatatggccgctcattgggtattcctggaaacccacgatggtcacccccaactaactaaccgtcgggtgttgtacgcagcgacgtttttgctgtttcctcttaatgtgttggtgggcgctatggtagcaacatggcgggtgctgttgagcgcactttataacgccatacatttaggccagatggacctctcgctgctgccacctcgtgcagcaaccctcgaccccggttactacacgtatagaaactttctgaagatcgaggtgagtcagagtcaccccgctatgaccgccttttgttccctgctgctgcaagcgcagtcgctgttgcccaggactatggctgcccctcaggactcccttagacctggcgaagaggatgagggtatgcagctcctgcaaactaaagacagcatggccaaaggtgccagacccggtgccagccgcggacgagcaaggtgggggttggcgtacactttgctgcacaatcctaccctgcaggtctttcgaaagacagccctgttgggagcgaatggcgcacagccctag

SEQ ID NO: 242617 - DNA, 2004 bp, synthetic construct
  misc_feature 1..2004: note = Description of Artificial Sequence: Synthetic coding sequence
  source 1..2004: mol_type = other DNA
atgtcctcacagccagcaggcaatcagacttcgccaggcgctaccgaggactactcatacggctcctggtatatcgatgagcctcaaggtggagaggagctacagcctgaaggcgaggtaccaagctgccatacctcaatcccccctggcctgtaccacgcgtgcctggccagcctgtctattctagtccttctcctactggccatgcttgttcgacgcagacagctctggccggactgcgtccggggaaggcccggtctgcccagtcccgtggatttcttagcgggagatcggccaagagccgttccggctgctgtatttatggtgttgctgagctctctgtgtctgctgctcccagatgaagatgccctccctttcttgacccttgcctccgcccctagccaggatggtaaaacggaagcgcctagaggagcatggaagatcctggggttgttctattatgccgctctgtactacccactcgcagcttgcgctacggccggtcacactgccgcacacctgctcggctcaactctgagctgggctcatctgggagtgcaggtctggcagcgcgctgagtgcccacaggttcccaagatctacaaatattattctctgctcgcttcccttccccttctgctgggtctcggatttctcagtttatggtaccccgtgcagctggtccgcagcttctcgcgccgaacgggcgctggatcgaaagggcttcagagtagctattccgaagagtacctgcggaacctcctctgccgaaagaagctgggcagcagctatcacacaagcaaacacgggttcttgtcctgggctagagtctgcttgcggcactgtatatacacacctcaaccaggtttccatctgccactgaagctagttctctcagctaccctcactggcaccgcaatttatcaggtggcactgttgcttctggttggagtggttcccactatacaaaaagtacgcgctggcgttaccaccgacgtatcctaccttttagccggattcggaattgtcctgtccgaagataagcaggaggtggtcgaattggtgaagcaccacctatgggccttggaggtatgctacattagtgctctcgtgctgtcttgcctgctcaccttcttagttcttatgcgtagcctcgtgacccaccgaactaatctccgagccttacaccgcggtgcggctctcgatctgtctccattgcacaggtctccccacccaagtaggcaagcaatattctgctggatgagtttctctgcttaccagactgccttcatttgcctggggctcttagtccagcagattatcttcttccttggaactactgccctagcttttctggttctcatgcctgttctgcacgggcgtaaccttcttctgtttcgcagcctggagagcagctggcctttctggctcacacttgctttagcagttatcctgcaaaacatggcagcccattgggtttttttggagacgcacgacggccatcctcagctgacaaaccgcagagtcttgtatgcagccacattcctcctgttccctctgaatgtcctggttggtgctatggtcgctacctggagggttttgctgagcgccctgtataacgctatacatctgggccagatggatctatcactgttgcctcctcgggcagccacccttgatcctggttactatacataccggaactttctcaagatagaagtctctcagagtcaccccgcaatgacagctttctgctctcttctgctacaggcgcagagcttgttacccaggaccatggctgcccctcaggactccctacgcccaggagaggaggatgaagggatgcagttactgcagaccaaagattccatggctaagggggctcgcccaggagcctctagagggagggctcggtgggggcttgcttatacactcctccacaatccgactttgcaagtattcagaaagacggctcttcttggcgcaaatggcgcacagccttag

SEQ ID NO: 242618 - DNA, 2004 bp, synthetic construct
  misc_feature 1..2004: note = Description of Artificial Sequence: Synthetic coding sequence
  source 1..2004: mol_type = other DNA
atgagctcacaacccgcaggcaatcagaccagtcctggggcaaccgaggactactcttatggatcttggtacatcgacgagccccagggcggagaggagttgcaacctgaaggggaagtgccctcatgccacactagtatcccccctggcctgtaccacgcttgcctggcctctctctctattctggtcctgttgctgctcgcgatgctggtgcgcaggcggcagctgtggccagattgtgtcaggggcagacccggtctcccaagccctgtggacttcctcgcgggtgatcggccaagggcagtccctgccgcagtatttatggtgcttttgtcttccctgtgcctcctactgcccgacgaggatgcactgccattcctcactttagcatccgctccttctcaggacggcaaaactgaagcgcctaggggagcctggaagatcttggggcttttctattatgcagcactgtactatcccctggcagcctgcgcaacagctggacataccgcggcacacttgctggggtccaccctgtcatgggcccaccttggcgtccaggtctggcagagggctgaatgccctcaggtacccaagatctataagtactattctctgctggctagcctgcctctgctgctggggctagggttcttatccttgtggtaccccgtccaactagttcgttccttcagtcggaggacgggcgcagggtccaaaggactccaatcgtcatattcagaagaatacctgaggaatctcttgtgcaggaaaaaacttggtagctcctatcacacatctaagcatggcttcctgtcttgggccagagtgtgcctgcgtcactgcatctatacacctcagccaggcttccaccttccactcaagcttgttctcagcgccaccctaacaggtacggcaatttaccaggtggccctgctgcttctggttggcgtggtgccaacgatacagaaggttagggcgggagtgaccacagacgtgagttacctgttagctggctttggcatcgtgctatctgaggataagcaggaggttgtcgagctggtgaaacaccacctatgggcgctcgaggtgtgttacatttctgctttggtgctcagctgtctgctgacattcctggttctgatgaggtctcttgtgactcacaggacaaatcttcgagccttgcaccgaggtgctgctctggacctgagcccactgcatcggtccccacacccaagccggcaagctattttctgctggatgagtttcagtgcataccagaccgcgtttatttgtctggggctcttagtgcaacagataattttctttctggggaccaccgcactcgcttttctcgtgcttatgcctgtgctgcacgggaggaacctgcttctgtttagatctctggaaagcagttggccattctggctgactctcgccctggctgttatactccagaatatggcagcacactgggttttcctggagactcatgatggtcatccgcagcttaccaaccgcagagttctgtatgccgcaaccttcctgctgtttcctcttaatgtactcgtgggtgccatggtcgctacttggcgcgtgctgctttccgctctgtacaacgccatccatcttggacagatggatctgtcattattgcccccaagagccgcaacactggaccctggatactatacctacaggaattttctcaaaattgaggtatcacagtcacatccagccatgaccgctttttgctcgcttctgctacaggcccaatctctcttacccaggactatggccgctcctcaggattccctccggccaggggaagaagatgaggggatgcaattactccaaactaaggacagtatggctaagggagccaggccgggagcctctcgcggtagagctcgttggggcctcgcatataccctgctccataacccaacactgcaggtgttcagaaagaccgcactgctgggcgctaacggagcccagccttag

SEQ ID NO: 242619 - DNA, 1800 bp, synthetic construct
  misc_feature 1..1800: note = Description of Artificial Sequence: Synthetic coding sequence
  source 1..1800: mol_type = other DNA
atgttggttcgcagaagacagctgtggcctgattgcgtccgagggcgaccaggactccccagccctgtggacttcctggcaggcgacaggccgagagcggtccccgcagccgtatttatggtgctcctaagctctctgtgtctgctgttgccagatgaggacgccctgccatttcttacgctcgcctcagcaccgtcacaggacggcaaaaccgaagctccaagaggggcatggaagattctcggcttgttttattacgccgctctgtactaccctctggccgcttgtgctacggctggacataccgccgctcatctgttaggatctacgctgagctgggcgcatctgggcgtgcaagtgtggcagcgggctgagtgtccccaagtgcctaagatttataagtactatagcctcctggcttccctaccccttcttttgggcttgggtttcctctcgttgtggtatcccgtccagctcgtgcggtccttctccaggcgcaccggcgcaggaagtaagggcctgcaatcctcttactctgaggagtacttgaggaatctcctgtgccgtaagaagctagggtcatcgtaccatacaagcaaacatggatttctaagctgggcaagagtctgcttgagacattgtatatacaccccccagccgggattccacctccccctgaaattggtgctaagcgccacgttaaccgggaccgcgatttaccaagtggctctgcttctgttggtgggggttgtccccaccatccagaaagttagggccggagttacaacagatgtttcttatctcctagctgggttcgggatcgttctgtccgaggataagcaggaggttgtggagttggtgaagcatcacctttgggcactggaggtatgttacatcagcgctttagtcctgagctgtctgttgactttcctcgtgctgatgagaagtctggttacacatcgtaccaacctgagggcgttgcacaggggcgctgcactggacttgtcgccacttcaccgttccccacatccaagccggcaggccattttttgctggatgtctttttccgcctatcagacagctttcatatgtcttggactgctggtgcagcagatcatctttttcctcgggacgacagcactggcctttttggtcctgatgcccgttcttcatgggcgaaatttactcctgttcaggtctctcgagtcgtcctggcccttctggttgacattagcactcgctgtgatcctccagaatatggccgctcactgggttttccttgagactcacgatggtcatccccagctaacgaatagacgagttctatacgcggctaccttcctacttttcccactgaacgtcctcgtgggcgcaatggtggcaacctggcgagtcttactatctgccctgtataatgctatccacctgggtcagatggatctctctctcctgccccctcgcgcagccacactggatccaggctactacacctatcgaaacttcctcaaaatagaggtgagtcaatcccatcctgcaatgacagccttctgcagcctactgctgcaggcacagtcacttctgcccaggactatggctgcccctcaagactcattgagacctggtgaagaggatgagggaatgcagttgctgcagaccaaagacagcatggcaaagggcgctcgcccaggcgcatctcgcggacgagccaggtggggactggcttatacactgctgcacaacccaacactccaagtgttcagaaagaccgccctgttgggggcaaatggcgctcaaccctag

SEQ ID NO: 242620 - DNA, 1977 bp, synthetic construct
  misc_feature 1..1977: note = Description of Artificial Sequence: Synthetic coding sequence
  source 1..1977: mol_type = other DNA
atgtctagccaacccgctggcaaccagacaagtcctggcgcaacggaggactattcatatggatcatggtacatcgatgagccacagggcggtgaagaattgcagccggaaggcgaggtgccgtcatgccatacctccatcccccctggcctttaccatgcctgtttggcttccctttctatcctggtattgcttctgcttgcgatgttggtccggaggcgccagctttggcccgactgcgttaggggcagacccggactgccccgtccacgagctgttcctgccgcagtgttcatggtcctcctcagtagtctatgcttgcttctcccagacgaagacgccctgcctttcttgacacttgctagtgccccatctcaagatggcaagacagaggctccaaggggagcttggaaaattctgggactattctattacgccgctctctactacccactggcagcttgcgcaactgcgggtcacacagccgcacatctcctgggctctaccctctcttgggcacacctgggtgttcaggtctggcaaagggcagaatgtcctcaggtccccaagatatataagtactacagtctgttggcttcactgccactgctcctggggttagggtttctttcattatggtacccagtgcagctggtccgtagtttttcccgcaggactggagcagggagcaaaggacttcagtccagctacagcgaggagtatttgagaaatctgctctgtcgcaagaagctgggctcttcctatcacacctcaaagcacggctttctgtcttgggcaagggtctgtttgaggcactgcatctatacaccccagccgggattccacctcccgctgaaactcgtgctttccgcgacactgactggaactgcaatctaccaagtggccctactcctgcttgtgggcgtggtgccaacaattcagaaagtgagggcaggagtcaccacagacgtcagctatctgctcgctggtttcggcattgtgctttccgaggataaacaagaggttgtagaactcgtgaagcatcacctgtgggctctggaggtgtgttatatttcagcactggttttgtcatgtctgttaacattccttgtcctgatgcgcagcttggtcactcacagaactaacttgcgcgctcttcatcgcggagctgctttggacctttcccctctccataggtcaccgcatccatctcggcaggctatcttctgttggatgagctttagcgcttatcagaccgcgttcatctgtttgggattactcgtgcaacagatcatcttctttctgggaactacagctctagccttcctggtgctgatgccagtcttgcacggaagaaacctgctgttatttcgtagtctggagagcagctggcccttctggctgactttggcattggctgtcatcctccagaatatggccgcacattgggtttttctcgaaactcatgacggccacccccagctgacaaacaggcgggtgttgtacgctgcaaccttcctgttgtttccgctgaacgttctggtgggggcaatggtggctacctggagagtgctgttgtcggccctgtacaacgccattcacttgggccaaatggacctatccctcctccccccaagggcagcgaccttagatcctggatactatacctatcggaattttctcaagatagaggtttctcagagtcatccagcgatgacagcgttttgctctctattactgcaggcccagagtcttctgccaaggacgatggctgcacctcaggactctctgcggccaggagaggaggatgagggcatgcagctgctgcaaactaaagattccatggcaaagggagctaggcccggtgcatcccgcggacgggcacgctggggcctggcttacactctgttgcacaatcctacccttcaggtctttcgaaagaccgcactcctgggggctaatggtgcgcagccttag

SEQ ID NO: 242621 - DNA, 480 bp, synthetic construct
  misc_feature 1..480: note = Description of Artificial Sequence: Synthetic coding sequence
  source 1..480: mol_type = other DNA
atgtcaagccagccagcgggaaatcagacctctccgggtgccacagaagactattcttatggaagctggtatatcgacgaaccacaggggggtgaggagctccagcccgaaggcgaagtgccttcctgtcacacaagtattccacccggtctataccacgcctgcctcgccagcctctcaattctggtcctgctcctgcttgccatgttagttcgtcggcgacagctctggcccgactgcgtaagagggaggcccggtctgccatccccagtggactttctggccggagaccgtcccagagccgttcccgcagccgtattcatggtccttctgtcttcactgtgcctgttacttcctgatgaagatgcactgcctttcctaaccctcgcgagcgcaccgtcccaggacgggaaaacggaggcaccacgcggtaacctcccaaaaataacagaactgcggcttgtgcgggcatggatatag

SEQ ID NO: 242622 - DNA, 2121 bp, synthetic construct
  misc_feature 1..2121: note = Description of Artificial Sequence: Synthetic coding sequence
  source 1..2121: mol_type = other DNA
atgggcggaaaaggcggtggggatactcggggtccggtgctgtttccttgtcagctggcccaggccctgtcgccacgcagagccttccccagagaactgaaagagaaaggacaacggatgtcctcccagcccgcaggaaaccagacctctcccggagctaccgaagactatagctatgggtcatggtatatcgacgagccacagggtggagaggagctccagccagagggtgaagtcccgtcgtgtcacaccagcattccacccggactgtaccatgcatgtctggccagcctttctatcctggttctgctgcttctcgcaatgcttgtgcgaaggcgccagctctggccagattgcgttcggggaaggcccggactgccgtcccccgtagatttcctcgcaggcgatagacctagggcagtcccagccgctgttttcatggtcctcctaagttctctgtgcctgctactccctgacgaggacgccctgccatttctgaccctggcgagtgcaccatcacaggatggaaagactgaagctcccaggggcgcatggaagatcttgggattgttctactacgccgctctatactatcccttggccgcatgcgccacagccggacacacagccgctcatctccttggatcgactctttcctgggcgcacttgggggtgcaagtctggcagcgagcagaatgcccccaggtgccaaagatctacaagtactactccctgctcgccagccttcctcttcttctggggctgggctttctgagcctgtggtatccggtgcagcttgtgcgttcattcagtcgacgcacgggtgctggcagcaaaggccttcaaagctcctatagcgaggagtacctcagaaacctgctgtgccgcaagaaacttggctcatcttatcatacaagcaaacacggattcctttcttgggcacgggtatgcctcaggcattgcatctatacgccacagccagggttccatctgccactgaagctcgttctgagcgctactctgaccggaactgcaatttaccaagtagcactgctgttgctggtaggcgtggtaccaaccatccagaaggtcagagcaggagtgactaccgatgtgagctatctgctggctggattcggtatcgtgctctccgaggacaagcaggaggtggttgagctggtgaagcaccatctctgggcactggaagtctgctatatttccgctttggtgttaagctgtctcctgaccttcctggtgttaatgagaagccttgtcacacaccgtaccaacctcagagccctgcaccgcggagctgcgctggacttgtctcccctgcaccggtcacctcacccttcccgacaggccatcttctgctggatgtcattttccgcgtatcagaccgccttcatctgtctgggattattggtgcaacagatcatctttttcctcggcactactgcactggcctttttggtactcatgccggtcctccacggcaggaacctgcttctgttcagaagcctcgaaagctcatggcctttctggctgacactggcactcgccgtgatccttcaaaatatggcagcacactgggtgttcttagaaacacatgacggacatcctcagcttacaaaccggagagtgctttatgccgcaaccttcctcttgttcccactaaatgtgctggttggtgctatggtggctacctggcgtgtattactctctgccctgtacaatgcaatccatctggggcagatggatttaagtctcttgcctcctagagccgctaccctcgacccaggctattacacatacaggaattttttgaagatcgaagtgtctcaatcgcatccggcaatgaccgctttttgctcattactgctccaggcccaaagccttctgccaagaacgatggccgctccacaggatagtctgaggccgggtgaggaggacgagggcatgcagctcttgcagaccaaggactcaatggctaaaggcgctagaccgggtgcatcacgaggccgagcacggtggggactggcatacactctacttcacaatcctacactgcaagtgttccggaagaccgcactgctgggtgccaacggagctcagccttag

SEQ ID NO: 242623 - DNA, 2115 bp, synthetic construct
  misc_feature 1..2115: note = Description of Artificial Sequence: Synthetic coding sequence
  source 1..2115: mol_type = other DNA
atgcagatcaggttactgcgcgctgagctggtggtgcctctttggcagttcatccgccagtggccacctgggtctgacgggtgggggcagatggaggaaaagggacagaggatgagttcccagcccgcagggaaccagactagcccaggggctactgaggattacagttacgggtcttggtacatcgatgagccacaggggggtgaagaactccagcccgagggagaggtcccgagctgccacacctccatacctccaggactgtaccatgcatgtttagccagcctctcgattcttgtgcttctgctcttagctatgctggtgaggcggagacagctatggcccgactgcgtacggggacggccaggtttacccagccctgtggacttcctggccggagataggcccagagccgtgcccgcagccgtcttcatggtgcttctgtcttccctgtgtctcctgctacctgatgaggatgccctgccattccttaccttggccagtgcccctagtcaagatggcaaaacggaggcccctcggggtgcttggaagattttaggccttttttattatgccgcattgtactacccactcgccgcatgcgcgaccgcaggacacacagctgcccacctattaggctctaccctgtcttgggcccaccttggcgtacaggtgtggcagagagcagaatgcccgcaggtgcccaagatctataaatactatagcctcctagcctcgctgcctcttctcctgggactgggattcctgtctctctggtatcctgtgcagctcgtcagaagcttttctcggaggaccggagcgggatccaagggtctgcagagcagttattccgaggagtacctgagaaaccttctctgccgaaagaagctgggaagtagttaccacacaagtaaacatggtttcctgtcatgggccagagtttgcctgcggcactgtatatatacccctcaacccggatttcatctccctctgaagctggttctgtccgcaaccctcacgggcacagccatctaccaggtggccttgctattgctcgtgggggtcgtgcccacaattcagaaggttcgcgcaggcgtaaccacagatgtttcctacctccttgccggttttggcatcgtcttatcagaagacaagcaggaggtagtggagttggtcaaacaccacctgtgggcattagaggtctgttacatttccgccctcgtcttaagttgcctcctgacctttctagtcctcatgcgctcactggtgacacacagaactaacttgagggccctccaccggggtgctgccctggatcttagtcctctgcatagatcccctcacccgtctcggcaggccattttctgttggatgagcttcagcgcataccagactgccttcatttgccttgggttactggtgcagcagataattttttttttgggcaccacggctctcgccttcctagtgttgatgccagtgctgcatggcaggaacttgctcctgttcagatccctggagagcagctggcctttctggctgacattggccttggcagtgatcttacagaacatggccgctcactgggtgtttctggagacccacgatggccacccacagctgaccaatcggcgtgtgctgtacgcagctactttcttgttgttccccctcaatgtgcttgtgggagctatggtggccacatggcgcgttctgttgtcggcgttgtataacgccatccacctggggcagatggacctctcactgttgccccctagggccgctactttagaccccggatattatacgtaccgcaatttcctgaagattgaggtgtcccagagtcatcccgctatgaccgctttctgttcgctactgctccaggcacagagtctgctccccaggactatggccgctccgcaggactcactcaggcctggagaagaggatgagggcatgcagctcctccagacaaaggattctatggctaagggagcaagacccggagcttctaggggcagggcacgatgggggcttgcctacactctgttgcacaatccaacgcttcaggtgttccggaaaaccgccctcctgggagccaatggggcacagccatag

SEQ ID NO: 242624 - DNA, 1674 bp, synthetic construct
  misc_feature 1..1674: note = Description of Artificial Sequence: Synthetic coding sequence
  source 1..1674: mol_type = other DNA
atggccgctggcacgtcgatgagccctgacgaggacgcactgccttttttaactctcgcctccgccccatcccaggatgggaagaccgaggctcctagaggcgcatggaagatactgggtcttttttattatgctgcactatactaccctctggccgcatgtgcaactgccggacatactgcggcacatctcttgggctccacactgtcctgggcccacctcggggtgcaggtgtggcaacgagcagagtgcccacaggtgcctaagatatacaaatactactccctgctcgcttcactccccttacttttgggcttagggttcctttccctgtggtatccggtgcagctggtccgaagcttttcccgccgaacgggcgcagggagcaaaggcctccagtcctcatattccgaggagtacctacggaacctgttgtgtaggaaaaagctaggaagctcatatcacacatccaaacatgggttcctctcctgggcaagggtgtgcctgcgccattgtatttacaccccccagccagggtttcacttacccctgaagctcgttctgtctgctaccctgaccgggacggccatatatcaggtggccctcctgctccttgtaggcgtggtcccgacaatccagaaggtcagggctggtgttactactgacgtttcttatcttctggccggattcggaattgtgctgagcgaggacaaacaggaggtggtagagctcgtgaaacatcacctgtgggccctggaggtctgttatatcagcgcccttgtgctgtcctgcctccttacctttttggtgctgatgcgctcactcgtgacccacaggacaaacctgcgtgcactccaccgaggcgcagccttggacctgagtccactgcaccggagtccacacccttctcggcaggcaatcttttgttggatgagcttctcagcttatcagaccgctttcatttgtctgggcttactcgtgcagcaaatcatctttttcctgggcaccacagctttagctttcttagtgcttatgcctgtccttcacggcagaaacttgcttttgttccggtccctggagtcctcctggcccttctggttaaccctggcgctggctgtcattctccagaacatggccgctcactgggtcttcctggaaactcacgacggccacccacagctcacgaatcgtagggtattatatgctgctacattcctgttgttccctcttaacgtcctcgtcggcgcaatggttgcgacctggagagtactgctgtccgcgctgtataatgccatccacctcggacagatggatctcagcttactcccgcctagagccgctacactggatccgggatattatacgtatcggaacttcctgaaaatcgaagttagtcagagccatcctgccatgaccgcgttctgctctctgctgctccaggcccaatctctgctgcctcgcactatggccgctccacaggacagtctgcggcctggtgaagaggatgagggcatgcagctgcttcagactaaggacagcatggccaaaggagctcggccaggtgcatcaagaggccgagctagatgggggctggcttacacgctcctccacaatcctacacttcaagtgttccggaaaaccgccctgctcggcgctaacggggctcagccgtag

SEQ ID NO: 242625 - DNA, 1431 bp, synthetic construct
  misc_feature 1..1431: note = Description of Artificial Sequence: Synthetic coding sequence
  source 1..1431: mol_type = other DNA
atgggtaaactacggctgcaggagatttataagtactattcccttctggccagcctacctttactgttgggccttggtttcctcagcctttggtatccagtacagctcgttaggtcattcagccggagaacaggcgcagggtccaaggggctccagagttcgtacagtgaagagtacttgcgcaacctattgtgccgtaaaaaactcggttctagctaccacacttccaagcacggttttttaagttgggctagggtatgtcttcgacactgtatctacacaccgcagcctggctttcacttacccctgaagctggtcctctccgccactctgacaggcacggctatctatcaggttgctctgctcctcctggtgggagtggttccaacgatacaaaaggtgcgggctggcgtaaccactgacgttagctatctgcttgccggattcggcattgtcctcagcgaagataaacaagaagtggtagaacttgtcaagcatcacttatgggccctcgaggtatgttacattagcgccctggtcttatcttgtctcctgacttttttggttttgatgcggagtctggtaactcaccgtactaatctgcgggctcttcacaggggggcagccttggacctgtcccctctccaccggagtccgcacccctccagacaggctatattctgctggatgtcgttttccgcttaccagactgctttcatctgtctcggcctcctggtgcagcagatcattttctttcttggcaccactgcacttgccttcctcgttttgatgcctgtgctccacgggagaaatctgttgctgttcagatcactcgagagctcctggccattctggctcacactggccctcgctgtcatactgcagaacatggctgcacattgggtgttcctggagacacacgatggccatccacaactgaccaacaggcgggtcctctacgcagctacgtttttgctattcccgctgaacgtactggtgggagctatggtcgcaacctggcgcgtgctactctcggccctctacaatgccatccacctcggacagatggatctaagcctccttccacctagagcagcgactcttgatccaggctactacacgtaccggaactttctgaaaatagaggtgagccaaagccacccagctatgacagcattctgttccctgcttctccaagcccagtcattgctgcctcgtaccatggctgctcctcaggacagtctcaggccaggagaggaggacgagggaatgcagttgctgcaaactaaagactcaatggcaaagggtgccaggcctggtgcgagccgcggacgggctaggtggggattagcatacacgctcttgcacaatcccaccctgcaggtgttccgcaaaacagccctcctgggggctaacggggcacaaccttag

SEQ ID NO: 242626 - DNA, 993 bp, synthetic construct
  misc_feature 1..993: note = Description of Artificial Sequence: Synthetic coding sequence
  source 1..993: mol_type = other DNA
atgggcaaaatagacgtcgataaaatcttattctttaatcaagagattagactttggcagctgatcatggccactccagaagagaacagtaacccccacgacagggccactcctcaactgccagcccagctccaggagctggagcaccgagtagccaggcggagactaagccaggcccgacatagggcaacccttgctgcattgtttaataacctgaggaaaacagtgtacagccaaagcgatttgatcgctagtaagtggcaggtattgaacaaggcgaagtctcacatccccgagctggaacagacactggataatctgctgaaactgaaagcatcgttcaacctggaggatggtcacgcttcatctcttgaggaagtaaagaaagagtacgcaagcatgtattccggaaatgactcctttccgcagaacgggtcatccccgtggtaccttaacttctacaaacaaacgatggacctgctcaccggttcgggaattataacacctcaagaggctgcactccctatcgtcagtgcagctataagtcatctgtggcaaaatctatctgaggaaaggaaggcctcactgcgccaggcgtgggcgcaaaagcaccgcggaccggctactcttgccgaggcgtgccgggagcccgcttgtgccgagggctctgtgaaagactccggtgtggatagccagggggcatcctgttctctcgtgtccacgccagaggagatcctctttgaggatgccttcgatgtcgccagctttctagacaagtctgaagttccgtccacatcatcttccagctcagtactcgcttcctgcaacccggaaaaccctgaagaaaaatttcaactgtatatgcagatcatcaacttttttaagggcctgtcctgcgccaacacccaagttaaacaggaggcaagcttccccgtggacgaagagatgataatgctgcagtgtacggaaactttcgatgacgaggacctttag

SEQ ID NO: 242627 - DNA, 882 bp, synthetic construct
  misc_feature 1..882: note = Description of Artificial Sequence: Synthetic coding sequence
  source 1..882: mol_type = other DNA
atgggattccccgctgctgcattgctgtgcgcactctgctgtggccttttagcccctgccgctagagcaggttactccgaggagcgctgctcgtggaggggttccggattgactcaggaacctggctcagtcggacaattggctttggcatgtgcagagggagccgtggaatggctgtaccccgctggcgcattgagactaacacttggcggacccgacccgagagccagaccaggcatcgcttgcctccggccagtaagaccattcgccggtgcccaggtctttgcggagagggcgggtggagccctggagttgcttctggcagaggggcctggacctgcaggcggacgatgcgtgaggtggggccctcgtgagaggcgtgcacttttcctacaggccaccccacatcaggacatatccagacgtgtggcagcattcagattcgagctgagggaagacggtcggccagaattaccccctcaagcccacgggctcggcgtcgatggagcatgcagaccatgctccgatgctgagttgttgttggctgcatgcacgtccgatttcgtcatccatggtataatccatggagtgacccacgatgtcgaactgcaggaaagtgtgataacagtggtggcagctcgagtcttacggcagacgccgccactgtttcaggccggtcgcagtggcgaccaaggattgacttctattcgcacacccttgcgttgcggtgtgcaccccggacctggcacttttttgttcatgggctggagtcggttcggagaagctagactgggttgcgctccaagattccaagagttccgcagagcttatgaggccgctagggccgctcatctccatccatgcgaagtcgcactgcattag

SEQ ID NO: 242628 - DNA, 1197 bp, synthetic construct
  misc_feature 1..1197: note = Description of Artificial Sequence: Synthetic coding sequence
  source 1..1197: mol_type = other DNA
atgttaggacggagcggctaccgggctctgccgctcggcgacttcgaccgttttcagcaaagcagctttggcttcctgggatcccagaagggctgtttatctcccgagcggggtggagttggtaccggcgcagacgtgccacagtcatggccatcctgtctctgtcatggattaattagcttcctgggattcttactgcttttggtgacctttcctatcagcggctggtttgcgctgaaaatcgtgcccacttatgagcgaatgatcgtctttcggctgggcagaatccgcacaccacagggcccagggatggtattacttctgccctttattgatagttttcagagagtcgatctgagaacccgcgcattcaacgttcctccctgcaaactagcctccaaggatggggctgtgctttcggtcggcgctgacgtgcagtttcggatttgggatcccgtcctgagcgtcatgaccgtgaaagacctgaatacagccacaagaatgacagcccagaatgctatgactaaggctttgttaaaaagacccttacgggagatccaaatggagaagctcaagatatccgaccaactgctgctggagatcaatgatgtcacacgggcatggggacttgaagtcgatagagtggaattggccgtggaggctgtcctccaacccccacaggactcaccagccggacctaacctagactctacactccagcagcttgcactccatttcctgggcggatccatgaatagtatggctggaggggcaccctccccaggtcctgccgataccgtggagatggtttctgaggtggagcccccagcacctcaggttggtgcaagatcctctccaaaacagcctttggccgaggggctgttgacagccctccaaccatttttgtcagaggcgctggttagccaggttggtgcatgctatcagttcaacgtagtactgccatctggaactcagtctgcttactttttggatctcactactgggcgaggtcgggtggggcacggcgttccagacgggattcccgatgttgtggttgaaatggctgaggctgacctgagggcactgctgtgccgcgagctcaggcccctgggcgcatatatgagtggcagactcaaagtgaagggcgacctcgctatggctatgaagctggaagcggtcctgagagctctcaagtag

SEQ ID NO: 242629 - DNA, 1047 bp, synthetic construct
  misc_feature 1..1047: note = Description of Artificial Sequence: Synthetic coding sequence
  source 1..1047: mol_type = other DNA
atgctgggaagatctggctacagagctctcccgcttggtgacttcgaccggttccaacagtcaagcttcggattcctgggctcccagaaaggatgcctgtcccccgaacggggaggcgtgggcaccggcgcagatgttccccagtcttggcccagctgtctttgtcatggcttgatctcgttcctgggtttcttgctgctcctggtgacctttcctatatctgggtggtttgctttgaaacttgcctcgaaggacggtgctgtcttgagtgttggcgcagacgtgcagttcagaatttgggaccccgtgttgtccgtgatgaccgtcaaagatctgaacaccgcaacccgcatgacagcacagaatgccatgaccaaggccctgctgaagagacctctgagagagatccagatggaaaaacttaaaatttctgatcagctgctgttggaaatcaacgatgttactagagcatggggacttgaggtggaccgggtcgagctggctgtagaagctgtgttacaaccaccgcaagacagcccagccggacccaacctggacagcactctacagcagctggctttacattttctgggcggttcgatgaacagcatggccggaggcgcaccaagcccgggacccgcagacaccgtggaaatggtcagcgaagtggagcccccagctcctcaggtcggcgcacgctcttctcctaaacagcccttagccgaaggcctgctaactgccctccaaccgttcctctccgaggcccttgtgagtcaggtgggcgcttgttaccaattcaacgtggtactgccttcaggaacacagtcagcctacttcctagacctcacaacgggacgtgggagggtcggacacggagtgccagacggaattccagatgtggtagtggagatggccgaagctgatctgagagccctgctttgcagagaactgaggcctcttggagcctatatgtccggcaggttaaaggtcaagggggatctggccatggcaatgaagctagaagccgtactccgcgctttgaaatag

SEQ ID NO: 242630 - DNA, 984 bp, synthetic construct
  misc_feature 1..984: note = Description of Artificial Sequence: Synthetic coding sequence
  source 1..984: mol_type = other DNA
atgctcggtaggagtggctatagagcgctgcccctgggggacttcgatagatttcagcagagctcctttggcttccttggcagccagaaggggtgcctgtctcctgagcgaggtggagtcgggaccggggcagacgtccctcagtcatggccatcatgtctgtgccatgggctgatttcttttctggggtttctgctcctgcttgttaccttcccaatctcgggctggtttgcattaaaaatcgtgcccacttacgagaggatgattgtattcagactagggagaatccgtacgcctcagggtcccggtatggtgctgttgctgccttttatcgactctttccagagggtcgatctgcggaccagagccttcaatgtccccccttgtaagctggccagcaaggacggagccgtgctgtccgtgggtgctgacgtgcagtttaggatctgggatcccgttttgtctgtgatgacagtcaaagatcttaatactgccacccgcatgacagcgcagaatgcaatgaccaaggccctcctgaagcggccattaagagagatccagatggagaaactcaagatttctgaccagctcctgcttgagatcaacgatgtcacccgcgcatggggcttggaggtggatcgcgttgagctcgccgttgaggccgtactgcagcctccacaggactctccagccggaccaaacttggactcgaccctgcagcagctggcattacattttctgggaggcagtatgaacagtatggccggaggtgctccgtccccagggcctggtcgaggtcgagttggccatggcgtcccagatggaataccggacgttgtggtagagatggctgaggccgatctaagagctcttctgtgcagggagcttcgacccctgggcgcttatatgtcaggcagactgaaagtgaaaggagatctcgcaatggccatgaagctggaggctgtactgcgtgctctgaagtag

SEQ ID NO: 242631 - DNA, 1068 bp, synthetic construct
  misc_feature 1..1068: note = Description of Artificial Sequence: Synthetic coding sequence
  source 1..1068: mol_type = other DNA
atgcctgatgtgccacagtcttggccatcctgcctgtgtcacggcctaattagtttcctggggtttctgctgttacttgtgacgttccccatctccggttggttcgcattgaagatcgttcctacctacgagaggatgatagtctttcgactgggcaggattagaacacctcaggggccaggtatggtgcttctgctaccgttcattgactcattccagcgcgtggatttaagaaccagagctttcaacgttcctccttgcaaactggcttcaaaagatggcgctgtgctcagcgtcggcgcagatgtgcaatttaggatttgggacccagtgttgtcggtcatgacagtgaaagacctgaacaccgccactagaatgactgcacagaatgcaatgacaaaggccctgttgaagagacctctgagagagatccagatggagaagttaaaaatttcagaccagctgctgcttgagataaacgatgtgaccagagcctgggggctggaagtggaccgtgtggaactcgctgtggaagctgtcctccaaccacctcaggactccccagccggacccaacttagatagtactctgcagcagctggcccttcacttcctagggggatcaatgaatagcatggcgggtggcgctccctctcctggcccagatacggtggagatggtgtcagaagtagaaccccctgcaccccaagtgggggcacgctcgtctcccaagcaaccattagccgaaggcttgcttacagcccttcagcctttcctcagcgaagctcttgtgtctcaggtcggggcttgttatcagttcaatgtggtgctgccctccgggactcaatccgcctattttttagatttgacaaccggtcgtggtcgcgtgggccacggtgtacctgacggcatcccggacgtcgttgtcgagatggctgaagcagatttacgcgcactgctctgtcgcgagttgcggccattgggggcttacatgtcgggtcgactcaaagttaagggcgatcttgccatggctatgaagttggaggctgtgcttagggccctgaagtag

SEQ ID NO: 242632 - DNA, 933 bp, synthetic construct
  misc_feature 1..933: note = Description of Artificial Sequence: Synthetic coding sequence
  source 1..933: mol_type = other DNA
atgatcgtattccgtcttggccgtattaggacacctcaagggccaggcatggtgttactgttgcccttcatcgacagttttcagcgggtcgatctgagaactagggcttttaatgtgcccccttgcaaactcgctagtaaggatggggctgtgctgtcagttggtgcagatgtgcagtttcgcatttgggaccccgttctgtccgttatgaccgtgaaggatcttaataccgccacacggatgaccgcccagaatgcgatgactaaggccctactgaagcgccctctacgcgagatccagatggagaaactcaagatatctgaccagctgctgctggagattaatgatgtgacacgcgcatggggcttggaagtggatcgtgtggaactcgccgtagaagccgtcctgcagccacctcaggacagccctgccggtccaaatttggatagcacactccagcagttggccttgcacttcttgggtggctcaatgaattctatggctgggggagccccatccccaggaccggacactgtggagatggtatcggaagtcgagcctcctgcccctcaggtcggagcgcgatcaagtccaaagcaaccactggccgagggcctcttgacggccctgcagccctttctatcagaggcacttgtctcccaagtcggtgcctgttaccagtttaatgttgtattacccagcggcacacagtccgcctactttctggaccttaccaccggtcggggacgcgtgggccacggcgtgccggacgggattcccgacgtggtggtggaaatggcggaagcggatcttcgcgctctattgtgccgggaactgagaccgttgggggcttatatgagcggcaggcttaaagtgaagggcgatctggctatggccatgaaactggaagcagttctccgcgctctgaagtag

SEQ ID NO: 242633 - DNA, 1044 bp, synthetic construct
  misc_feature 1..1044: note = Description of Artificial Sequence: Synthetic coding sequence
  source 1..1044: mol_type = other DNA
atgcttgggaggtcgggctacagagccctgccccttggtgatttcgatagatttcagcagagtagtttcgggtttttgggctctcagaaaggctgcctgtcccctgaacgcggaggcgtcggaaccggtgcggacgtgccccaaagctggcccagctgtttatgccacggacttatctccttcctgggtttcctgctcctgctcgtgacttttccaattagtggatggttcgccctgaagctcgcttccaaagacggggctgtgctttcggtgggcgctgacgtccagtttcgcatttgggaccctgtactcagcgtgatgacggtaaaagacctgaatacagcaacccggatgaccgcacagaatgcgatgacgaaggctctgctcaagagaccattacgcgaaatccagatggagaagctcaagatctctgatcaacttcttctcgagattaacgacgtgacaagagcctgggggctagaggtagaccgtgtggaattggctgtcgaggccgtgttgcagcctccccaggatagccccgcaggaccaaatctagattctactctgcaacagcttgcactgcattttctgggcggttcaatgaattcaatggccggaggggctccatcaccaggtccagatacagtggaaatggttagcgaggtcgagccacctgctccccaagtcggcgctcgctccagtccaaaacagcccctagctgagggcctgttaactgcactgcagcccttcctatccgaggccctggtcagtcaggtgggggcatgttaccagtttaacgttgtgctaccatctggtactcaaagcgcttattttctcgatctgaccacagggaggggcagggtgggacatggtgttcctgatggaatccccgacgtagtggtggagatggccgaggctgatttgagggcacttttatgcagggagctgcggcctttgggggcatatatgtccggaaggcttaaggttaaaggagacctagctatggccatgaagctcgaagctgtcctgcgggctctgaagtag

SEQ ID NO: 242634 - DNA, 1071 bp, synthetic construct
  misc_feature 1..1071: note = Description of Artificial Sequence: Synthetic coding sequence
  source 1..1071: mol_type = other DNA
atgctcgctcgagcagcccgaggaacgggggctctgctgctccgaggctctctgctggcatctggtcgagctcccagacgggcatcatccggcctgccaaggaataccgtggtcttgtttgtcccgcaacaggaggcatgggtagtggaacggatgggtagattccaccgcattctcgaacccggactgaacattctgattcctgtcctggacagaatacgctatgtacagtcactgaaggagatcgtgattaacgtgccagaacagtcagccgtgaccctggataatgtgactctgcaaatcgacggtgtcctgtatcttcgcataatggatccttataaagcctcatacggtgtggaagacccggaatacgccgtaacccaactcgcgcaaaccaccatgcgcagtgaactggggaagctgagcttggacaaagtgttccgcgagcgcgagagcctgaacgcctcaatcgttgacgcaatcaatcaggccgcagactgctggggaattcgttgtcttcgatacgagatcaaggacatccacgtcccccctcgcgtaaaagagagcatgcagatgcaggtggaggctgaacggagaaaacgggctaccgtgcttgaatcggaaggcacccgcgagtccgctatcaatgtcgccgagggcaagaaacaggctcagatcctggcttctgaagccgaaaaggccgaacagattaatcaggccgcaggcgaagcctcagcagtccttgctaaggcaaaagcaaaggctgaagctattagaatcctggccgctgcactgacccagcacaacggcgacgctgccgcatccctgacagtggccgagcagtatgtgtccgcctttagcaagcttgctaaagattctaacacaatcctgctgccaagtaaccctggtgatgttacaagcatggtggcgcaggctatgggagtttacggtgctctcaccaaggcgccagtcccgggaacaccggactcgttgtcttcgggatctagtcgcgacgtccagggcacagacgcgagtctggatgaagaattggatcgtgttaaaatgtcctag

SEQ ID NO: 242635 - DNA, 936 bp, synthetic construct
  misc_feature 1..936: note = Description of Artificial Sequence: Synthetic coding sequence
  source 1..936: mol_type = other DNA
atgcttgctcgcgctgctagagggacaggagcactacttctgcgcggatctctccttgcatctggaagagcccctcgcagagctagttcaggactgcctcggaacacagtagtgcttttcgtgcctcagcaagaagcttgggttgtcgagaggatgggcaggtttcacaggatcctggaaccgggtctgaacattttgatacccgtactggataggatccggtacgttcagtctctgaaggagatcgtgattaacgtcccggaacagagtgcagtgacacttgataatgttacactgcagatcgacggagtcctgtacctccgcattatggacccttataaagctagttacggcgtcgaggatccagagtacgccgtaacgcaactggcgcagactactatgagatcagagctcggaaaactttcacttgataaggtctttcgagtggaggcagagaggcggaagcgcgcaaccgtgctggaatcagaaggaactagggaatctgctatcaatgtcgccgaaggcaagaagcaggcccagatacttgcaagcgaggccgaaaaagccgaacagattaaccaggccgcaggagaggctagtgcagtcctggcaaaagcaaaagccaaagctgaggctatccgcatcctggcagccgcactaacacaacacaatggcgacgcagctgcctctctgaccgtggctgagcagtacgtttcagcgttttccaagttggccaaagacagtaacaccatcttgctgccatctaacccaggtgacgtcacatccatggttgcacaagctatgggagtgtacggcgctctgaccaaggccccagtgcccggaactccagacagcctgtcttctggtagctcccgtgacgtacagggtactgacgcaagcttagatgaagagttagacagagtgaaaatgagttag

SEQ ID NO: 242636 - DNA, 876 bp, synthetic construct
  misc_feature 1..876: note = Description of Artificial Sequence: Synthetic coding sequence
  source 1..876: mol_type = other DNA
atggattcaagggtgtcatctcctgaaaaacaggataaagagaacttcgttggcgtgaataacaagcgcctgggcgtctgcggatggattctgttcagtctgtccttcttgctcgtcatcattacgttcccaatttctatttggatgtgcctcaaaatcataaaggagtacgagagagccgtggtttttagactggggaggatccaggcagacaaggcaaaagggcctggtctgattcttgtgctcccttgtatcgatgtgttcgtcaaggtagacctccggaccgtcacctgtaatatccctcctcaggaaattctgactcgggactcagtcacgactcaggtggacggagttgtctattaccgaatctattccgcagtgtcggccgtggccaacgtcaacgacgtgcaccaagccactttcctcctggcccaaacaactttgagaaacgtcttggggacccagaccctgtcccagatcctggccggtcgggaggagattgcacactccattcagaccctcctggacgatgcgaccgaactctggggcatccgtgttgcgagagtcgaaatcaaagatgtacggattcccgttcagctgcagaggtctatggcagcagaggccgaagccacgagggaggctcgcgcaaaagtgctcgcagccgagggggagatgaacgcgtctaagtctctgaagagcgcctcaatggtgttagcggagtctcctatcgccctccagctgcgatacctccagactctgtccactgtcgcaaccgaaaagaactccaccatagtgtttccgttacccatgaacatcttggaaggaattggtggggtttcctacgacaatcataaaaagcttcccaacaaagcttag

SEQ ID NO: 242637 - DNA, 849 bp, synthetic construct
  misc_feature 1..849: note = Description of Artificial Sequence: Synthetic coding sequence
  source 1..849: mol_type = other DNA
atgaacagccggggtgagctggtcggggtaaataacaaacgactcggggtgtgtgggtggattctgttctccctcagtttcctgcttgttatcattacatttcccattagcatatggatgtgtctgaaaattatcaaggaatacgaaagagccgtggttttccgcttgggaagaatacaggcggacaaggcaaagggccctggtctgatactggtgctcccctgcatcgatgtgtttgttaaggtggatctgcggactgtaacttgcaatattccccctcaggaaatccttacccgcgattctgtgacgacccaggtagacggagtagtgtactaccggatatattcagcagtgagtgccgtcgctaacgtgaatgacgttcaccaggctactttcttgctcgcacaaacaactctccggaatgttctgggaacacagactttgtcccaaatccttgctggcagagaagaaatcgcccacagtatccagacactcctcgacgacgccacagagttgtggggaatccgggtcgcccgtgtggagataaaggacgtacgcattccagtgcagctgcagcgttcgatggccgctgaggcagaggctacaagggaggctcgcgcaaaggttcttgccgcagagggcgaaatgaacgcttcgaaatccctgaagtccgcttccatggttctggccgaaagtccaatagcactgcaactgcgctaccttcagaccctttccacagtggcaacagagaagaactctaccattgtgtttcctttgcctatgaacattcttgaaggaattggaggagtcagctatgataatcacaagaagttaccaaataaggcctag

SEQ ID NO: 242638 - DNA, 2970 bp, synthetic construct
  misc_feature 1..2970: note = Description of Artificial Sequence: Synthetic coding sequence
  source 1..2970: mol_type = other DNA
atggcgcgtcctgtgcagttagcacccggttctctggcactggtgctgtgtcgtctggaggcccagaaggccgctggagccgcagaggagcccggtgggagagccgtgttccgagcgtttaggagggctaatgcccgatgtttctggaacgcgcgactggcacgggctgccagtaggttggcattccagggctggctgcggcgtggcgtactgctcgtgagagcaccccctgcatgtcttcaggtgctgcgagacgcgtggcgccgtcgggctttgcgaccccctcgcggatttaggattcgcgcagttggggatgttttccccgtgcaaatgaacccaatcactcaatcccagttcgtgccactcggcgaagtactctgttgtgcaattagcgacatgaacactgcccagattgttgtgactcaggagtccctacttgagaggctcatgaagcactaccccggtatcgccattccttctgaagacatactgtacaccactctcggtaccttaattaaggagagaaagatttaccatactggagaaggctactttatcgtgaccccacagacctacttcatcactaatacaaccacccaagagaataaacgcatgctgccctctgatgagagtcgcctaatgcccgctagcatgacctaccttgtgtctatggagtcttgcgctgaatcagcccaggaaaatgcggctccaattagccactgtcagtcctgccagtgctttcgggacatgcacacgcaagacgtgcaagaagctccagtggccgctgaagtgaccaggaaatctcaccgtggcctgggtgagtcagttagctgggtgcagaatggcgcagtctccgtcagtgcggagcaccacatttgcgaaagtacaaaacctctgccctacacccgcgataaggaaaaaggcaaaaaatttggattctcattgctgtggagaagcctaagccgaaaggaaaagcccaagacagaacactccagctttagtgcacagtttccccctgaagaatggccagtgagggatgaggacgacctggacaatattcctcgagatgtagagcacgaaattattaaaaggatcaaccctatcctaacagtggacaacctcatcaagcatacggtgctgatgcagaagtacgaggagcaaaagaagtataactcacagggcacctcaacagacatgttaacaatcggacacaagtacccatccaaagagggagtcaagaagaggcaggggctcagcgcaaagcctcagggccagggccattccagacgtgatcgacacaaagctagaaatcagggatccgagtttcagccaggaagcataaggctggagaagcatcccaagctccctgcaacacagcccattccacggattaagagccctaacgagatggtgggccaaaagcctttaggcgagatcacaactgtgctcggcagtcatcttatatacaagaagcgaatcagcaacccattccagggcttgagccacaggggttcaacaatcagcaaaggtcataaaatccagaagacttctgaccttaaaccctcccagactgggccaaaggagaagcctttccaaaaaccaagaagcttggactcaagccggatcttcgacggcaaagcaaaagaaccatacgccgagcaacccaatgataagatggaggccgagtctatctatatcaatgaccctacagtgaaaccaattaacgatgactttaggggacatcttttctcacatccccagcaaagcatgctccagaatgacggcaaatgctgtccctttatggagtccatgctacgctacgaggtttatggaggggaaaatgaggtgatccccgaggtgctgaggaaaagccattcccactttgataagctcggtgaaaccaaacagacaccccacagcctgcctagcagaggcgcaagtttctcagaccggaccccaagcgcttgtcgcctcgtggataacaccatccaccagttccaaaatctgggcctgctcgactacccagttggggtgaatccactgagacaggctgccaggcaggataaggattccgaagaattgctgaggaaaggattcgtgcaagacgcggagacaacatcactcgagaatgaacaactgtccaatgacgaccaggccctttaccagaatgaggtggaggacgacgacggtgcctgtagctcgctgtaccttgaggaagatgatatttcagagaatgacgacttacgccagatgctgcccggacactctcagtactcttttactggcggatcacagggaaaccacctgggaaagcagaaggtgatcgaacggtctctgactgagtataattcaacaatggaacgcgtagagtctcaggtgttgaaaagaaatgagtgctacaagcctaccgggctgcacgccacgcctggtgagtctcaggaacccaacctgagtgcagagtcctgcggactgaacagcggtgcccaatttggctttaattatgaggaagaaccttcagttgctaagtgcgtacaggcttcagccccagccgatgaaagaatctttgattactacagcgccaggaaggcttcatttgaggctgaggttatccaggataccattggggacacaggcaagaaaccagcttcttggagccagtctcctcagaaccaggagatgagaaagcacttcccccagaagtttcagttgttcaacaccagtcacatgccagtgttagcacaggacgttcagtatgagcacagtcacctcgagggcacggagaaccatagcatggccggtgactctggaatagactccccgaggactcaatctcttgggtccaacaacagcgttattttagatggccttaaacggcgtcagaatttcttgcagaatgtggagggaactaagtcatctcagcccctgacttcaaactccctcctgcccttgaccccagtgatcaacgtgtag

SEQ ID NO: 242639 - DNA, 510 bp, synthetic construct
  misc_feature 1..510: note = Description of Artificial Sequence: Synthetic coding sequence
  source 1..510: mol_type = other DNA
atggcaaggcctgttcagctggccccagggagccttgccctcgtgctgtgccgattggaagcgcagaaggccgcaggcgctgcagaggagccaggaggcagggcagttttccgggctttcagaagagctaacgcaagatgcttttggaacgcgaggcttgccagggcagcctcccgactggcttttcagggctggcttcgaagaggggtgcttctggtgagggccccacccgcatgtctccaggtgctcagagatgcctggcgccgtcgcgctctccggccaccccgtggtttccgtattcgagccgtaggcgacgtgtttcccgtgcaaatgaatcctattacccagtcccaattcgtgcccttaggcgaagtcttatgctgtgcaattagtgacatgaacacggcacagatagtagtgacgcaggagagtctcctggaaagactgatgaaacattacccagggcaccgagtctgggacctaatcatccagtccttttggatggattag

SEQ ID NO: 242640 - DNA, 684 bp, synthetic construct
  misc_feature 1..684: note = Description of Artificial Sequence: Synthetic coding sequence
  source 1..684: mol_type = other DNA
atggcacgccctgtacaacttgccccaggctcactcgctctagtgctgtgcaggttagaggcgcagaaagccgcaggggcagctgaggagcctggtggcagagccgtgtttcgggcattccgcagggctaacgctcggtgtttctggaacgcgcgtctagccagggccgcatcacgtttggcattccagggatggctgaggcggggagtgttgctggtaagggcacctccagcatgtctccaggtgctacgcgacgcttggcggagaagagcactaaggcctccaaggggattcaggattcgcgcagtgggtgatgtgttccccgtccagatgaatccgattacgcagagccagttcgtgccgttgggagaagtcctttgttgcgcaattagtgacatgaacaccgctcagatcgtggtgactcaggagtcgctgttagagcgtctcatgaagcattaccccggaatcgcaatcccttccgaagatattctatatacgacgttgggcaccctgataaaggagaggaagatatatcataccggtgagggatacttcatagtgaccccccagacatacttcatcactaacactactacgcaggagaataaacggatgttgccatcggatgaatctcgcctaatgccagcttccatgacatacctggacactgagtccggtatttag

SEQ ID NO: 242641 - DNA, 2970 bp, synthetic construct
  misc_feature 1..2970: note = Description of Artificial Sequence: Synthetic coding sequence
  source 1..2970: mol_type = other DNA
atggcacgccctgtccagctcgccccaggctcattggccttagtgctgtgtaggctggaggcccaaaaagctgcaggggctgccgaggaaccaggaggcagagcggtgttccgagccttcaggagggctaacgctcgttgtttttggaacgcccgactggctcgcgcagccagccgattagctttccaagggtggctgagacgtggcgttctgcttgtccgcgcacccccagcttgtctccaggtgctgagggatgcctggcgcaggcgagctctccggccaccgaggggctttaggatccgcgctgtaggggacgtcttccctgtgcagatgaaccccatcactcagagccagttcgtcccattgggagaagtgctctgttgtgccatatccgacatgaatactgctcagatcgtggtgacacaagagtctctgctcgagcggctaatgaagcactaccctgggatagcaataccttcagaagacatactgtacaccactctagggacactgatcaaagaacgcaagatttaccataccggagaagggtatttcatcgtgacaccccagacctatttcattaccaacacaaccacccaagaaaataagcggatgctgccctctgatgagagcaggcttatgccggcttcaatgacatatctcgtctccatggagtcatgcgccgagtccgcacaagagaatgccgcacccattagccattgccagtcttgccagtgttttagggatatgcacacgcaagacgtgcaagaggcccctgtggccgcagaggtgactcgcaagtcacacagggggctgggcgagtcagtatcctgggtccagaacggagccgtcagtgtgagcgccgaacatcatatttgcgagagtaccaagccactcccatacacaagggacaaggagaagggaaagaagttcgggttctctttgctttggaggtccttatcaaggaaagagaagccaaaaacggaacactccagcttttccgctcaattccctcctgaggaatggcctgtgcgagacgaggatgacctagataatatcccacgggatgtggagcacgagatcattaaaagaatcaatcccatcctgactgtcgacaaccttattaaacacacagtacttatgcagaaatatgaagaacagaaaaagtacaatagtcaagggacaagcactgacatgctgaccattgggcacaagtacccaagtaaggagggcgtgaaaaagaggcagggcctgtcagctaagccgcagggccaggggcactccaggagggatagacacaaggctcgtaaccaggggagtgaatttcaacccggtagtatccgcctagaaaagcacccgaagctccctgcgacccagcccatcccgcgtatcaagagccccaacgagatggtcggccaaaagccacttggtgagatcaccaccgtcctcggaagtcatctcatctacaaaaagcggataagcaacccatttcagggtctctcgcaccggggatccaccatctcaaaggggcataaaatccagaaaacatctgacctgaaaccctcccagacgggaccaaaagagaagccgttccagaaaccccgatcactcgacagctcccgcattttcgacggaaaagcaaaagagccttacgccgaacagcctaacgacaagatggaggcagagtccatctatattaacgaccccaccgtgaagcccattaacgacgactttagagggcatttgttctctcatccacagcagagcatgctgcagaacgacggaaaatgctgcccatttatggagagtatgttgcgatacgaagtctatggtggagagaatgaagtgatccccgaggtgcttcgtaagagccacagtcatttcgacaagcttggagaaaccaagcagacaccccactctctgcccagccggggtgcctcctttagcgatcggacaccttccgcctgccgccttgttgacaatacaatccaccagtttcagaaccttgggctactggattatcctgtcggcgtaaatccattgcggcaagctgctcgtcaggacaaggactccgaggaactgctccggaagggtttcgtccaagacgcagagacgacatcgctggaaaatgagcagttgtccaatgatgaccaggctctgtaccagaatgaggtcgaggacgacgatggcgcttgttcctctttatatctcgaggaggacgatatatcagagaatgacgacttgcgacagatgctccctggccactcccagtattccttcacagggggatcacagggcaaccatctgggcaagcagaaagtgattgaacggtccctgaccgaatacaactcaactatggaaagggtggaatctcaagtcctcaagcggaatgagtgctacaagcccacgggcctgcacgcgactcccggagaatcacaggagccgaatttgtcagctgagagctgcggcctgaattccggtgcacagtttggcttcaattatgaagaggaaccaagtgttgccaagtgtgttcaggcatccgcacctgctgacgaaagaatctttgactattacagtgccaggaaggctagcttcgaggcagaggttatccaggatacaattggagacacaggcaagaagcctgccagttggagtcagtcccctcaaaaccaggaaatgcgcaaacattttccacagaaattccagctcttcaatacttctcatatgccagtcctggcacaagatgtgcaatatgaacacagccatttggaggggaccgaaaatcattccatggctggagactcaggaatcgactcccccaggacacagtcactagggtccaacaacagcgtaatattggatggcctgaagagacgacagaatttccttcagaacgtagagggcaccaagtcatctcagcctcttacctccaactccctgttgcccttaacaccagttattaatgtctag

SEQ ID NO: 242642 - DNA, 2640 bp, synthetic construct
  misc_feature 1..2640: note = Description of Artificial Sequence: Synthetic coding sequence
  source 1..2640: mol_type = other DNA
atgaaccccattacgcagtcccaatttgtcccgctgggcgaagtcttatgctgtgctatctctgacatgaatactgcacagattgtcgtaacccaggagtcacttctggagcggctcatgaagcactacccaggtatcgctattccaagcgaggatattctctacacaaccttgggtaccctgattaaggagcggaagatttaccacacgggggagggttacttcattgtcacgccccagacttactttatcaccaacacaactacccaggaaaacaaaagaatgctcccaagcgacgaatcccggctgatgccagctagcatgacttatctggtctccatggaaagctgcgccgagtctgcccaggaaaatgcggcacctatttctcactgccagagttgccagtgcttcagagacatgcacacccaagacgtgcaggaggcacctgtggccgctgaggtcactcggaagagtcataggggcttgggcgaatcagtgagttgggtacaaaacggcgcagtttccgtgagcgccgaacaccacatttgtgagtcaactaaaccattaccctacactcgggacaaggagaaaggaaaaaagttcggcttctctctgctctggcgcagtctgtctagaaaggaaaagcctaagactgagcactctagtttttctgctcaattccctcccgaggaatggcccgtgcgggacgaggacgacctcgacaatatccccagagatgtggagcacgagattatcaaacggattaacccaattctgactgtggataatctgataaagcatacggttctgatgcagaagtatgaggagcagaaaaagtacaattctcaagggactagcaccgacatgttaacaataggccataaataccctagcaaagagggcgtcaagaagagacaagggctgtccgccaaaccacaggggcaaggccattctagacgtgaccgtcataaagctcggaatcagggatctgaatttcaacccggaagtattcgtttggaaaagcatcctaagctaccagccacacagcctatcccaagaatcaagtctcccaacgagatggtcggtcaaaaacccctgggggaaatcaccactgtcctgggatcacatttgatctataagaagcgaatctcaaacccattccaggggctgtcccaccgaggctctaccattagtaaagggcataagatccaaaagacgtccgacctcaagccaagccagacaggacctaaggaaaaacctttccaaaagcccaggtcccttgattcaagcaggattttcgatggtaaagccaaagaaccttatgctgagcagcccaatgataagatggaggccgagagtatctacatcaatgaccccacagtgaaaccaatcaatgatgacttccggggacacttgttcagccatccacagcagtctatgttgcagaacgacggaaagtgctgcccatttatggaatccatgcttaggtacgaggtgtatgggggagagaacgaggttatcccagaagtgctgaggaagagccacagtcattttgacaaactcggcgagactaaacagactccacactcattgcctagtcgcggtgcttcgttttctgatcgcactccaagcgcctgtaggctggtcgacaacacaattcatcagttccagaatttaggactgcttgattaccccgtgggagtcaacccgttgcgtcaagccgcacggcaggataaggacagcgaagagcttcttcggaagggatttgtgcaagacgccgagactacaagcttggaaaatgaacaacttagcaacgacgaccaagccctatatcagaacgaggtggaggacgatgacggagcctgttccagtctgtatcttgaagaagatgacatttccgaaaatgatgatctgcgccagatgttgcccggtcattcccaatactcgttcactggcggttcccagggcaaccacctcggcaagcagaaggtgatcgagcggtctctgacagagtacaactccaccatggagagggtcgagtctcaagtccttaaacggaacgagtgctataaacccactggattgcatgccacaccgggagaatctcaggaacccaacctttctgccgaaagttgtgggctgaacagcggtgcacagttcggctttaactacgaagaagagccgtccgtggcaaaatgtgtgcaggcgtccgctccggctgatgagcgcatattcgactactattccgcacgaaaggcaagcttcgaagccgaggttattcaggacacaattggcgacacaggcaagaagcctgcaagttggagccagtccccgcagaaccaggagatgcggaaacactttccccagaaattccaattgttcaacacctctcacatgcccgtgttagcccaggacgtgcagtacgaacattcacacttagaaggcactgagaatcacagtatggccggtgacagtggcattgactcacccaggacccaatctttgggaagcaacaattctgtaatcctggatggactaaagagacggcagaacttcttgcagaatgttgaaggaaccaagtctagtcagcccctaacctccaattctttgctgcctctgacaccagtgattaatgtctag

SEQ ID NO: 242643 - DNA, 4178 bp, synthetic construct
  misc_feature 1..4178: note = Description of Artificial Sequence: Synthetic coding sequence
  source 1..4178: mol_type = other DNA
atggtggagccgggacaggacctgctcctcgccgctctcagcgagagcgggattagtccgaatgacctatttgatattgacgggggtgatgccggactggcaacacctatgcccactccctctgtgcaacagagcgtgcccctatcagctttagagcttggcttggagactgaggctgcagttccagtaaagcaggaacccgaaaccgttccaacacctgccttgcttaatgtacggcagccgccttcaaccacaacatttgttctgaatcagattaatcatctcccccctctggggtcgacaattgtaatgaccaaaactcctccagtaacgactaacagacagacaatcactttaacgaaattcatccaaaccacagcatctacacggcctagcgtttcagcacctaccgtgcgaaacgccatgaccagtgctcctagtaaggaccaggttcagctcaaggatctccttaaaaacaattctttgaacgagctgatgaaactgaaacccccagccaacatcgcccagccggtagccaccgccgcaactgacgtgtctaatgggacggtgaaaaaagaaagcagtaataaagagggcgctcgcatgtggatcaatgatatgaaaatgcgctctttcagtcccaccatgaaggtgccagtagttaaagaggatgacgagcccgaggaggaggacgaagaagaaatgggccacgcggaaacttacgctgaatatatgccaatcaaacttaaaattgggttgagacacccggatgctgtagtggaaacctccagtctctcctcagttacaccgccagacgtttggtacaaaacatcgatcagtgaggaaaccatcgataacggatggcttagtgcccttcagttggaggccattacatacgcagcccagcagcatgagacatttcttccgaacggggacagggccggtttcctcataggagatggagctggcgtgggaaaaggacgcactatcgctggcatcatctacgaaaactatctgctttctcggaaacgcgctctctggttcagtgtttcgaacgaccttaaatacgacgcggagcgcgacttgcgagatataggcgcaaagaacattctggtccactctcttaataaatttaaatatggtaagatttcgtcaaaacacaacgggagcgtcaagaaaggggttattttcgcaacatattccagccttatcggggagtcccaatccgggggaaaatacaagacccgcctgaagcagttattgcactggtgcggggatgatttcgatggcgttattgtgttcgacgagtgccacaaggcaaagaacctctgcccagttggcagttccaagccaacaaagaccggactcgcagtcctagagctccaaaataaacttcccaaggccagagtcgtgtacgccagcgctacaggagcttctgaaccacggaatatggcgtacatgaacaggctgggaatttggggcgagggaacacccttcagggaattctcggattttatacaggccgtagaacggaggggggtgggagcgatggaaattgtggctatggacatgaaattgagagggatgtacattgccagacagctgtcctttacaggtgtcacttttaagatcgaagaggtgctactttcccagtcgtatgtgaaaatgtataataaggccgtcaagttgtgggtcatcgctcgcgagagattccagcaagcagcagatctaattgatgcagaacagcgaatgaaaaagagtatgtggggacagttttggtcagctcatcagaggttttttaagtatctgtgcattgcttctaaagtcaaacgggtggtgcagctagctagggaggaaattaagaatgggaaatgcgttgttatcggcttgcagtcaacaggtgaagctcgcacacttgaggctctcgaggaagggggaggcgaactcaacgattttgtctctaccgctaaaggggttctgcagtccctgatcgaaaaacatttccccgctccggaccgaaagaaactgtatagcctccttggaattgacttaaccgccccatcaaacaattcatccccaagagacagcccttgtaaggagaataagatcaaaaaacgcaagggggaggaaattacgcgagaggccaaaaaggccagaaaagttggaggcctcaccggctccagttccgacgacagtggtagtgagagtgatgcttcggataatgaggaatcagactacgaatcgtcgaagaatatgtcaagcggcgacgatgacgattttaatccattcctcgacgaatcgaacgaagatgacgagaacgacccctggcttatccggaaggatcacaagaagaacaaagaaaagaaaaaaaagaagtcaatcgatcccgatagcattcaaagcgctctgctggcgtcaggcctcggaagcaagagaccgtccttcagcagtactcccgtgatttcccccgctccaaactctacccctgctaattcaaacacgaatagcaactcttctctgattacctcccaggatgctgtcgaacgagcccagcagatgaagaaagacctgctcgacaagctcgagaagctagcagaggacctccccccaaacacccttgacgagctgattgatgaattggggggacctgagaacgttgctgaaatgacagggagaaagggacgtgtcgttagtaacgacgacggttcaataagctacgaatcaaggtccgagctagacgtgccggtagaaatcttaaatatcaccgaaaagcaacggtttatggatggagataaaaacatcgctataatttccgaagctgcgagctcggggattagcttgcaggcagaccgcagggcaaagaatcagcgtcggagagttcacatgacgctggagctgccatggagtgcagatagggctattcagcagtttggaagaactcataggtccaaccaggtgacggcacctgaatacgtgtttctcatcagtgagttggccggtgagcagcgtttcgcctcaattgtcgcaaagcgcttggagagcctgggggcacttacccatggcgatagaagagctaccgagtcgcgagacctcagccggttcaacttcgataacaagtatggccgaaacgccctggagatcgtaatgaaaagtatcgttaatctggacagtcctatggtctccccacctcccgactaccccggagagtttttcaaagatgtccgccagggtctcatcggagtgggcctaataaacgtcgaggacaggagcggcatcctaaccttagacaaggactataacaacatcgggaagttcctcaacagaatcctgggcatggaggttcatcagcagaacgccctgttccagtacttcgctgacacattaacagcagtggtgcagaacgccaagaaaaatggcagatatgacatgggaatcctggacctggggtcaggcgacgaaaaggtgcgcaagtcagacgtgaaaaagttcttaaccccaggctactcgaccagcggccacgtcgaactctatacaataagtgtggagcgcggtatgagctgggaggaagccacgaagatttgggccgagctgaccgggccagacgacggattttacctgagtctccagatccggaacaataaaaaaacagctattctggttaaagaagtgaacccaaagaaaaagctttttcttgtttaccgcccaaatactggcaagcaactaaagctcgaaatatacgcagacctgaagaaaaagtacaaaaaagtggtgagtgatgacgcactgatgcattggctggatcagtataatagctctgccgatacatgcacccacgcatactggaggggcaattgtaaaaaagcaagtttgggtttggtttgcgaaatcggtctgcgctgtcgcacgtactacgtgttgtgcggatctgtgctcagcgtttggaccaaagtggaaggcgtcctcgcatctgtgagcggaacaaacgtcaaaatgcaaattgtgcgcctgcgaacagaggacggtcagagaatcgtgggcttgataatccctgccaactgcgtaagcccgttggtgaatctgctgtctacttccgatcagtctcagcagctagcagtgcaacagaaacagctttggcagcaacatcatccccaaagcattaccaacttatcaaacgccta

SEQ ID NO: 242644 - DNA, 4181 bp, synthetic construct
  misc_feature 1..4181: note = Description of Artificial Sequence: Synthetic coding sequence
  source 1..4181: mol_type = other DNA
atggtagagccagggcaggatcttctgttagctgctctgagcgaaagtggaatcagccctaacgatctgtttgatattgacggcggtgacgctggccttgcaactcccatgccaacccccagcgtccagcagtctgtccctctgtcagcactggaactgggcctcgagaccgaggcagccgttcctgtgaagcaggagccagagactgtgcctacgcccgctcttctgaacgtgagacagcagccgccatcaactactaccttcgttctcaaccagatcaatcacctgcctccccttggcagcacaattgtcatgaccaagactccaccagttacaaccaatagacagacaataaccttgacaaagtttatccagaccactgcaagcacccggcctagcgtctctgctcctacagttcgcaacgccatgaccagtgcccctagtaaggatcaggttcaactcaaagaccttctaaagaacaactcacttaatgaactgatgaaactcaagccccctgctaacattgcccaaccggtggcgacagccgctacagatgtttctaatggaactgttaaaaaggagtctagcaataaggagggtgcgagaatgtggattaacgatatgaaaatgcggtctttctctcccactatgaaggttcccgtggttaaagaggacgacgagccagaagaggaggacgaggaagagatgggccacgcagagacatacgcagagtacatgcctattaagctgaaaataggcctgcggcaccccgatgccgtggtggagacctcgtctctctcctctgtcacaccccctgatgtttggtataaaacatccattagcgaggagacgattgacaatggctggctgtccgccctccagctggaagctatcacatacgctgcccaacagcatgagacctttcttccaaatggagatagagccggatttctgataggggacggcgctggcgtgggaaagggacggacaattgcaggcataatttatgagaattatcttctgtccagaaaaagggcactgtggttcagcgtaagcaatgatctgaaatacgacgcagagcgagatttacgagatatcggtgccaagaacatattagtgcactcgctaaacaaattcaagtatggaaagataagtagtaagcataatgggtccgtaaagaaaggcgtgatttttgccacctattcctccctcattggtgagtcccagagtgggggaaagtataagacaagactaaaacagttactgcattggtgcggcgacgacttcgatggcgtgatagtgtttgacgagtgccacaaagcgaaaaacctttgtccagttggatctagcaaaccaactaagactggcttggccgtgctggagctgcagaataagttacctaaagcccgtgtggtctacgccagtgcaaccggagccagtgagcctcgtaacatggcatacatgaatagattggggatttggggcgagggtactccatttagggagttctctgactttatccaggcggtagaaagaagaggcgttggcgctatggaaatcgtcgccatggacatgaagctcaggggcatgtatattgcccgtcagttatcctttaccggagtgactttcaagatagaggaggtcttactgtcccagtcttatgtgaagatgtataataaagctgtcaaactgtgggtcatcgccagggaacgctttcagcaggccgctgatctgatcgacgccgagcagcggatgaaaaaatctatgtggggccagttttggtccgctcatcagaggttcttcaagtacctttgtattgccagcaaagtgaaaagggtggttcagttggctagggaagagatcaaaaacggcaagtgtgtagtgattggactccagtcgacaggtgaggcgagaaccctggaggccttagaggaaggtgggggagaactgaacgacttcgtgtccactgccaagggagtgctccagtccctgattgaaaagcacttccccgcacctgatcgaaagaagctctattccctactcggtattgacctgacagctcctagtaacaatagttcccccagagatagtccctgtaaggagaataagataaaaaagcggaaaggggaagagattacacgggaggccaagaaagctagaaaagtgggcggactcacgggctcatcatctgatgatagtggctcggagagtgatgcaagcgataacgaagagtcagattacgaatcctcgaagaatatgagctcaggcgacgacgatgatttcaacccatttctggatgagagcaatgaggacgatgaaaatgatccatggctgattcggaaggatcataagaaaaataaggagaaaaagaaaaaaaagtcaatcgacccggacagtatccagagcgctctactggcctctggcctgggaagcaagagaccttcattctcttccacacctgtgatcagtcctgccccaaactctacccctgctaacagcaacacaaacagtaactcctcactgattacctctcaagacgccgtcgaacgcgcacagcagatgaaaaaggatctcctggataagctggagaagcttgccgaggacttacctccgaacacgctagacgaacttattgacgaactcggagggcctgaaaatgtggcggagatgactggccgtaaaggcagggttgtcagcaatgatgatgggagcataagttacgagtcacgaagcgaactcgatgtccccgtggagatccttaatataaccgagaagcagcgctttatggacggcgacaaaaacatcgctattatctcagaggcggcttcaagtggaatctccctgcaggccgaccgcagggcaaaaaatcagcgtcggcgtgtgcatatgaccttagagctgccatggtctgccgacagggcgatccagcagtttgggcgtacccacagatcgaatcaagtgactgctccagaatatgtatttctgatctcagaactggccggagaacagaggttcgcttccattgtcgctaagagacttgaaagcctgggcgcactcacccacggtgacaggagagcaactgagtcccgcgatctatccaggtttaactttgacaacaagtatggtagaaacgccctcgaaattgtgatgaaatccatcgtaaatctggatagcccaatggtgagccccccaccagattacccaggcgaatttttcaaggacgtgcggcaaggattaattggtgtgggtctcataaatgtcgaagacaggagcggaattctcacgttagacaaggactacaacaatatagggaaattcctgaatagaatactgggcatggaagtgcaccaacagaatgccctttttcagtatttcgctgatacattaactgccgttgttcagaatgctaaaaaaaatgggcgatatgacatgggcatattggacttggggtcaggagacgaaaaggtgaggaaatcagacgtcaaaaaatttttaacccctgggtacagtacatccggccacgtggaactctacactatcagcgttgagaggggcatgagctgggaggaggctactaaaatttgggccgaattaaccggccctgacgatggattctaccttagcctgcagatcaggaacaataagaaaactgccatcctcgtgaaggaagtgaatcctaagaaaaagttatttctggtctacagaccgaacaccggaaagcagctgaagttggaaatttatgccgacctgaagaaaaaatataagaaggtggtctctgatgatgccttaatgcactggttggatcagtacaactcatcagccgatacctgcacccatgcttattggcgcggaaactgcaagaaggcctcgctggggctggtttgcgagatcgggctgagatgccggacttattacgtcctttgtggctccgtgctgtctgtttggaccaaagttgaaggagtactggcatccgtttccggaacaaatgtgaaaatgcagatagtcagactccggaccgaagacgggcaacggatagtgggccttatcataccagccaattgtgtgtcgccgctggtcaacctgctgtccacctcagaccaaagtcagcagcttgcagtgcagcaaaagcagttatggcagcaacatcacccccaatcaatcacaaacctcagcaatgctta

SEQ ID NO: 242645 - DNA, 2199 bp, synthetic construct
  misc_feature 1..2199: note = Description of Artificial Sequence: Synthetic coding sequence
  source 1..2199: mol_type = other DNA
atggtcgagccagggcaggacctcctacttgccgcactgtctgaatcaggcatctccccaaacgacctgtttgacattgatggaggcgatgctggcctggcaacccccatgcctacgccctctgtgcagcagagtgtgcccctgagcgctctggagctgggattggaaaccgaggctgcagtgcctgtcaaacaggagcccgagacagtgcctactcctgccctcctcaacgtgcgacagccaccatccaccactacattcgtgcttaatcagattaaccacctccctcctttgggctcgacgatcgtgatgactaagacgccgcctgtgacaactaaccggcagactattacattgacaaagttcatccagacaacagcttctacccggcctagcgtctcagctccgacagtaaggaacgccatgacctctgcacccagcaaggaccaagttcagctaaaggatctgttgaagaacaatagtttgaacgagcttatgaaattaaaaccccctgccaatatagcgcaacctgtggctacggccgctacagatgtctcaaatggtaccgtgaagaaggaatccagcaacaaagaaggagcccgaatgtggatcaacgatatgaagatgaggtctttttcaccgaccatgaaagttcctgtggttaaggaggacgatgagcctgaggaagaggacgaggaagagatgggacacgcggaaacctatgcggagtatatgccaattaagctcaaaattggtttgcgccacccggacgctgtggtagagacttcctccctctctagtgtgaccccgcctgatgtttggtacaaaacctccatcagtgaggagaccattgacaacggctggctgtcagccctgcagctagaggccataacctatgctgcccaacaacacgagaccttcctgccaaacggagatagagccggattcctcatcggagacggagccggtgtgggcaaaggaagaaccattgccggaattatctatgaaaattacctcctctcgcggaaacgggcactgtggttttccgtgtccaatgacctcaaatacgatgctgagagggacttacgtgatattggtgccaagaacatcctcgtgcactcactcaacaaattcaagtacggcaaaatctcgtctaaacacaacggttctgtgaagaaaggcgttatctttgccacttactcaagcctcattggcgaatcacagagcggagggaagtacaaaacgcgcctcaaacagctgctgcattggtgcggcgatgatttcgatggagtgattgttttcgatgagtgtcataaggctaagaacttgtgcccagtcggatctagcaaacctaccaaaacgggactggctgtactggagctccaaaacaaactcccgaaagctcgcgtggtctatgccagcgccacaggggcatctgagccgaggaacatggcttacatgaaccgtcttggcatatggggagaggggacacccttccgtgagttctctgatttcatccaggctgtcgagcgcagaggagtgggcgcaatggaaatcgtggccatggacatgaagctccgcggtatgtatatcgcccgacagttatcctttactggtgtgacatttaagatcgaagaggtgcttctgtcccagtcatatgtgaagatgtacaacaaggccgtcaaactttgggtgatagctcgtgaacggttccagcaggccgcagacctcatcgatgccgagcagcgcatgaaaaagtccatgtggggccagttctggagcgcgcatcaacgctttttcaaatatttgtgcattgcctctaaggtgaaacgcgtggttcagttagcaagggaggagatcaagaacggaaaatgtgtggtgattggactgcaatcaaccggtgaggcccgtactctagaggccttggaggagggcggaggggaattaaatgatttcgtgtctactgccaagggggtgctgcagtccctcattgagaaacacttccccgctcctgaccgcaagaaattgtacagcttgcttggcatcgatttaaccgctccgagcaacaacagctccccaagagactcaccttgtaaggagaataagataaagaaacgaaagggcgaggagatcacacgcgaagccaagaaagcccgaaagatgtccctgatgcgcatgatgaaaatggtttccagctag

SEQ ID NO: 242646 - DNA, 1632 bp, synthetic construct
  misc_feature 1..1632: note = Description of Artificial Sequence: Synthetic coding sequence
  source 1..1632: mol_type = other DNA
atggagcaggtgaatgagctgaaggagaagggtaataaagctctgtccgtggggaacatcgacgatgcgctccagtgctacagtgaagccattaaattggatccacacaaccatgtcttgtactctaataggagtgctgcatacgcgaagaaaggcgattatcaaaaggcttacgaggatgggtgcaaaaccgtggatctgaagcctgattggggtaagggctattctaggaaagcagccgcattggagtttctcaatcggttcgaagaggctaaacgcacatacgaggaaggccttaagcacgaggccaacaatccccaacttaaggagggactgcagaacatggaagccagattagccgaacgtaaattcatgaatccatttaacatgccaaatctttaccaaaaactagagagcgatccccgtacccgcacgttactgtcagaccctacttaccgtgagttaatagagcagctgcggaataaaccgtcagacttaggcactaagctgcaggatcctcggatcatgactacgctcagtgtacttctgggagtggacctcggatccatggacgaggaagaggagatcgctactccccctccccctcctccgcctaagaaggaaacgaaacctgaacccatggaagaagatctgcctgagaacaaaaaacaggcgctgaaagagaaagaactgggtaacgatgcctacaagaagaaggactttgacactgctctcaagcactatgataaggctaaggagctggaccccactaatatgacctacatcactaaccaagcagccgtgtatttcgagaaaggtgactacaataagtgcagggagctctgcgaaaaagcaattgaagtgggtagggagaacagggaggattatcgccagattgccaaagcctacgctcgcataggtaacagctacttcaaggaggagaagtataaggatgccatccatttctacaataaatcactggccgaacatcgaactcccgatgtcctcaaaaagtgccagcaggccgaaaaaatcctgaaggaacaggaacggctagcttacatcaaccccgacctggcacttgaggaaaaaaacaagggcaacgaatgctttcagaaaggcgactacccacaggccatgaagcactacaccgaggctatcaaaagaaatccgaaggatgccaaactttattctaatagggcagcttgttacactaagcttctggagtttcaattggccctgaaagattgcgaagaatgcatccagcttgagccaacatttatcaagggttataccaggaaggccgcagcccttgaggctatgaaggactacaccaaagccatggacgtgtaccagaaggctctcgatctcgacagctcttgtaaagaggcggcagatggataccagcgctgtatgatggcgcagtacaatcggcatgacagcccagaagatgttaaacggcgagcgatggccgatccggaagtgcagcagattatgtccgaccccgctatgagattgatcctggagcagatgcagaaagatcctcaggcactgtcagagcacctgaaaaacccggtgatcgcccagaagatccaaaagctgatggacgtcggcctaatagctattcgttag

SEQ ID NO: 242647 - DNA, 1359 bp, synthetic construct
  misc_feature 1..1359: note = Description of Artificial Sequence: Synthetic coding sequence
  source 1..1359: mol_type = other DNA
atgaatcggcagctagttaacatccttacagcgctgttcgctttctttcttgaaaccaatcactttagaactgctttctgtaaggatcacgactcccggagtgggaagcagcctagtcagacccttagcccctctgattttctcgacaaactaatggggagaacctcgggctatgatgccaggatcagaccaaacttcaagggaccacccgttaacgttacatgcaatatcttcatcaacagcttcgggtcagttaccgaaacaacaatggattacagagtgaatatttttctccgacagcagtggaacgactcacgcctggcgtatagcgagtaccctgatgactccctcgacttggacccgagtatgctggacagtatttggaaacccgacctcttcttcgcaaatgagaagggggctaattttcacgacgtcacaacagataacaagctcctgcggatcagtaaaaacggtaaggtgctgtactccatccggttgacgctgaccctctcatgtcccatggatctcaaaaattttcccatggacgtccagacatgtactatgcagctcgaaagctttggatatacaatgaacgacctcatcttcgaatggttgagcgatggccctgtgcaggtggcagaaggactcacactcccccagttcatcctgaaagaggaaaaagagcttggctattgcactaagcattacaacaccggaaaattcacgtgcattgaagtgaagttccatctagaacgccagatggggtactatctgatccagatgtacattccctccctgctcatagtgattctgagctgggtgagtttctggatcaacatggatgcagcaccagcaagagtggcactgggcataacgacagtgctgactatgaccacccaaagctctggaagcagagccagtcttccaaaagtgtcctacgttaaggctatcgatatctggatggcagtgtgcctgctttttgtgtttgctgccctcctcgagtacgcagcagtgaattttgtctcgaggcagcataaggagtttctgcgactgcggagacgtcagaagcgacagaataaggaggaagacgtgaccagagagtccaggtttaacttttccggatacgggatgggtcattgcctccaagtgaaagacgggactgccgtaaaggctacccctgctaatccattgccacagcctcccaaggatggtgacgctataaaaaagaaattcgtagatagggcgaagagaatagacaccatttcgcgggcagcatttcccttagctttcctcatcttcaatatcttctattggattacatacaagatcatcagacatgaggatgtgcataagaaatag

SEQ ID NO: 242648 - DNA, 3489 bp, synthetic construct
  misc_feature 1..3489: note = Description of Artificial Sequence: Synthetic coding sequence
  source 1..3489: mol_type = other DNA
atgaatgggcatcaccagcagaatggagtcgagaatatgatgctgttcgaggtagtgaaaatgggcaaatcggctatgcagtcagtggtggacgattggatagagtcttacaaacacgaccgagacatcgccctcctagacctcatcaacttcttcatccagtgtagcggctgtaagggcgttgttacagctgagatgttccgacacatgcaaaactcggaaataatcagaaaaatgaccgaggagtttgacgaggactctggagattacccactgacgatggccggaccccaatggaagaaatttaaatcctctttttgcgagttcatcggagtgcttgttcgtcaatgccagtactctatcatctacgatgaatacatgatggatactgttatcagccttctcactggactcagtgattcccaagtccgcgcttttcggcatacctcgaccctggctgctatgaaactgatgacggccttagttaatgtcgccctgaatctgtctattaatatggataacacacaaaggcagtatgaagctgaacggaacaagatgattggaaagagagcgaatgagcgtctcgagctgctgctgcagaagagaaaggagctgcaggagaaccaggacgaaatcgagaatatgatgaacgcaatcttcaagggagttttcgtccatcggtacagggatgccattgcagagattcgcgctatctgtatcgaagagataggtatttggatgaagatgtactctgacgcgttcctaaacgattcttaccttaaatatgtggggtggacaatgcacgacaaacaaggagaagtgcggcttaagtgcctcacagcgctccaaggactctactacaacaaagagctgaactccaagctggagctgtttacctctaggttcaaggatcggatcgtgtccatgactctcgacaaagaatatgacgtggccgttcaagcaattaagctcctgacactggtgctgcagtcatccgaggaggttctgaccgccgaagattgtgagaatgtataccaccttgtgtacagtgcccacagaccggtcgccgtggccgctggggaattcttatataagaaattgttctcaagaagagatccggaggaagatggaatgatgaagcgccgaggccgtcagggcccaaatgccaatctcgtgaagacgctggttttcttcttcctcgaatccgaactccacgagcatgccgcatatctggtagactctatgtgggattgcgctacagagctgctcaaggactgggaatgcatgaacagcttattgctggaagagcccctgtccggagaagaggccctcactgatcgccaagagtctgctctcattgagatcatgctgtgcactatcagacaggcggcagaatgccatccaccggtcggaagagggactggtaaacgggtgctgaccgctaaagagaaaaagacacaactggacgatcgtactaaaattacagagctctttgcagtggcactacctcaacttttagctaaatactctgtggatgccgaaaaggtgactaatctgcttcaactgccccagtacttcgacctcgagatttacactacgggtcggttagagaaacatctggacgctctgcttagacagatccgcaacatcgttgaaaaacacaccgacaccgatgtgttggaagcctgttctaagacttatcatgccctgtgtaacgaagagtttaccatcttcaatcgagtggacattagtcgatcacagctgatcgacgagctggctgataagtttaataggctgctcgaggactttctgcaggagggggaggagccggacgaggatgacgcatatcaagtcctgtcaacactgaagaggattacggctttccataatgctcacgacctgtccaaatgggatctgttcgcatgtaactacaagcttctgaaaacagggatcgagaatggtgacatgcctgagcaaatcgtgattcatgcattgcaatgcactcactacgttatcttgtggcagttagcgaaaataactgagagctcttctaccaaagaagatttattgcgattaaagaagcagatgcgagtgttctgccagatctgtcagcactacctgactaatgtgaatacgaccgtcaaggaacaagcctttaccatcctctgcgacattctaatgatctttagtcaccagatcatgtccggaggacgggatatgttagagcccttggtctatacaccggatagcagccttcagtccgagttactttcttttatcctcgatcatgtctttattgagcaggatgacgataacaattccgcagacggccaacaggaggacgaggccagtaagatcgaggcactccacaaaagaaggaatctgttggctgccttttgcaaactcattgtctatactgtggtggagatgaacacggccgctgacatctttaaacaatatatgaagtactacaacgattacggcgacattataaaggagacaatgagcaagacgcggcaaattgacaagatacagtgcgccaaaacactgattctctcattgcagcaattgttcaacgagatgatccaggagaacgggtacaactttgaccggagttcttcgactttcagtggcattaaagagctggctcggagatttgcactcacatttggactggaccagcttaaaacacgggaggctattgccatgcttcacaaggatggcatcgaatttgcatttaaggagcctaatccccagggggagtctcacccaccactaaacctggcatttctggacatcctgtctgagtttagctcaaaactcttgcgccaggataaacgcacggtatacgtatatttggagaaatttatgacatttcaaatgtctctgagacgcgaggacgtgtggctgccactcatgtcataccggaattctctgctggccggaggcgacgatgacaccatgtcagtgatttctggcatatctagcagaggatccacagtgcgctcaaaaaagagcaagccctcgaccggcaagcgcaaagtggtggaaggcatgcagctgagtttaactgaggaaagttcttcctctgattcaatgtggctgagtcgagagcagaccctgcacactcctgtcatgatgcagaccccccagctgacgtcgactatcatgcgggaaccaaagcggctgcgacccgaagactccttcatgtcagtctacccgatgcagactgagcaccaccaaaccccgctcgattacaacagacggggaacttcactgatggaggacgatgaggagcctattgtcgaagatgtgatgatgtcctcagaaggccgtattgaagacctgaacgaaggtatggattttgacactatggacattgatctacctccttccaagaacagacgagagcgaacagaacttaaacctgattttttcgaccccgctagcatcatggatgagtctgtcctgggcgttagtatgttctag

SEQ ID NO: 242649 - DNA, 3696 bp, synthetic construct
  misc_feature 1..3696: note = Description of Artificial Sequence: Synthetic coding sequence
  source 1..3696: mol_type = other DNA
atgatcgccgcacccgagattcctactgacttcaatctgttacaggaatctgagacgcatttctcgtcggataccgacttcgaggacattgagggaaagaatcaaaagcaggggaagggcaaaacttgtaaaaaggggaagaagggtccagccgagaagggcaagggcggtaatggaggcggtaagcccccaagcggacctaatagaatgaatggccatcaccagcagaacggcgtggaaaatatgatgcttttcgaagtcgtcaagatgggcaagtctgccatgcagtctgtggtagacgactggatcgagtcttataaacacgatcgggacatcgcactccttgacctgatcaatttttttatccagtgtagcggctgtaagggggtggtcaccgccgagatgttccgccatatgcagaattccgagatcatcaggaagatgaccgaagagtttgacgaggacagtggggactaccccctgacaatggctgggcctcaatggaagaagtttaagagctctttttgcgaattcattggcgtactcgtgcgccagtgccaatatagtataatctacgatgaatacatgatggataccgtgatttccctactcactggattaagtgatagccaggtgcgcgcattccggcatacttcgacgcttgctgctatgaaactaatgacagctttggtaaatgtcgctctgaatctaagcataaatatggacaatactcagaggcagtacgaggccgaacggaataagatgattggcaaacgggctaatgaaagactggagctgctcctgcagaaaagaaaagagctgcaggagaatcaggatgaaatcgagaatatgatgaatgcgattttcaagggcgtgtttgtccacagatatagagacgcgattgcagaaatccgggcaatctgtatcgaagagattggaatttggatgaagatgtactctgacgccttccttaatgactcttacttaaagtacgtgggatggactatgcacgataagcaaggtgaggttcggctaaagtgtctcacggcccttcaaggactctactataacaaagagctcaactctaagcttgagctgttcactagccggtttaaagacagaatcgtaagcatgacacttgacaaggagtacgacgtggccgtgcaagccatcaagctgctcactctcgtgctccagtcctccgaagaggtgctgactgccgaggactgtgagaacgtgtatcacctggtgtacagtgcccaccggccagtggctgtggcggcaggcgagtttctatataaaaaacttttctcacgccgagacccggaagaggatggaatgatgaagagacgcggaaggcagggccctaacgccaacttggtgaaaacccttgttttctttttcctcgaatctgaactccacgaacacgcagcatatttagttgattcaatgtgggactgtgctactgagctactgaaagactgggaatgcatgaactctctgctcctggaagaacctctatctggcgaggaggctctaaccgacagacaggaatccgccctcatcgagatcatgctgtgtacaatcaggcaggccgcagagtgtcacccacccgtagggcgaggcacagggaaacgcgtgctgaccgccaaggaaaagaagacacagctggacgacaggacaaaaatcacagagctgttcgcagtggctttgccacaactgctggccaagtattctgtagacgccgagaaggtgaccaacctactccagctcccccagtatttcgatctggagatttatacaaccggaaggctggagaagcacctggatgcgctccttagacagattcgaaacatcgtggaaaaacataccgacactgatgtgctggaggcatgctcaaagacttatcacgctctctgcaatgaagagttcaccattttcaacagggtggacatcagccgtagtcaactgatcgacgaacttgccgacaagttcaatcgacttctggaagactttttacaggagggtgaggaacctgatgaggatgacgcataccaagttctgtccacccttaaacgaataacggccttccataatgcacatgatctaagcaaatgggatctgtttgcctgtaactataaacttttaaagactgggattgagaacggggacatgcccgaacaaatcgtgattcacgcgctccagtgcacgcactatgtgattctgtggcagttggccaagattacggaatcctctagcactaaggaggatttactccgactgaagaagcagatgcgagtattctgtcagatttgccagcattacttaactaacgtgaacactactgtgaaggagcaggcctttaccatcttgtgcgacatcctcatgatattcagtcaccagattatgagtgggggtcgcgacatgttagaacctcttgtctatacaccggactcgtctttgcagtctgaacttttgagcttcattctggatcacgtattcatagagcaggacgatgacaacaactcagccgatggacagcaggaagacgaagcctccaagatcgaggccctccataaacgccgaaacttattggctgcattctgcaagctcattgtctataccgtagtggagatgaataccgccgcagatatcttcaagcagtacatgaagtattacaatgactatggcgatataatcaaggagactatgtcaaagacaaggcagattgataagattcagtgtgctaaaaccctgatcttgtccttacagcagttgtttaatgagatgattcaggagaacgggtataatttcgatagaagtagctcaacattctctggcatcaaggaactcgccaggcgttttgccctgacttttgggctggatcagcttaaaacaagagaagcgattgcaatgctccataaagatggtatagagttcgcttttaaggaacctaacccacagggcgaatcccacccacctctaaacctggcgtttttggatatcctgagtgaatttagcagcaagctgcttcgccaggacaaaagaacagtgtacgtgtatctagaaaagttcatgacctttcaaatgtccctgcgaagggaggatgtctggctgccactcatgtcctacagaaactccctactggccggaggagacgatgatacgatgagcgtcatatcaggcatcagtagtcgtggctctaccgtccggagcaaaaagagcaagccttccacagggaagagaaaggtggtggaggggatgcaactgagtttgacagaggaaagctctagtagcgacagtatgtggctgtccagggagcaaactctgcacacgcccgtgatgatgcaaacacctcagctgacctctactattatgcgcgaacccaaaaggttacggcctgaggactcctttatgtctgtgtacccaatgcagaccgaacaccatcagactccactggactacaaccgcagagggactagtctcatggaggatgacgaggaacccatagtggaggacgtaatgatgtcctctgagggacgcattgaagatcttaacgaagggatggactttgacacgatggatatcgacttgcccccttcaaaaaatagacgcgaaagaaccgagttgaagccggattttttcgatccagctagcattatggacgaaagtgtgctcggcgttagcatgttttag

SEQ ID NO: 242650 - DNA, 3807 bp, synthetic construct
  misc_feature 1..3807: note = Description of Artificial Sequence: Synthetic coding sequence
  source 1..3807: mol_type = other DNA
atgatcgctgcccctgaaataccaacggattttaatctgcttcaggagagcgagacccacttttcaagcgatacagattttgaggacattgaggggaagaatcagaaacaaggcaaaggaaagacctgcaagaaggggaagaagggacccgctgagaaaggaaaggggggaaatgggggaggaaagccgccaagcggcccaaataggatgaatgggcatcaccaacagaacggcgtcgaaaacatgatgcttttcgaagtagttaagatgggaaaatctgccatgcaaagcgtggtggacgattggattgagagctataaacatgatcgtgacatcgcgctgctggaccttatcaacttctttatccagtgtagtggttgtaaaggggtagtgaccgcggaaatgtttcgccacatgcagaatagcgaaatcatcagaaaaatgacagaggagtttgatgaagactctggcgattatcctctaaccatggccggtcctcaatggaaaaagttcaaatcatcattctgcgaatttattggggtgctggtgcgacaatgccaatatagcataatctatgacgagtacatgatggacaccgtgatctcactcctgactgggttaagcgactctcaggttcgggcattccgtcacacgagtaccctagcagcaatgaagctgatgacagcactggttaatgttgctctgaatcttagtatcaatatggacaacactcagagacagtatgaagccgaacgtaataaaatgatcggcaagagagccaacgagcgcctggaactgctgctccagaaacgcaaggaactccaggaaaaccaggatgagatcgaaaatatgatgaacgctattttcaagggagtgtttgtgcaccggtacagggacgctatcgccgagataagagccatctgtattgaggagattggaatttggatgaagatgtacagcgacgcttttctcaacgacagttacttgaagtacgtgggatggacaatgcacgacaaacagggcgaagttaggctcaagtgtttaacggctcttcagggcctatattataacaaagaactaaactccaaactcgagttattcacctcgcgttttaaagatagaattgtttctatgacacttgataaagaatatgatgtcgcagtgcaggccatcaagctgctcactctagtgttgcagtccagtgaggaagtccttacagctgaggattgcgaaaacgtataccacctcgtgtactctgcccacaggcctgttgctgtagcggctggagagttcttgtacaagaagcttttcagcagaagggatcctgaagaggacggaatgatgaaaaggaggggaaggcagggtcccaacgctaacctggtcaaaactcttgtatttttttttctcgaatcagaactgcacgagcatgctgcctacctggttgactccatgtgggactgcgctactgagctgctcaaggactgggagtgcatgaacagcctgctgcttgaagagcccttgagcggggaggaggcacttaccgacaggcaggaatctgctttgatcgagattatgctgtgcacaatacggcaggcagccgagtgtcaccctcccgtaggccgagggacaggtaagagggtcttaacagcgaaagaaaaaaagacacagttagacgataggacgaagattaccgagctgtttgctgtggcccttccacaactgcttgcaaaatactccgtggatgccgaaaaagtgactaatcttctccagctcccgcaatatttcgacctggaaatctacacaacgggacggctcgaaaaacacctggacgccctcttacgccagattcgaaacatcgtcgagaagcacacggacacagatgttctggaggcctgttcaaagacctaccatgccctttgcaacgaggagttcacgatatttaatcgagtggatatctccagaagccaactgatagatgagctggcagataagttcaatcgactactagaagactttctgcaagaaggggaggagcctgatgaggatgacgcctaccaggtgctgtccaccctgaagcggatcaccgcatttcacaacgcacatgatctgagcaagtgggatctgtttgcttgcaactataaactgctgaaaacaggcattgaaaatggcgatatgcccgaacagattgtcatacacgcgctgcagtgcacacactacgtcattctgtggcaacttgctaaaattaccgaaagttcctccacaaaggaagacctgctgaggctgaagaaacagatgcgagtgttttgccagatctgtcagcattatttgactaacgttaatacgacagtgaaggagcaggcatttacaattttgtgcgatatattaatgatctttagtcatcagatcatgtcggggggtcgggacatgctggaaccactggtgtacacgcccgacagttctttgcagagtgagctgctcagcttcattctggaccatgtgtttatcgagcaggatgacgacaacaattctgcggacgggcagcaggaagacgaggcttccaagattgaggcccttcataaaagaagaaacctgctggctgccttttgtaaattgatcgtgtataccgttgtggagatgaacaccgcagccgatattttcaagcagtacatgaagtactacaacgattatggggatatcatcaaggaaacaatgagtaaaacccgccagatcgacaaaattcagtgtgccaaaaccctcatactttcactgcagcagctgttcaacgaaatgatacaggagaacggctacaatttcgatcgcagctcctctactttctcgggcattaaagagctcgctcgtcggttcgctctaactttcggcttagatcagctaaaaacccgcgaagctatcgcaatgttacataaagatggaattgagttcgcattcaaggagcctaatccccaaggcgagtcccatccgcctctgaacctagcctttcttgacattctctccgagtttagctctaaactcctcagacaagacaagcgcaccgtttatgtgtatctcgaaaagtttatgacattccaaatgtcgttaaggagagaggatgtgtggttgcccctgatgtcctatagaaattcgcttcttgcaggcggtgacgatgatacaatgagcgtcatctccgggatcagcagcagggggagtacagtaaggagcaaaaagtccaaaccatccacaggaaagagaaaggtcgtggagggaatgcagctttcattgacagaagagagctcctccagcgatagcatgtggttgtcgcgggagcagacactgcacacccctgtcatgatgcagacccctcagctcacaagcactattatgagggagccaaagagactcagacctgaagatagctttatgagtgtgtatcccatgcaaacagaacaccaccagaccccgttggattacaatacccaggttacatggatgcttgcgcaacgccagcaggaggaagcccgacagcagcaggaacgtgccgcaatgagttacgttaagctgaggacaaacctccaacatgcgattcgtcggggaacaagtctcatggaggatgatgaggagcccatagttgaagacgtgatgatgagctctgaaggtcgaatcgaggatctgaatgaaggcatggattttgacaccatggacattgacctgcccccttccaagaaccggagagagcggaccgagctgaagcctgatttcttcgacccggcttctattatggatgagtccgtcttaggggtctccatgttttag

SEQ ID NO: 242651 - DNA, 3696 bp, synthetic construct
  misc_feature 1..3696: note = Description of Artificial Sequence: Synthetic coding sequence
  source 1..3696: mol_type = other DNA
atgatcgcagcacccgagataccaaccgattttaatttgctgcaagagtccgaaacacactttagctcggacaccgacttcgaagatatcgaggggaagaatcagaagcagggaaaaggcaagacctgtaagaagggcaagaaaggcccagccgagaagggcaaaggagggaatgggggagggaaacctccctcaggtcctaaccggatgaatgggcaccaccagcagaacggtgtggagaacatgatgttgttcgaggtagtgaagatggggaaatctgccatgcagagcgtggtagatgattggattgaatcttacaaacacgatagggacattgcgctgcttgacttgatcaattttttcatacagtgttctgggtgcaaaggcgttgtaacagccgaaatgttccggcatatgcagaactctgaaattatcagaaagatgacggaagaatttgatgaagacagcggcgattatccactgaccatggccggtcctcagtggaagaaatttaagtcttcattctgcgaattcatcggtgtcttagtgcggcaatgccaatactcaattatttacgatgaatatatgatggacacagtcatctctctgctcactgggctctccgatagccaggtgcgcgcattccgacatactagtactctcgcggcaatgaagcttatgactgccctggttaatgtggcccttaatctgagtataaatatggataacacgcagcgccaatatgaggccgaacggaacaaaatgatcggcaagcgcgcaaatgagagactcgaactactgctgcaaaaaagaaaggagttgcaggagaaccaagatgaaatagaaaacatgatgaacgctatcttcaagggcgttttcgtccaccgctatcgagacgcaattgcagagattagagcgatctgcatcgaagaaattggaatctggatgaagatgtactcggacgcatttctgaacgacagttatctgaagtatgttggctggaccatgcatgacaaacagggagaagttaggctaaaatgtcttaccgctctacaaggactctattataacaaggagctaaatagtaagcttgagttgtttacctctcggtttaaggacagaatcgtgagtatgactctcgacaaagaatatgacgttgcagtccaggcaataaagctgctgactttagtgctccaaagctcagaggaggttctaacggcagaagattgtgaaaacgtgtaccatcttgtgtactccgcgcacagacccgtggccgttgccgctggggagttcttatataagaaactcttctcccgtagggacccagaggaggacggcatgatgaagagacggggacgacagggacccaacgcgaatctcgtgaaaactttggtgttttttttcctggagtctgaactgcatgaacatgccgcttaccttgtagactcaatgtgggattgcgctacagagctgctcaaggactgggaatgtatgaattccttactgctggaggaaccgcttagtggcgaagaagccctcacggatagacaggagagtgccctaattgagattatgttgtgtaccattcgccaggccgctgagtgtcacccgcctgttggacggggtactggcaagcgtgtcttgactgctaaagagaagaaaacgcagctggacgatcgcaccaaaataactgagctcttcgcagtcgccctgcctcagctccttgctaagtattcagtcgacgcagagaaagtgaccaatctgcttcagctcccccagtatttcgacctcgaaatttatacaactgggcgactagaaaaacacttggacgccctgcttagacagattaggaatattgtcgagaagcataccgacaccgatgtgctcgaggcatgttccaagacctaccatgctctttgcaacgaagaatttacgattttcaatcgagttgacatcagccgcagccagttaatagacgaactcgcagacaaattcaatcgactcctcgaggattttctccaggaaggtgaggagccagacgaggacgatgcctatcaagttctttctactctcaaacgaattaccgccttccacaatgctcacgatctgtccaaatgggacctgttcgcatgcaattacaaacttctgaaaacaggaatcgaaaacggggacatgccagagcagatagtgatacatgccttgcagtgtacacattatgtgatactatggcagctggcaaaaattactgaatccagcagcaccaaggaagatctcctgcgattaaaaaaacagatgagagtcttttgccaaatctgccaacattatttaacaaacgtgaacaccaccgtgaaagaacaggcctttacaatactatgtgatatcctgatgatcttcagccaccaaatcatgagcgggggtcgagatatgctggaacctctggtttacacccccgacagctcactgcagagtgagctcctctccttcatactcgaccatgtgtttatcgaacaagacgatgacaacaactccgccgacgggcagcaggaggatgaagccagcaagatcgaggccctgcacaagcgcaggaacctcctcgcagctttttgtaaactgattgtgtacacagtggtggaaatgaacacggcggctgacatcttcaagcagtacatgaagtattacaacgattacggggacattatcaaggagacgatgagtaagacacgacaaatagataaaatacagtgcgctaagaccttgatcctaagtctccagcagttatttaacgagatgatccaggagaatggctacaacttcgatcgctccagctccacctttagcggcatcaaagagctcgcgagaaggttcgctttgacttttggtttagaccagctgaaaactagagaggctatcgctatgctccataaggacggtatagaattcgctttcaaggagcctaacccccagggggaaagccatccccctctgaatctggccttcctggacattctgagtgaattttctagcaaattgctgcgacaagacaaaaggaccgtgtatgtgtacctagaaaagtttatgacctttcagatgtccctgcgcagagaagatgtctggctcccactgatgagctatagaaattctctgctggcgggaggcgacgacgataccatgtccgtcatttccgggatctcttcccgaggcagtacagtaaggagcaagaagtccaagccttctacaggcaagcgtaaagtggtggaaggcatgcagctctctctgactgaagagtcctctagctccgattcaatgtggctgtccagggaacagacactgcacactcccgtcatgatgcaaacacctcagctgaccagcacaattatgcgtgaacccaaacgtctgcggccagaggattcatttatgagtgtgtacccgatgcagactgagcaccatcagactccccttgattacaacaggagaggcacttccttgatggaagatgatgaagaaccaatagtagaggatgtcatgatgtcatctgaagggaggattgaggatctgaacgaagggatggatttcgacaccatggatattgatttaccacccagtaaaaatcggagagagcggacagagttgaagcccgatttctttgaccccgcttctattatggacgaatccgtgctgggggtgagtatgttttag

SEQ ID NO: 242652 - DNA, 3696 bp, synthetic construct
  misc_feature 1..3696: note = Description of Artificial Sequence: Synthetic coding sequence
  source 1..3696: mol_type = other DNA
atgattgccgctcctgagatccccacggattttaaccttctgcaggaatcggagacgcatttctcctccgacacagacttcgaggatatcgaaggcaagaatcagaagcaaggcaagggcaagacctgtaagaaggggaaaaaggggccagccgagaagggaaaggggggaaatgggggaggtaagccgcctagtggtcccaaccgaatgaacggacatcaccaacagaatggcgtggagaatatgatgctgtttgaagtggtcaagatgggcaagtccgcaatgcagagtgtagtggacgactggatcgaaagctataaacatgacagggatattgcccttctcgatctcattaacttctttatccaatgctcaggctgtaagggcgtcgtgaccgctgaaatgttccggcatatgcaaaactctgaaattatccggaagatgaccgaggaatttgatgaggattcaggggattaccccctgacaatggctggcccacagtggaagaaattcaaatccagtttctgtgaatttatcggtgtactcgtacgccagtgtcagtattccatcatctacgatgagtacatgatggacaccgtgatttctttattgacggggctgtctgactcccaggtgcgggctttcagacacacttcaactttggccgctatgaagcttatgaccgcattagtgaatgtggcacttaacctttccatcaacatggataatacccagcgccagtacgaagcggagcggaataaaatgattggtaagagagccaacgaaagactggagctactgcttcagaaacgaaaggagctgcaagaaaatcaggacgagatcgagaacatgatgaatgccatttttaaaggagtgtttgtacataggtacagagacgccatcgcggaaatcagagcaatttgtatcgaggaaataggcatatggatgaagatgtatagcgatgcgttccttaacgactcctatctcaaatacgtagggtggactatgcacgacaaacagggggaagtgaggttaaagtgtcttactgcactgcaagggttgtattacaataaggagttgaactcaaagctagagctgtttaccagtagatttaaggatcgaatagtgtcaatgactctggataaggagtacgacgtggctgtgcaggcgattaagcttttgaccttggtcctacaatcaagcgaggaagtgctcaccgccgaggattgtgagaatgtgtatcatctggtgtacagcgcccatagacccgtggctgtagcggcaggcgagtttctctacaaaaaactgttcagcagacgcgaccccgaggaagacgggatgatgaaacggagaggtagacagggacccaacgctaatctcgttaaaacactcgtctttttcttccttgaatctgaactacatgaacatgctgcttacctggtcgacagcatgtgggactgtgccactgaactgctgaaagattgggagtgcatgaacagcctcctcctggaggagcctttaagtggtgaggaggctctgaccgatagacaggaaagcgcgcttattgaaatcatgctgtgtaccatcagacaagccgctgagtgccaccccccagtcgggaggggcacgggcaagagggtccttaccgccaaagagaaaaagactcaattggacgaccggacaaaaattaccgaactgttcgcggtggctctgccacaacttctcgcgaaatacagcgtggatgccgagaaagtgacgaatcttctccagctgccccaatattttgatctggagatctacaccaccggacggctggagaagcaccttgatgctctgctgcgtcagattcggaatatcgtcgagaaacacactgacacagatgtgctcgaagcctgctcaaagacataccatgcgctttgtaatgaagagttcactatttttaacagagtagacatttccagatcacagttaatagatgagctggcagataagtttaacaggctgttagaagattttttgcaggaaggagaagagccagatgaggatgacgcatatcaggtgctatcaaccctgaaaaggatcactgccttccataacgcccatgatttgtctaaatgggatctctttgcatgcaattataagctcctcaaaacaggaatagaaaacggtgatatgccggaacaaatcgttatccacgcccttcagtgtacccactacgtcattctgtggcagttggctaagatcactgaaagctcgagtactaaagaagacttgctgagactcaaaaaacaaatgcgagtgttctgtcagatctgccagcactatttaaccaatgtcaacacgactgtgaaagaacaggctttcactattttgtgcgatatcctgatgatcttttcgcatcagatcatgtcaggcggtcgggatatgcttgagccactagtctatacccctgactcaagcttacagtccgagctcctatccttcattctggatcacgtattcatcgaacaggacgacgacaataatagtgccgacggccagcaggaagacgaagcatccaaaatcgaggccttgcataaaaggcgaaatctactggctgcattttgtaaactgattgtctacaccgtggtcgagatgaataccgcagcagacatcttcaagcagtacatgaagtactacaacgactatggcgacatcattaaagagacaatgtccaagacgagacaaatagataagatccagtgtgcaaaaacactgattctctcgttgcaacagctttttaatgagatgatacaagaaaacggatataactttgatcgaagctcttccacatttagtggcatcaaagagctcgctcggaggttcgccctcactttcggccttgaccaactcaagactagagaggctatcgccatgctgcacaaggacggaattgaattcgcattcaaagaaccgaacccacaaggcgagtcccatccaccactgaatctagcttttctcgatatccttagcgagttctccagcaaactgttgaggcaggataaacggaccgtttatgtttaccttgagaaatttatgaccttccagatgagtcttcggagggaagacgtctggctgcctctcatgtcttaccggaattctctacttgcgggaggcgatgacgatacgatgtctgtcatcagcggtatctcttctcggggatccacagtccgttctaagaagagcaagccatctaccggaaagcggaaggtggttgaggggatgcaacttagcctaaccgaggaatcctcaagcagtgatagcatgtggctgtcccgtgagcagactctgcataccccagtgatgatgcagacacctcaattgacgtcaactatcatgcgagagccgaagcggctaaggccagaagattcctttatgagcgtgtaccctatgcagacagaacaccaccagactccattggactacaaccggagaggcacatctcttatggaggacgacgaagagcccattgtagaagatgtgatgatgtcctctgaagggagaatcgaggacttaaacgagggcatggatttcgatactatggacatcgacttgcccccttctaaaaacaggcgagaacggaccgaattaaagcctgatttcttcgaccctgcctctataatggacgagagtgtgctgggagtatctatgttttag

SEQ ID NO: 242653 - DNA, 213 bp, synthetic construct
  misc_feature 1..213: note = Description of Artificial Sequence: Synthetic coding sequence
  source 1..213: mol_type = other DNA
atgattgccgcaccggaaattccgactgatttcaacctgctgcaagagtcagaaactcatttctcttccgataccgattttgaggatatcgagggaaaaaaccagaagcagggcaagggtaaaacatgtaagaaaggtaaaaagggtcccgctgagaaaggcaaaggtgggaatggcggtggaaaaccaccctccggccctaacagaatgtag

SEQ ID NO: 242654 - DNA, 348 bp, synthetic construct
  misc_feature 1..348: note = Description of Artificial Sequence: Synthetic coding sequence
  source 1..348: mol_type = other DNA
atgattgctgccccagaaattccaacagatttcaacctgctgcaggagagcgagacccacttttcatctgataccgactttgaggatatcgaaggcaagaaccaaaagcaggggaaaggtaaaacgtgcaagaagggcaagaagggaccagccgaaaagggcaagggagggaacggtgggggaaaaccaccttctggtccaaacaggatgaacggtcatcaccagcagaacggggtggaaaacatgatgctgttcgaagtcgtcaagatgggaaaatcagcgatgcaaagcgtggtagacgactggatcgagagctataagcacgatagggacattgccctgctgtag

SEQ ID NO: 242655 - DNA, 510 bp, synthetic construct
  misc_feature 1..510: note = Description of Artificial Sequence: Synthetic coding sequence
  source 1..510: mol_type = other DNA
atgatcgcagctccagaaatccctactgacttcaacctgttgcaggagtccgaaacgcacttctctagcgataccgactttgaggatatcgaaggcaagaaccaaaagcagggcaaagggaagacctgcaaaaaaggcaaaaaaggccctgcagaaaagggcaaaggcggaaacggcggagggaagcctccaagtggcccaaatcggatgaatggtcaccaccagcagaatggggtagagaacatgatgttgtttgaagtcgtaaagatgggaaaatctgctatgcagtccgtcgtcgacgattggattgagtcatacaagcatgacagggatatcgccctcttagatctgattaacttcttcattcagtgttctgggtgcaagggagtcgtaacggccgaaatgttcaggcatatgcagaatagcgaaatcatcagaaaaatgacggaggagttcgacgaggatagcggagactaccctctcacgatggcaggcccacagtggaagtag

SEQ ID NO: 242656 - DNA, 465 bp, synthetic construct
  misc_feature 1..465: note = Description of Artificial Sequence: Synthetic coding sequence
  source 1..465: mol_type = other DNA
atgatcgccgctccagaaattcccacagattttaatctgctccaggagtcagagactcacttttcctctgacactgatttcgaggatattgagggaaaaaatcagaaacagggaaaggggaaaacctgtaagaaaggaaagaaggggccagccgagaagggtaagggagggaacggcggaggcaaaccccctagcggcccaaatcgcatgaacgggcatcatcagcaaaacggggttgaaaatatgatgctctttgaggtagtcaagatgggaaaatccgctatgcagagcgttgtggacgattggatcgagtcttacaagcacgaccgtgatatcgcgctcttggatctgatcaacttttttattcagtgcagcgggtgcaagggagtggtcacagctgagatgttccgtcatatgcaaaatagcgagattatcaggaagatgacggaagaatttgatgaatag

SEQ ID NO: 242657 - DNA, 627 bp, synthetic construct
  misc_feature 1..627: note = Description of Artificial Sequence: Synthetic coding sequence
  source 1..627: mol_type = other DNA
atgatcgccgcacctgagataccaaccgattttaacctgctccaggagagcgaaacacacttcagctctgatacagatttcgaggacattgaaggaaaaaaccagaagcagggcaaagggaagacctgcaagaaggggaaaaagggcccagcggaaaagggaaaaggcggaaacggaggtggaaagcctccgagcggtcctaaccgaatgaatggccatcaccaacagaacggtgtcgaaaatatgatgctattcgaagttgtaaagatgggcaaatctgccatgcagagcgtggtcgacgactggatcgaatcctacaagcacgaccgtgacattgccctgctcgatctgattaatttcttcatccagtgctcaggatgcaaaggcgtcgtcaccgctgagatgtttagacatatgcagaattctgaaatcatcagaaagatgaccgaggaattcgatgaagactccggagattatcccttgactatggcaggccctcagtggaaaaagtttaagagctctttttgcgagttcattggggttctggtgaggcagtgccagtattcgattatttacgacgagtacatgatggacacagtgatctcattactgaccgggctgtcttag

SEQ ID NO: 242658 - DNA, 1647 bp, synthetic construct
  misc_feature 1..1647: note = Description of Artificial Sequence: Synthetic coding sequence
  source 1..1647: mol_type = other DNA
atgatcgcagcgccagaaattccaaccgacttcaatctgttgcaggaaagcgagactcacttcagttccgatacagacttcgaggatattgagggtaagaatcagaagcagggcaagggaaagacctgcaagaagggaaagaagggacccgctgagaagggtaaggggggaaatggtgggggaaaacctccttctggtcctaatcgtatgaatggccaccatcagcagaacggagtggaaaacatgatgctcttcgaggtggtgaagatgggaaaaagcgcaatgcagagcgtcgtggacgattggatcgagtcctacaaacacgaccgcgatatcgctctgctcgatttgatcaatttcttcatccagtgctccggttgtaagggcgtcgtaaccgcagaaatgtttaggcatatgcagaactcagagattattaggaagatgaccgaggaatttgacgaggattccggcgattatcccctaacaatggccggtccccagtggaagaaattcaaatcttcgttctgtgagtttattggagttctcgtccggcagtgccagtactccattatttacgacgaatacatgatggacaccgtgataagcttgcttaccgggctatcagattcacaggtgcgcgcatttagacacacctccaccctcgccgctatgaaactcatgaccgccttggttaacgtggcgctgaatctgtcaatcaatatggataacacacagcggcaatacgaagctgagcggaataaaatgattgggaagcgcgctaacgaacggctggagctgcttttacaaaaacgcaaagaattgcaagaaaatcaggatgagattgagaacatgatgaacgccatttttaaaggcgtgtttgtgcaccgctaccgtgacgctattgccgagatccgggcaatctgcatcgaagaaataggtatttggatgaagatgtacagcgacgccttcctgaatgattcatacctgaagtacgtcggatggacgatgcacgataagcagggagaagttcggctgaaatgtctcactgccctgcaggggctctactacaacaaggaactgaacagcaagcttgagctcttcacctctcgttttaaggaccgcatcgtctctatgacacttgacaaggaatatgatgtggccgtccaagcaattaagctgttgactcttgtgcttcagtcatcagaggaagtactgaccgctgaggattgtgagaacgtgtaccacctggtttatagcgcccaccggccagtcgccgttgcagccggtgagttcctgtacaaaaaattgttttctcggagagaccctgaagaagacggaatgatgaagcggagggggaggcaagggccaaacgcaaatttggtcaaaacactagtttttttcttcctggaatcagagctccacgaacatgctgcgtacctggttgactccatgtgggactgtgccactgagcttctaaaggattgggagtgtatgaattcccttctactagaagagccgctgtcaggcgaggaggctctgactgatcgacaagagagcgcgctcattgagataatgctgtgcacgattagacaggccgctgagtgtcacccacctgtcggaagaggcaccggaaaaagagtgctctag

SEQ ID NO: 242659 - DNA, 123 bp, synthetic construct
  misc_feature 1..123: note = Description of Artificial Sequence: Synthetic coding sequence
  source 1..123: mol_type = other DNA
atgatagccgctcccgaaatccccaccgacttcaatttacttcaggagtccgaaacccatttttctagcgacacggactttgaggacatcgagggtaaaaatcagaagcaagggaaaggatag

SEQ ID NO: 242660 - DNA, 3678 bp, synthetic construct
  misc_feature 1..3678: note = Description of Artificial Sequence: Synthetic coding sequence
  source 1..3678: mol_type = other DNA
atgtccagtcccctacagagagcagtgggggatactaagcgggcactgtctgctagctcctcaagcagtgcaagcctgcctttcgatgaccgggactcgaatcacacaagtgagggaaatggcgattcactgttggcagacgaagacacagacttcgaagacagcctgaacaggaacgtgaaaaaacgagccgcaaagcgccctcccaaaacgacccctgtggcgaagcatccaaagaaaggttctcgggttgtgcaccgacactcccgaaaacagagcgaacctccggcaaacgatctgttcaatgccgtcaaagcagccaagtctgacatgcagagcctggtggacgaatggctcgattcctacaagcaggatcaggacgccggattcctcgagttggtcaactttttcattcagtcatgcgggtgcaaggggattgtgactccggagatgtttaagaagatgtccaactctgaaattatccagcacctgacggagcagttcaacgaagatagtggcgactatcctttgattgcacctggcccaagctggaaaaagttccagggttctttctgcgaattcgtgcggacccttgtttgccagtgtcaatattctctattgtacgatggcttcccaatggatgatctgattagccttctgactggactgagcgactcacaggtgcgagctttccgccacacatcaactctcgccgctatgaagctgatgacgtcgttggtgaaagttgctttacagctcagtgtccatcaggacaataaccagagacagtacgaagccgaacgcaacaaaggccctggtcagcgcgcacctgaaagactggaatctctcctggaaaagagaaaggaactgcaagagcatcaggaagaaatagagggcatgatgaacgccctcttccgcggtgtcttcgtgcacaggtaccgggacgtcttgccggagatacgggcaatttgtattgaggagattggttgttggatgcagtcatactcaacttccttcctgacagactcatacctgaagtatatcgggtggaccctgcatgacaagcacagagaggtacgcctgaagtgtgtgaaagcccttaagggtctgtatgggaatcgcgacctgacaacccgtctggaactttttaccagtcgtttcaaggacaggatggtctctatggtcatggaccgggaatatgatgtggcagttgaagcggtaagactgctgatccttattctcaaaaacatggagggggttctcacggacgcagactgtgaatcagtttacccagtggtttacgccagccaccgcggacttgcctccgccgctggtgagttcctttactggaaattgttttaccccgagtgcgagattagaatgatgggaggcagagaacagagacagtcccccggagcacaacgcaccttctttcagctgctgctgagtttcttcgtcgaaagtgaactacacgatcacgctgcttacctcgtcgacagcttgtgggactgtgccggagctaggttgaaggattgggagggactgacatcactgttgctggaaaaagaccagaatctgggcgatgtacaagagtctacgctgatcgagattctggtgtcgagcgcgaggcaggcctcagagggccacccgcctgtagggagagtaacaggtcggaaagggcttacatctaaggagcgaaagacacaggctgacgatcgggtgaaattgacagaacacctcattccgctgcttccccaattgcttgcaaaattcagtgctgacgcagaaaaagtcacaccactgttgcaactgctgagttgcttcgatctgcacatatattgtaccggcaggctcgagaaacacctagaactgtttctgcagcaattgcaggaggtggtagttaaacacgcagagcctgctgtgttagaggctggggcacatgccttgtaccttctctgcaatccagagtttactttcttttcacgggcagactttgcgagatcacagctggtggatctgctcacggatcggttccagcaggagttggaagaactgttgcaaagctcatttctagatgaggacgaagtttataacttagccgctaccctgaaacgcctgagcgctttctataatacacacgacctaacccgttgggaactgtatgagccgtgttgtcaactccttcagaaggcagtggatactggcgaagttccgcatcaggttatattgcccgcactgaccctcgtgtatttctcgatcctctggacattgacccacatctcaaagtcagatgcatcgcagaaacagctgagttccctgcgggacagaatggtggcattctgtgaactgtgccagtcttgtttgtccgatgttgatacagagattcaggaacaagcatttgtgctgctgtccgatctgcttctgatattctccccccagatgatcgtgggaggtcgcgactttttacggcctctcgtttttttcccagaggccaccctccaatctgagttggccagcttcttaatggatcacgtgttcatccagccgggtgacctaggatctggtgattctcaggaggaccatttgcaaatagagcggttgcatcagcgccgtaggctcctggctggcttttgcaaactgctattgtacggggtgctcgaaatggacgcggcttcagatgtattcaagcactacaacaagttctataatgactatggcgacattattaaagagaccttaactagagcacgccaaatagacagatcccactgcagtcgtatactactgcttagtctgaaacaactttacacagagctgctgcaggaacatgggcctcaggggctcaacgagctacctgcgtttattgagatgcgagacctggcccgacggttcgccctgagcttcggtccccaacagctccagaacagagacctcgtcgtgatgctccataaggagggaatacaattctcgctctcagagctgccgccagccggttcaagcaaccagcccccaaatttggccttcctggagcttctcagcgaattcagcccaaggttattccaccaagataagcagttgttgctgtcttacctggaaaaatgtttacagcacgtgagccaggcccctggacacccgtggggaccagtcactacctactgtcacagcctgtctcccgtggagaacaccgccgaaacttcaccgcaggttcttccctcttccaagcggaggcgagttgaagggcctgccaagccaaatcgcgaggacgtgtctagcagtcaagaagagtctctccaacttaattctatccctcctactcccaccctcacatcaaccgcagtgaagtctcgacagccactttgggggctcaaggagatggaggaagaggacggcagcgaacttgactttgcccagggccaacccgtggcaggaacagagaggagtcggtttctgggaccccagtactttcagacccctcacaatccttcagggcctggcctcggcaaccagctgatgagattaagtttgatggaagaggacgaggaggaggaacttgagatccaggacgaaagcaacgaagaaaggcaggacacggacatgcaagcctcctcctacagttcaacctctgaacggggactggaccttctcgacagtacggaactggacatcgaggacttctag

SEQ ID NO: 242661 - DNA, 2667 bp, synthetic construct
  misc_feature 1..2667: note = Description of Artificial Sequence: Synthetic coding sequence
  source 1..2667: mol_type = other DNA
atgagttcgcctctgcagagagcagttggcgacaccaagcgggctttgtccgcatcatcttcgtctagcgcatcactgccctttgacgacagagatagcaaccacacttcagaaggaaatggagattcactgttggccgatgaagatacagatttcgaggactctttaaatagaaatgtcaagaagcgggcagccaaaagacctcctaaaacaacgcctgtcgcaaaacaccccaagaaggggtctcgggttgtacaccggcactccagaaagcaatccgagcctcccgctaacgatctgttcaacgcggttaaggccgcaaagagcgacatgcaatcattggtcgatgagtggcttgattcgtataaacaggaccaagacgcaggctttctcgagttggtcaatttctttatacagtcctgtgggtgcaaagggatagtcacccctgaaatgtttaagaagatgagcaattctgagatcattcagcacttgactgaacagtttaacgaaatggacgacctgatcagcctgttgacaggactgagtgatagccaagtccgggcattcaggcacacaagtaccctggccgctatgaagctgatgacttccttggtgaaagtggccctgcagctgtccgtgcatcaagataataaccagcggcagtacgaggccgaaagaaataaagggcctggacagagagccccagaacgactagaatctctgttagaaaagcgcaaagaactgcaggaacaccaggaagaaatcgaggggatgatgaacgctttgtttagaggcgtatttgtgcacagatacagagacgtgttgcctgagatccgcgctatctgcatcgaggagatcgggtgttggatgcagtcttacagcacgtccttcctgacagatagctatcttaagtacataggctggaccctccacgataaacaccgggaagtgcgattaaagtgtgttaaggcgcttaaggggctgtatggcaatcgggacctcaccactcgcctagaattgttcaccagcagatttaaagatcgtatggtgagcatggtcatggatcgggaatacgacgttgccgtggaagcagttaggcttctgattctgattctgaagaatatggaaggagtccttactgatgcagattgtgagagtgtttacccagtggtgtatgccagtcacaggggcttggcgtctgctgctggggaatttctttattggaaactattttaccccgagtgtgagatccggatgatggggggtcgtgagcagcgtcagagccctggagcccagaggactttctttcagctgttgctgtctttttttgtggagtccgagttacacgatcacgcggcttacctcgtggactccctgtgggactgtgcaggagccaggctcaaggactgggaaggtttgacaagcctcctattagagaaggaccaaaacctgggagacgttcaagaaagtaccctgatcgaaattttagtgagttcggctaggcaggcctccgagggtcatccgcctgttgggcgtgtgactggcaggaagggccttacaagtaaagaacgcaagacacaggcagatgaccgtgtgaaactaacagagcacctgattcctcttctgccccagctcctcgccaagttcagcgcagacgccgagaaggtcaccccgctgctgcagctcctttcttgctttgacctgcatatctactgcaccggccgactggaaaaacacctggaacttttcttgcagcagctgcaagaagtagtcgtgaagcacgctgagccagcagtgctggaagcgggtgctcacgccctctacctgttatgcaaccccgagttcaccttctttagccgagccgacttcgccaggtcacaattggtagatttgttgactgataggttccagcaggaactcgaggagctcctgcagtcttcatttctggacgaggatgaggtatataacctcgctgcaacgttgaagaggctgagtgctttctataacacacatgatctcacacgctgggaactctacgaaccctgctgtcagcttttgcagaaggcagttgacacaggtgaggttccgcaccaagttatcctcccggctttgaccctggtatacttcagtatcttgtggaccttaacacattccctttcccctgtggagaacacggcagaaacatcaccacaggtcctgcctagcagcaaaaggcggagagtggaggggcctgcgaagcctaacagggaagatgtctcttcctctcaggaagagtccctgcagctgaactcgattcctcccacgccaaccctgacctccaccgcggtgaaatcacgccaacccttgtgggggctgaaggagatggaagaagaggatggtagcgaactggacttcgcccagggacagccagtggctggaaccgagcgttcgcggtttctcggccctcagtacttccagacacctcataatcccagcggccctggactcggaaaccaattgatgcgactgagcctcatggaggaggatgaggaagaggaactcgagatacaggatgaatctaacgaggaaagacaggataccgacatgcaggcatccagctattcgagtacttccgagaggggactggacctcctggacagcactgagctggacatcgaagatttttag

SEQ ID NO: 242662 - DNA, 789 bp, synthetic construct
  misc_feature 1..789: note = Description of Artificial Sequence: Synthetic coding sequence
  source 1..789: mol_type = other DNA
atgttgcacaaagagggaatacagttttccctgagtgaactgccgcctgcaggctctagcaatcaacctcccaacctcgctttcctcgagctgctgagcgagttcagtccacgacttttccaccaagacaaacagctgttactttcttacttggagaagtgtctgcaacacgtgagtcaggcacctggacatccgtggggacctgttaccacctactgccatagcctgtcccctgtggagaacactgctgagacaagcccacaggtcctcccctcttctaagcgcagaagagtggagggacccgctaaacccaatcgggaggatgtgtcctccagtcaggaagagtcccttcagctcaattcaatacccccaacgcctacgctgactagcaccgccgtgaaatcacggcagcccctgtgggggcttaaggaaatggaagaagaggacggatccgagctggatttcgcacaaggatctcagccagtggccggaaccgagcgcagtcggtttttgggccctcagtattttcaaactcctcataacccatctgggcctggcttgggaaatcagttgatgagactgagtcttatggaggaagatgaggaagaggagttggagattcaggacgaatccaacgaagaacgtcaggacacggacatgcaggcaagctcctattcttcaacaagcgagagaggactggacctgctggactcaacagaactagatatcgagattacagagagtctgccactgttaggaaaatcaccacacccatacaatagccgctag

SEQ ID NO: 242663 - DNA, 438 bp, synthetic construct
  misc_feature 1..438: note = Description of Artificial Sequence: Synthetic coding sequence
  source 1..438: mol_type = other DNA
atgagctccccattgcagcgggctgtgggggacaccaagagggccctgtccgcttcaagctcttccagcgcctccctcccgttcgacgatcgggattcaaatcacaccagtgaaggcaatggtgactccctattggcggatgaagacacggacttcgaagacagtctgaaccgtaatgtgaagaagagagcggctaagaggccccctaagacaaccccggtcgccaagcatccgaaaaagggttcgcgcgttgtccacaggcattctcgcaaacagagcgagccccctgccaacgatctgttcaacgcggtgaaggcagcaaagtcggatatgcagtcactcgtcgatgagtggctggattcctataagcaagatcaagatgcgggatttctggaactggttaacttcttcattcagtcatgcgggtgtaagggttag

SEQ ID NO: 242664 - DNA, 339 bp, synthetic construct
  misc_feature 1..339: note = Description of Artificial Sequence: Synthetic coding sequence
  source 1..339: mol_type = other DNA
atgtcaagccccctccagcgggcagtgggtgacacgaaaagggccctgtcagcatcctccagcagctccgccagccttccctttgacgaccgcgattcaaatcatacaagtgaaggaaacggagactctctgctggccgatgaggatacagatttcgaggactccctcaatcggaacgttaaaaaaagggccgctaagagacctcctaagacaacaccggtggcgaaacaccccaagaagggcagcagggtcgttcacagacatagtcggaagcagagtgagccgccagccaacgatcttttcaatgcagtcaaagccgcaaaatccgacatgcagtag

SEQ ID NO: 242665 - DNA, 3678 bp, synthetic construct
  misc_feature 1..3678: note = Description of Artificial Sequence: Synthetic coding sequence
  source 1..3678: mol_type = other DNA
atgagttcacccttacaacgggcagtgggcgatacaaaacgcgctcttagcgcaagttcatcctcttctgctagtctgccgttcgacgaccgcgactcaaatcataccagcgagggcaacggcgactctcttctcgcagacgaggatacggacttcgaggactcgctaaatcgaaacgtgaagaagcgtgcagctaaacgaccgcctaaaaccactcccgtcgccaagcaccctaagaaaggctcgagagtggtccaccgacattcccggaagcaatcggagccacccgctaacgacttgtttaatgccgtgaaggccgctaaatcagacatgcaaagcttggtggacgagtggctagatagctataaacaggaccaggacgccggtttcttagagctggttaatttcttcatacagtcctgcgggtgtaaaggcattgtgactcctgagatgttcaagaagatgtccaacagtgaaataatacagcacctcaccgagcagttcaacgaagacagtggcgattacccactaatcgcccctggaccaagctggaagaagttccagggctcattctgtgaatttgtgaggacgttggtgtgtcagtgccaatactctctgctctacgatggctttccaatggacgacctgatctcacttttgacaggactcagtgactctcaggtgagagctttccggcacacctctactctggctgccatgaaactgatgacctccctggtgaaagtggccctgcagctgagcgtgcaccaagacaataaccagagacagtacgaggccgaaaggaataagggtccgggtcagcgggctccagaacgcctcgaaagcctgctggagaaaagaaaggaactgcaggaacaccaagaggaaattgaggggatgatgaacgcactctttagaggcgttttcgtgcacaggtatagggacgtgctccctgagattcgcgcaatctgcattgaagaaattggctgctggatgcagtcgtactctacaagtttcctcacagacagctaccttaagtatattggctggactctccacgacaagcatcgggaggttcggcttaaatgtgtgaaggccctgaaaggactgtatggaaaccgggacttgactacacgtctagagctcttcaccagtaggttcaaagatcgcatggtgagtatggttatggaccgcgaatatgatgttgcagttgaagcagtgcgattgctaattctgatcctgaagaacatggaaggggtgctgactgacgctgattgtgagtccgtctaccccgtagtatacgctagccacagaggactcgccagcgcggcaggcgagttcctctactggaaacttttctaccccgaatgtgaaattagaatgatggggggtcgggagcagaggcaaagtccaggggcacagaggactttcttccagctgctgctgagttttttcgttgagagtgagttgcacgaccatgccgcatacttagtcgatagcctctgggactgtgccggtgccaggctaaaggactgggaaggactgacatcgttgctgctcgaaaaagaccaaaacctcggcgacgtgcaggagagcactctaatcgagattcttgtgtcctctgccagacaggcttctgaggggcacccacctgtaggtagggttactggacgaaaaggcctgacgtcaaaagaacgcaagacacaggctgatgaccgcgtgaaattgacggagcatctgattccactgctcccacaactgctcgccaaatttagcgccgacgccgaaaaggtgaccccattgctgcagctgctatcctgcttcgacctgcatatctactgcacagggcgactcgaaaaacatctggagctctttctccaacagctgcaagaggttgttgtgaaacatgcagaacctgccgtgcttgaagctggtgcgcacgctctgtatctcctctgcaaccccgaattcacatttttctctagggcagacttcgctcgcagccagcttgtcgacctgctaacagaccggttccagcaagaactcgaagaactccttcagtcttcattcctggatgaggacgaggtgtacaatcttgccgctactctcaagcggttgtccgccttctacaacactcacgacctgacaagatgggaattgtacgagccatgttgccagctcctgcagaaggctgttgataccggcgaggtgccacaccaagtaatcctgcctgccttgacgctcgtgtatttttccattctctggaccttgacccacatctctaaatccgatgctagccagaagcagctgagctccctaagagaccgcatggtggcgttctgcgagctgtgtcagagttgtttgtctgacgtggacactgagattcaagagcaggcattcgtactcctgtccgatctgctgctaattttttcgccccaaatgatcgtgggagggagagactttctccgcccattggtgtttttcccagaggccacactccagagcgagctcgcgtcattcctgatggatcatgtgtttatccaacccggagaccttggcagcggtgacagtcaagaggaccacttgcagatcgaaaggcttcatcagcgaaggaggctgttagcagggttctgcaaactactgctatacggcgtgctggaaatggatgcagcatctgacgtcttcaagcactacaacaaattttataatgattacggtgacatcatcaaagagaccttaacaagggccaggcagatcgataggtcccactgctcgaggattttacttctgtcactgaaacagctttacaccgagctcctccaggagcatggaccccagggacttaacgaactaccagcgtttattgaaatgagggatttggccaggagattcgcactgtcattcggccctcagcagctgcagaacagagacctggtggtgatgttgcataaagagggaatccagttctctctatcagagctaccacctgcaggctcttctaatcaaccacccaacctggcattcctagaactgttgtccgagtttagtccacgacttttccaccaggacaagcagctgctgttgtcctacctcgagaagtgcctccaacacgtgagccaagctcccggacacccttggggccctgtgacaacctattgccattccttaagtcctgtggagaacacagccgagacaagcccacaagtgctccccagctctaagaggcgcagggtggaagggcctgcaaagccgaacagggaggatgtgtctagctcacaggaggaatctctacagcttaacagcatcccacccacccccacactcacctcgaccgcagttaaaagccgtcagcctctgtgggggcttaaagagatggaagaggaggacgggagcgaactggactttgcccagggccagcctgtagccggtaccgagaggtcacgattccttgggcctcaatacttccaaacaccacataacccctccggtccagggttgggaaaccaactgatgcgcttgagtctcatggaggaggacgaggaagaggaactggagattcaggatgaatctaatgaggagaggcaggacactgacatgcaagcctcttcatactcctcaactagtgagagggggttagatctcctggactctacagagctggacatcgaggatttttag

SEQ ID NO: 242666 - DNA, 567 bp, synthetic construct
  misc_feature 1..567: note = Description of Artificial Sequence: Synthetic coding sequence
  source 1..567: mol_type = other DNA
atgagctcaccgctgcagagagcggtcggagacacaaagcgtgccctgagcgcatcatccagcagtagcgcgtctctcccattcgacgatcgggattctaatcacacctctgagggaaacggagactccctgctagccgatgaagacaccgacttcgaagacagtctgaatcgcaatgtgaaaaagagagctgcaaaaaggccaccaaaaaccactccagtcgccaaacaccctaaaaaaggctccagggtggtgcaccggcacagcaggaaacagagcgagcctccagcaaacgacctcttcaatgctgtgaaggccgctaagtcggatatgcaggattctggtgattaccctctaatcgcaccaggccctagctggaaaaagttccaggggtccttctgcgagtttgtgcgtactcttgtttgccaatgtcaatacagcctgctgtacgacggcttccccatggacgacctgatctcactgctcacaggactctcagacagtcaggtcagggcttttagacacacatcaactcttgcggcaatgaagttaatgacatctctgtag

SEQ ID NO: 242667 - DNA, 1047 bp, synthetic construct
  misc_feature 1..1047: note = Description of Artificial Sequence: Synthetic coding sequence
  source 1..1047: mol_type = other DNA
atggtttggccatgggtggccatggccagcaggtggggccctctgattggcttagcgccatgctgcttgtggctcctaggcgcagttttgctgatggacgcatcagcccgtcccgcaaaccacagcagcacccgcgaacgtgtggctaatcgggaagaaaacgaaattcttccccctgaccacttaaatggagtcaaactcgaaatggatgggcatctgaacagggggttccatcaggaagtttttctgggcaaagacttaggcggttttgatgaggacgctgagccacgaaggtctcgccgaaagttgatggtgattttttctaaggtagatgtgaacactgaccggaagatcagcgcaaaggagatgcagcgatggattatggagaagaccgcagaacatttccaagaagcgatggaagagtctaagactcattttagggccgtggaccctgatggcgatgggcatgtttcttgggatgaatataaagtgaaattcttggcctccaagggacattccgaaaaggaagttgccgacgcaatccggctgaacgaggaactaaaggttgatgaggagactcaggaggtgctggaaaatttgaaggataggtggtatcaggccgacagcccgccagcagacctgctgctaacagaagaggaattcctgagcttcctgcaccccgagcacagcagaggaatgttgagattcatggttaaggaaattgttagggatctggatcaggatggagacaaacagctgagtgtccccgagttcatttccctgcccgtcggcaccgttgaaaaccagcagggtcaggacatagatgacaactgggtgaaggatagaaagaaagagttcgaggagctgatcgacagcaatcatgatggaatagtcacggcagaggaactggagaacgtgcctaccttaccgctgcagccaatcggcacgctaaattcccacttcgtcaggctggcagcagagttgggcggagggaaagcaacactgacatgtgcacctcttgcccgtagggcgacctggactccttag

SEQ ID NO: 242668 - DNA, 1089 bp, synthetic construct
  misc_feature 1..1089: note = Description of Artificial Sequence: Synthetic coding sequence
  source 1..1089: mol_type = other DNA
atggtgtggccctgggtggcaatggctagccgttggggacctctgataggactcgcaccctgttgcctgtggctcctgggggcagtactcctgatggatgctagtgctaggcctgccaatcactccagcactcgagaacgcgtcgctaaccgggaggaaaatgagatcctgcctccagatcatctgaatggtgtcaagttggagatggatgggcatctgaatcgaggtttccaccaggaggtgttcttgggtaaagacttggggggtttcgacgaagatgccgagccacggagatctagacgcaaactgatggttatcttttcaaaagtcgatgtcaatactgaccgcaagatctcagcaaaagagatgcagagatggatcatggaaaaaacagctgagcattttcaagaagcgatggaagagagtaagactcattttagggcggttgacccagatggggatggccatgtgtcgtgggatgagtacaaggttaagttcctcgcttctaaaggccattctgaaaaagaagtcgccgatgcgattagactaaatgaggaactcaaagtcgatgaggagacgcaggaggtgctggagaatctcaaggacagatggtatcaggctgatagtccccctgcggatcttcttttaaccgaggaggagttccttagtttcctccatcctgagcatagtcgcggaatgctgaggttcatggtcaaagagatagtcagggatcttgaccaggacggagacaagcagctgtcagtgcctgagttcatcagcttgcctgtgggaactgtggagaatcaacagggtcaagacatcgatgacaattgggtgaaagacaggaagaaagagtttgaggagttgatcgacagcaaccacgatggcatcgtaaccgctgaagaacttgaatcctacatggacccaatgaacgagtacaacgcactgaatgaagccaaacagatgattgcagtggccgatgagaaccaaaatcaccacctcgagccagaagaggtcctcaagtacagcgaattttttacggggagcaaactggtggattatgcacgttctgtgcacgaagaattctag

SEQ ID NO: 242669 - DNA, 732 bp, synthetic construct
  misc_feature 1..732: note = Description of Artificial Sequence: Synthetic coding sequence
  source 1..732: mol_type = other DNA
tgactggaaatggatggacatctgaaccgcggtttccatcaggaggtgttcctggggaaggacctgggaggatttgacgaggatgctgaaccccgtagaagcaggcggaaactgatggttatcttttcaaaggtggatgtgaatactgatcgaaaaattagcgctaaagagatgcagaggtggatcatggaaaagacggccgagcacttccaggaagccatggaagagagcaaaacccacttcagagctgttgacccagacggcgatggccatgtgtcatgggatgagtataaagtaaagtttctcgcatcgaaaggacactcggaaaaagaagtagctgacgccattagattgaacgaggagctcaaggtcgacgaggaatcatccacttccaggaactttcttgacctcagagctggcgtatgcagacccaggtacccccaggctgcccctttgagtgcccaggaagtgctggagaacctcaaagaccgttggtatcaagctgattccccaccggcagatctcttgctgactgaggaggaattcctgagcttcctgcatcccgagcattcccggggtatgctgcgctttatggtgaaagagatcgtgagggatttggatcaggatggagataaacagttgtcggtgccagagttcattagtctcccggtgggtacggtggaaaaccagcagggccaggatatagacgacaactgggtgaaggaccgttag

SEQ ID NO: 242670 - DNA, 609 bp, synthetic construct
  misc_feature 1..609: note = Description of Artificial Sequence: Synthetic coding sequence
  source 1..609: mol_type = other DNA
atggtttggccttgggtggcaatggcgagtcggtggggccctctaattggactggcgccatgttgtctttggctcttaggagctgtactgctcatggatgcttccgctagacctgcaaaccatagctccactagggaaagggtggcaaatcgggaggagaacgagattctgcccccagaccacctgaatggagtcaagcttgaaatggatggccacttgaacaggggatttcatcaggaagtttttctgggcaaagacctagggggtttcgacgaggatgcggaacccagaaggtctcgtagaaaacttatggtgatcttctctaaagttgatgtgaacactgaccggaagatctccgcgaaagaaatgcagaggtggattatggaaaagacggcagaacactttcaagaggctatggaagagagcaagacacacttccgggctgtggacccggatggagatggacacgtttcttgggacgaatacaaggtgaagttccttgcctctaagggccacagtgagaaggaagttgccgatgcaattagactcaacgaggagctgaaagtggatgaagagaggcacgggccacctggccctcgcgctctttag

SEQ ID NO: 242671 - DNA, 636 bp, synthetic construct
  misc_feature 1..636: note = Description of Artificial Sequence: Synthetic coding sequence
  source 1..636: mol_type = other DNA
atggccgtggtccccctgctgctgcttggaggtttgtggtccgcagtgggagcttctagtctcggcgtagtgacctgtggaagtgtggtgaaactactgaatacccgacacaacgtccggctccacagccatgacgtacggtatggctcaggcagcgggcaacagtcagtgacaggcgttacctcagttgacgattcgaacagctattggagaatacgcggaaagagcgccacggtctgtgagaggggcacacccattaaatgtgggcagccaatccgccttactcacgttaacacagggcgtaatcttcacagtcatcacttcacttctcccctttcagggaatcaggaagtgtccgcgtttggcgaagagggcgaaggggactacctcgacgactggacagttctgtgtaatggaccttactgggttcgcgacggtgaggtgagatttaagcattcctctacggaggttctccttagtgtgacaggtgagcagtatggccgtcccatctcaggccagaaggaagtgcacggcatggcccagccttcccagaataattactggaaagctatggagggaatcttcatgaagccatccgaactgcttaaggccgaggcacaccacgcggagctatag

SEQ ID NO: 242672 - DNA, 666 bp, synthetic construct
  misc_feature 1..666: note = Description of Artificial Sequence: Synthetic coding sequence
  source 1..666: mol_type = other DNA
atgtggagtgctggtagaggtggagctgcttggcccgtgctgcttggcctgctgcttgctctgctcgtgccgggaggaggcgctgcaaaaaccggagccgaactagtcacgtgtggttcagttttgaaacttctgaatacacaccaccgagtgagacttcactcacacgacataaagtatggatcagggtccggtcagcaatcggtgacaggagtggaggcatctgacgacgccaatagctattggagaatacggggaggttcagaaggaggttgccccagaggcagcccagtccgttgtggccaggccgtgaggcttacgcacgtactgactggcaagaaccttcacacccatcattttcctagcccattgtctaacaaccaagaggtgagcgccttcggcgaggatggagagggcgatgacctcgatttgtggactgttagatgctccggtcaacactgggagcgggaagccgctgtccgtttccagcacgttggcacgtcagtgttcctgtcggtgactggagagcaatacggttcacctatccgcggacagcacgaggtgcacggaatgcctagcgctaatactcacaatacatggaaggcaatggagggtatttttatcaaacctagcgttgaaccgagcgcaggccatgacgagctttag

SEQ ID NO: 242673 - DNA, 2058 bp, synthetic construct
  misc_feature 1..2058: note = Description of Artificial Sequence: Synthetic coding sequence
  source 1..2058: mol_type = other DNA
atggacgtctgcgtacggctggcattatggctcctatgggggcttttactgcaccaaggtcaaagcctgtctcacagccactcggaaaaagccaccggcacttcatcaggagccaactcagaggagtccaccgccgctgaattctgtcggatcgacaaacccctctgtcacagtgaggacgagaagttgtcttttgaagccgtgcgtaacattcacaagcttatggacgacgacgcgaacggcgatgtcgacgtggaggagtccgatgagttcctgcgtgaggatctaaattatcacgatccaactgtcaaacactctacgtttcatggggaagataaattgataagtgttgaggacctgtggaaagcctggaaatcctctgaggtgtataattggacagtcgacgaagtggtccagtggcttatcacatacgtcgagttaccccagtatgaagagacatttagaaagctgcaactcagtggtcacgctatgccacggttagcagtgacaaacaccacaatgactgggactgtgctgaaaatgaccgacaggtctcacagacagaaactccagctaaaagcattagatactgtcctattcggcccacccttattgactagacacaaccatctgaaggattttatgctggtggtgtccatcgtcattggggtgggcggttgctggttcgcctatatccagaatcggtactccaaggaacacatgaagaaaatgatgaaggacctggaagggttgcacagggctgaacaatcacttcacgacctgcaagagcgccttcataaggctcaggaagagcacaggacagtggaggtggagaaagtgcacctcgaaaaaaagctgagagacgaaattaaccttgcgaagcaggaggcacagaggttgaaagagttgcgcgaaggaactgagaatgagcggtcccgccagaagtatgcagaggaagaactggagcaggttcgagaggccctccggaaagctgagaaggagctcgaatcccattcctcgtggtacgcaccggaggcattacagaaatggttgcagctgactcacgaagtggaggtgcaatactacaacataaaaaagcagaatgccgaaaagcagcttctggtcgctaaggagggggctgagaagattaaaaagaaacgaaatacattattcgggacatttcacgtggcacactcctcaagcctggatgacgtcgaccacaagatcttgacagcgaagcaggctctgagcgaggttacagcagccctccgagagcggctccaccgctggcagcagatagagattctgtgtggattccagattgtaaataaccccggtattcatagtttggtggctgcgctcaatattgaccccagctggatggggtccacacgacctaatccagctcactttatcatgacggatgatgtggatgacatggacgaggaaatcgtgtcccctttatctatgcagagtcccagcctacagagttcagtacgccagcgactgacagaaccccaacacggcctgggttcgcagagagacctgacccatagcgatagcgaaagttcactccatatgagcgatcgtcaacgagttgcccctaagccacctcagatgtcccgggctgcggatgaggcactaaacgccatgaccagcaatggcagccaccggctgatcgaaggagtgcaccccggtagtcttgtcgagaagcttccggactcacctgcactagccaaaaaagccctcctggctctcaatcacggacttgacaaggctcacagcctcatggagttgagtcccagcgctccacccggtggatccccacatctcgattcctctagaagccactccccctcgtcacccgatcccgacacccccagccccgtgggggattcccgcgctctgcaggcctccaggaatacaagaataccacatctggccggtaaaaaggccgttgccgaagaggacaacgggtctatcggcgaagaaactgacagcagccccggacggaaaaaatttcccctgaagatatttaagaaaccccttaagaagtag

SEQ ID NO: 242674 - DNA, 2502 bp, synthetic construct
  misc_feature 1..2502: note = Description of Artificial Sequence: Synthetic coding sequence
  source 1..2502: mol_type = other DNA
atgaacgcagctggaattcgggctcctgaagccgctggagcagacggaacaaggttggcacctgggggaagcccctgcttacggagacgaggaagaccagaggagtcgccagcggctgtcgtggcccctaggggagccggagaattacaggcagccggtgcacccttgcggttccaccccgcttcaccgaggaggctccaccctgcgagcacgcccggacccgcatggggatggttgctgcgcaggcgcaggtgggcagctctgctcgtcctgggccttttggttgcaggcgcagccgacggttgcgagctggtgcccagacatttgcggggtcgtcgcgctacagggagcgctgcgactgctgcgagcagtcccgcagctgccgctggagattctcccgcacttatgacggacccatgcatgtcactgtctcctccatgttttacagaggaagatcgttttagtctagaggccctgcagacaatacacaaacaaatggacgatgataaagatgggggtatagaagttgaagagtctgacgagttcatccgcgaagacatgaagtacaaggacgcgactaataagcattcgcatctgcacagggaagacaaacatattacaatcgaagacctctggaagagatggaaaacttcggaagtgcataactggaccctggaagatactctgcaatggttaattgagtttgtcgaattgccacagtacgagaagaacttcagagataataatgtcaagggaaccactcttcctcggatcgctgtccatgaaccatccttcatgattagtcagcttaaaatcagtgatagaagtcaccggcagaaattacagttgaaggccctggacgtagtactgttcggccctctcacacgccctccgcacaactggatgaaggacttcatcctgacggtgagcatagtcatcggagttggcggttgctggttcgcctacacgcagaataaaacatctaaggagcacgtcgctaagatgatgaaggacctggaatctttgcagaccgccgaacagtctttgatggatcttcaggagaggctggagaaggcacaggaggagaatagaaacgttgcagtggaaaaacagaatcttgagcgcaaaatgatggatgaaatcaattacgccaaagaggaagcatgtagactcagagaactgcgggagggggcagagtgtgagctttctcgacgccaatacgctgagcaagagctcgaacaggttcgcatggcgctaaaaaaagcagaaaaagaatttgagctgagatctagttggtccgttcctgacgccctgcaaaagtggttacaactaacccatgaggtggaggtgcagtactacaacattaaacggcagaacgccgagatgcagctggcgatcgccaaggatgaagcggagaaaatcaagaagaaaaggagtaccgtgttcgggactctgcatgtggcccacagcagtagtttagacgaggtagatcacaagatcctggaggccaaaaaagccctttccgagctgacaacttgcctccgcgagcggcttttccggtggcaacaaatcgagaagatttgcgggttccagattgcccacaacagcggcctgccctccctgacctccagcctatactctgaccacagctgggtcgtgatgccaagggtgtctattccaccttatccaatagcaggtggcgtagacgatctagatgaggacacgccccctatagtgagccaatttcccggtacaatggctaaaccccctggctcacttgcgaggtcctcttccctgtgccggtccaggcggtccatcgtgcctagctcaccacagccccaacgggcacaactggcccctcacgccccacaccccagccaccccaggcaccctcaccaccctcagcacacaccacacagcctgccgtcacctgaccccgacatcctgtctgtctcatcatgcccagccctctatcgcaatgaggaggaggaggaagcaatttactttagtgcggaaaagcagtgggaggtccccgataccgcatcagagtgtgattcgctcaatagctccatcggtagaaaacagtcacctcctctcagcctggaaatttatcagaccctctcgcccagaaagatatcgcgagatgaggtgagcttggaggacagcagccggggagactctcctgttacggtcgatgtttcatggggaagccctgattgtgtgggactcaccgagactaaatccatgattttttcgccggctagcaaggtttataacggaattctggagaaatcatgctctatgaatcagctgagttccggaattccggtgcctaaacccaggcacaccagttgctcttcagccggtaatgatagtaaacccgtacaggaagcaccgtctgtggcgagaatctcctccattccccatgatctgtgccacaatggcgagaaaagcaaaaagccgtcaaaaattaaaagtctgttcaagaagaaaagtaagtag

SEQ ID NO: 242675 - DNA, 2526 bp, synthetic construct
  misc_feature 1..2526: note = Description of Artificial Sequence: Synthetic coding sequence
  source 1..2526: mol_type = other DNA
atgaacgccgcaggcatccgcgcacccgaggcagctggcgctgacggcactagactggcccctggaggttctccttgcctaaggaggagaggaagacctgaagaaagcccggcagccgtagtagcaccacggggtgccggagaactgcaggcagcaggggcacccctgagatttcacccagctagtcccagacgtttgcatcccgcttctacacctggtcctgcttggggatggcttctccgcagacgaagatgggcagctctcttggttttgggtctgcttgttgccggtgcggcagatggatgtgagctcgttcctcggcacctgcgcggtcgccgtgcaactgggtcagcggcaacggccgcttcctcgcccgcagccgcagccggtgactcaccggctctcatgacggacccatgcatgagcctgtctccaccttgcttcactgaagaagacagattcagcctggaagcgctgcagacaattcataagcagatggacgatgacaaagatgggggaatagaagtagaagaatccgatgaattcatccgggaagatatgaagtacaaggatgcgacaaacaaacattcccaccttcacagggaggataaacacattaccatcgaggatctttggaagagatggaaaaccagtgaggtgcacaattggaccctcgaggacaccctgcagtggctcatcgagtttgtagaactgccccagtacgagaaaaatttccgggataataatgttaagggtacaacactgccacgaatagctgtgcatgaaccctcctttatgatctcccagctgaagatttccgaccggtcccatcggcagaagctgcagttaaaagcactggacgtggttctgttcgggccactgaccagaccacctcataattggatgaaggactttatcttaaccgtctccatcgtaattggggtgggtgggtgctggtttgcttacacacaaaacaaaaccagcaaggagcacgtggccaaaatgatgaaggacctggagtctctgcagacagcagaacaaagtctcatggatttacaggagaggcttgaaaaagcccaggaagaaaacagaaatgtggccgtggaaaaacagaatctggaacgcaagatgatggacgaaatcaactacgctaaagaggaagcctgtaggctgagagagctgcgggaaggcgctgagtgcgagctgtcaagaaggcagtacgctgagcaggagctggagcaagtgcgtatggcacttaaaaaggccgaaaaggaattcgaactgagatcttcatggagcgtccccgacgccctgcagaaatggctccagctgacccacgaagtcgaagtccagtactacaatataaagcggcaaaacgcggagatgcaactagctatagcgaaggatgaggtggccgcttcatacctgattcaagccgagaagattaagaagaagcgtagcaccgtgttcggtacgctgcatgtcgctcactcatcgtcgcttgacgaggtggaccacaaaatcctggaggcaaaaaaagcattgtctgagctgaccacctgtctccgggagagactgtttcgttggcaacagattgagaagatttgcggatttcaaattgcccataattctggacttccaagtctaacttcttctctgtactcagaccactcatgggttgtcatgccaagggtgtccatccccccatatcccattgccggtggagtcgacgatctcgacgaggatactccaccaatcgtgtcccagttccctgggacaatggccaagcctcccggaagtctggctcgaagttccagtttgtgtcgctcaaggcgctccatcgtgccgtcttcaccacagccacagcgtgcccagttggcacctcacgccccacaccctagccacccgagacaccctcaccacccccagcatacgccacactccctgccatcccctgatcccgatatcctgagcgttagcagttgtcctgccctctaccgtaacgaggaggaagaggaggctatatactttagtgcggagaaacaatgggaagttcctgacaccgcttctgaatgcgactccctcaactcttccattggcagaaagcaatctcccccactgtcgctggagatttaccagacactgtccccccgtaaaattagtcgtgacgaagtgagcctggaggattcgagtcgcggagactctcctgtcacagtggacgtgtcctggggatcgccagattgtgtaggattgacggagacaaagagtatgattttctcacccgctagcaaagtgtataacgggattttggagaagagctgctcgatgaaccagctgtccagtggcatccccgtcccgaaaccccgtcatacatcttgctcctctgctgggaacgattctaaaccagtgcaggaggccccaagcgttgctcgaatctcatctatcccccatgacctctgccacaacggagagaaaagcaaaaagccaagcaagattaaatcactgtttaagaaaaaatctaagtag

SEQ ID NO: 242676 - DNA, 2061 bp, synthetic construct
  misc_feature 1..2061: note = Description of Artificial Sequence: Synthetic coding sequence
  source 1..2061: mol_type = other DNA
atgaatgcagccggaatccgagctcctgaggcagcaggcgcagacggcacacgtctagctcctgggggatctccatgcctaaggaggcggggacgtccggaggaaagccctgctgcagtggttgctcccaggggggcaggggagttgcaagcggctggcgctccacttaggttccacccagcttcaccacgcagattacacccagcttctaccccagggccagcttggggctggttactgaggagaagacgctgggccgcattgttagtgctgggcttattagttgctggtgctgcagacggatgtgaacttgtccctcgacaccttagaggaaggcgggcaaccggaagtgctgcaaccgctgcctccagtccagcggcagccgctggagacagcccagctttgatgaccgacccctgtatgtccctgtccccaccctgttttaccgaggaggatcgcttttccttggaagcactccagactatccacaagcagatggatgacgacaaggacgggggaatagaagtcgaggaaagtgacgagtttattcgagaggatatgaaatacaaggacgcgacgaacaaacatagtcatcttcatcgtgaggacaagcacattactatcgaggatttgtggaaaaggtggaaaacttcagaggtacataattggactttagaggacacattgcagtggttgatcgagtttgtcgaactgccccagtacgaaaagaattttcgggataataatgtgaagggcacgactctccccaggatcgcagtccacgaaccctcatttatgatctcccagctgaaaatttccgatcggtcccatagacagaagttacagctcaaggctcttgacgtggttttgttcggtccattgaccagacccccacacaactggatgaaagattttatcttgacagtttccatcgtaattggggtcgggggttgctggttcgcctacactcagaataagacttccaaagaacatgttgccaaaatgatgaaggacctggagagcctccaaacagccgagcagagcctgatggatctgcaggagaggctcgagaaggcccaggaggagaacaggaatgttgccgtcgagaaacagaatctggagagaaagatgatggacgagataaactacgctaaggaagaagcctgcagattgcgggaactgagggagggcgcagagtgtgaactgagtcgacggcagtatgccgaacaagaactggagcaggttcgcatggccctgaaaaaggccgaaaaggagttcgagctgcgttcttcctggagcgtgccagatgcattacagaagtggctccagttgacacacgaagtcgaagtccagtactataacattaaacgccagaatgcggaaatgcaactggctatcgccaaagatgaagccgaaaagatcaaaaaaaagcgttccaccgttttcggtacactacacgttgcccatagctcctctcttgatgaggtcgaccacaagatacttgaggccaaaaaggccttgagcgaactgactacttgcctaagagagcggctcttccgttggcagcagatcgagaaaatctgcggatttcagattgctcacaattccggtttgcctagcctgacctcaagcctgtactcagatcactcttgggttgtgatgcccagggttagcatcccaccttacccgattgctggcggagtggatgacctagatgaagacacccctcctatcgtaagccagtttccgggaactatggccaagcccccaggttccctggcaaggagttctagcctctgtcgtagtcgacggtccattgttccttcttccccccagcctcaacgagcacaactggctccccacgcaccacacccatcacacccaagacacccacatcacccgcagcatacaccacattccttaccttcccctgaccccgacatcctgtccgtgtcaagctgtcccgctctgtatagaaacgaagaggaagaggaggcgatctacttctcggcagagaaacagtgtattcatttaggtctgggtgcgtgcaagtctgaatag

SEQ ID NO: 242677 - DNA, 2241 bp, synthetic construct
  misc_feature 1..2241: note = Description of Artificial Sequence: Synthetic coding sequence
  source 1..2241: mol_type = other DNA
ctgcttgtcctcggacttctcgtggcaggcgcagcagatgggtgtgagctggttcctaggcatctgcggggacggcgagccactgggtccgcagctactgctgctagttcccccgctgccgctgcgggagattctcccgctcttatgacagacccttgcatgtctttgtctcctccttgtttcacggaagaggaccggttctcactggaagccctccagactattcacaagcagatggacgacgataaagacggtgggattgaggtcgaagagagcgatgagttcattagggaggacatgaaatacaaagatgccaccaataagcattcccacctgcacagagaggacaaacacattaccatagaagacttgtggaagaggtggaagacaagcgaggtccacaattggactttagaagacacactgcagtggttaattgaattcgtggaattgccacagtacgaaaagaattttcgggacaataacgtgaaaggcacgaccctgcctcggatcgctgtccacgaaccatccttcatgatctctcagcttaaaatttcagaccggagccatagacagaaactgcagctgaaagccctggatgtcgtgctgttcggtccgctgacccgacctccccacaactggatgaaggattttattttgaccgtctctattgtaatcggcgtcggcggttgctggtttgcctacactcaaaacaaaacaagtaaagaacacgtggccaagatgatgaaggacttggaatctcttcagactgcagagcaaagcctgatggatctgcaagaaagactggagaaagcacaagaagagaatcgcaacgttgctgtggagaagcagaatctggagcggaaaatgatggacgaaatcaactacgctaaggaggaggcttgtagactccgggagcttcgggagggggctgaatgtgagctcagcaggagacagtacgctgagcaggagctggagcaggtccgcatggcgctgaagaaagcggaaaaggaattcgagctgagatcctcctggagtgttccagacgcactgcaaaaatggttgcaacttactcatgaggtcgaggtgcagtattataatataaagaggcagaatgctgaaatgcagttggccatagctaaggacgaagccgagaaaattaagaaaaagcgaagcacagttttcgggaccctgcatgtagcacacagcagtagcttagatgaggtcgaccacaaaatcctagaggccaaaaaagctctcagcgagctgacaacctgcctaagggagcggctatttcgctggcagcagattgagaaaatatgtggattccaaatcgctcataactcgggactaccttcactcacctcctccctctacagcgatcattcatgggtggtgatgcctagagtcagcatccctccctacccaatcgccggaggggtcgacgatctggatgaggacacccccccaattgtgtcccagtttcccggtacaatggctaagcctcctggatcattggctcgcagctcctccctgtgccggagtcggagatctatcgtgcccagctctcctcaaccccagcgtgcacagcttgccccacacgctccccacccaagtcatccaaggcacccccaccacccccagcacacaccacactccttaccaagtcctgaccctgatatactgtcggtttcctcatgccccgcattatatcgcaacgaagaggaggaggaagcaatctactttagtgcagagaaacagtgggaggtaccagacacagcctctgagtgtgatagtctcaatagtagtattgggagaaaacagagccccccactcagcctcgagatctaccagaccctgtccccccgtaagatatcgcgagacgaggtgagcctggaggattccagccgtggcgattcccccgtgactgtggacgtgtcttggggatcacccgactgtgtcggccttaccgagaccaaatcaatgatattcagcccagcctcaaaggtttacaatggcatcttggagaaatcctgctcaatgaaccagctgtcttccgggatccccgtaccaaagccacggcacacatcttgttcaagcgctggcaatgactctaagcccgtacaggaagccccatctgtggcccgtatttcatctatccctcatgatctgtgccacaatggggaaaagagtaaaaaaccgagcaagatcaagtcgctgttcaagaagaaaagcaagtag

SEQ ID NO: 242678 - DNA, 2265 bp, synthetic construct
  misc_feature 1..2265: note = Description of Artificial Sequence: Synthetic coding sequence
  source 1..2265: mol_type = other DNA
cttctggtactcggtcttctcgttgccggagcagccgatggatgtgagttagtcccaaggcatctaagaggacgccgagcgaccggcagtgcggcaaccgcagcttcatccccagccgcagccgcaggggattccccagccttaatgaccgacccctgcatgtcgttgtctcccccttgctttactgaagaagacaggttcagcctggaggcccttcagactatccacaagcagatggatgatgacaaggacggcggaatagaagtggaggagagcgacgagttcatcagagaagacatgaaatataaggatgcaactaataagcactcacatttacatagagaggacaagcatatcaccatcgaggacctctggaaacggtggaagacgtcagaagtccacaattggacactggaggacactctacagtggcttatcgagttcgtcgagctgccacaatatgagaagaactttcgcgataataacgtgaagggtactacccttccacgaatcgcggttcacgaaccctcctttatgatttcccagctgaagattagcgaccggagtcacaggcagaaactgcagctgaaggccctcgacgttgtcctcttcggtcctctgacaaggcctccccataattggatgaaggatttcattcttactgtgtcaatagtgatcggagtcggtggatgttggttcgcttacacacaaaacaaaacatccaaggagcacgtggcgaaaatgatgaaggacctggaatcgcttcagaccgcggaacagagcttaatggatctgcaggagagactggagaaagcacaggaggagaatcgcaacgtggccgtcgagaagcagaatctggaaaggaaaatgatggacgagatcaattatgccaaagaggaggcctgccgcctccgggagttgagggagggggctgagtgtgagctttcccgcagacagtacgctgagcaagaactggagcaagtaaggatggctctcaaaaaagccgagaaagagtttgagctccgctcttcctggagcgttcctgacgccctccagaaatggctgcagctgactcacgaggtcgaggtccagtactataacatcaagcgacagaacgcagagatgcagttagccatcgcgaaggacgaggtggctgctagttatctgatccaggccgagaagattaagaagaagcggtccactgtttttgggaccctgcatgtggctcacagctcgagccttgacgaagtggaccacaagatccttgaagccaaaaaggcactttccgaactgaccacttgcctgcgtgaacggttattccggtggcagcagattgagaaaatctgtggattccagatcgcgcacaactctgggctacccagtttgacttctagcctatactccgaccactcttgggtggtcatgccacgagttagcatcccgccatatcccattgctgggggtgtcgacgacctggatgaggatacacctcctattgtgtctcagtttcccggtacaatggccaagccacccggttccctggctcgctcatcatctctatgccgctccagacgctctatcgtgccgagctctccacaacctcaaagggctcaattggcacctcacgctccccacccttctcaccctcggcacccacaccacccccagcacactccccactctcttccgtcgcctgatcccgatatcctatctgtgagctcttgccccgctctctatagaaatgaagaggaggaggaggccatctactttagtgcggaaaagcagtgggaagtgcccgacaccgcctccgagtgcgattccttaaatagctctatagggagaaaacagtctccgcctctgtcactggagatctatcagaccttgagtcctcggaagattagccgcgacgaggtgtcactggaagacagcagtaggggggattctccagttacggttgatgttagttgggggtccccagattgcgtgggactgaccgaaactaagagcatgatattttctcctgcaagtaaggtgtacaatggaatcctggagaagtcatgctcaatgaatcagcttagttccggcattcccgttccaaagccaaggcatacttcatgctcttctgctgggaacgatagtaaaccagtgcaggaagcacccagtgtggccagaattagcagcataccacacgacctgtgtcacaacggcgagaaaagcaaaaagccctctaaaattaagtctctctttaaaaagaaatccaagtag

SEQ ID NO: 242679 - DNA, 1800 bp, synthetic construct
  misc_feature 1..1800: note = Description of Artificial Sequence: Synthetic coding sequence
  source 1..1800: mol_type = other DNA
ttactagtgctaggcttactggtggcaggagcggctgatgggtgcgagctggtgcctcgccacctcaggggcagaagggccaccggcagcgctgccactgctgctagctccccagccgctgccgcaggcgactctccagcccttatgacggatccatgtatgtcattatcacctccatgctttacagaagaggaccgattctctcttgaggctctccagaccattcataagcagatggatgacgacaaggatggtgggatcgaggttgaggaatccgatgagtttatccgggaggacatgaagtacaaggatgccacaaataaacattctcacctgcatcgagaagacaagcatattaccattgaggacttgtggaagaggtggaagacttccgaggttcacaactggacacttgaggatactctgcagtggctcattgaattcgtcgaattaccccagtatgagaaaaattttagagataacaacgtcaaaggtaccacccttcctcgaattgcagtccacgaacccagcttcatgattagccagctaaagatctcagatcgtagccaccggcaaaagctgcagctgaaagccctggacgtggtactcttcggccctctgacaagacctccacataactggatgaaagattttatccttacagtttctattgtgatcggcgttggaggttgctggtttgcttacacgcagaacaaaacatctaaggagcatgtggccaaaatgatgaaagatctggaatctctccagaccgctgagcagtcactcatggatcttcaagagcgtctcgaaaaagcccaggaggaaaatcggaacgtcgccgttgaaaaacagaatcttgaaaggaagatgatggatgagatcaattatgctaaagaggaagcttgccgactgcgggaactaagagagggtgccgagtgtgagctcagcagacgccagtacgcagaacaggagctggaacaggtccgcatggcattgaagaaggcagagaaggaattcgaactgagatctagttggtcagtgcctgacgccctacagaaatggctgcagttaactcacgaagtcgaggtgcagtattataatatcaaacgtcagaatgcagagatgcagctggctattgctaaggatgaagcagaaaagattaaaaaaaagcgcagtactgtttttggcactctccacgtcgcacacagctcaagtctggatgaagttgaccataaaatcctggaggccaaaaaggcgctgtctgagctgacgacgtgcttgagggaaaggttgttccgctggcagcagatcgaaaaaatatgcggattccaaattgcccacaattctggtctccctagcctgaccagtagcttatattcagaccacagctgggtcgtgatgcccagggtttctatccctccgtaccctatcgccggaggggtcgatgacttagatgaagacaccccacccatcgttagccaatttcctggaactatggccaaaccccctgggagcctcgcgaggtcctcatcactctgtaggtcccgtagatcaattgtcccttcatcaccccaaccgcaacgcgctcagctcgcacctcatgctccccaccccagtcacccacgccacccccaccacccgcagcatacaccccactctctgccaagccctgatccagatatcctctcagtatctagttgtccagccctctatcgtaatgaggaagaagaagaagccatctatttctctgccgaaaaacagtgcattcacctgggcctaggagcttgtaaatctgagtag

SEQ ID NO: 242680 - DNA, 3654 bp, synthetic construct
  misc_feature 1..3654: note = Description of Artificial Sequence: Synthetic coding sequence
  source 1..3654: mol_type = other DNA
atgtacatcaagcaagttatcattcaaggcttcaggtcatatcgggaccagacaatcgtggacccttttagctccaagcacaacgtcattgtgggaagaaatggaagcggcaagagtaactttttctacgcaattcagtttgtactgtccgacgaattcagtcaccttcgtcccgaacagaggcttgccctactgcacgaaggaacaggccctcgcgtgatctccgcttttgtggaaatcatattcgacaactctgacaataggctgcccattgacaaggaagaggtctccctgaggcgagtgatcggcgcaaagaaagatcagtatttccttgataagaaaatggttactaaaaacgacgtcatgaacctgctagagtcagccggtttctcgcgctccaacccttattacattgtcaaacagggaaaaatcaatcagatggctaccgctcccgattcacagcggctcaagttgcttagagaggtggccggaactcgtgtgtacgacgaacggaaggaagaaagcatcagcctcatgaaagaaaccgagggcaaacgtgagaagattaacgaactcctcaaatacatcgaggaacgccttcatacactagaggaggaaaaagaggagctggcgcaataccaaaaatgggataaaatgagacgcgcattggagtatacgatatataaccaggagctcaacgagaccagggccaagctggatgagctgtccgccaaacgcgaaactagtggtgaaaagtccagacagctgagggacgcccaacaggatgcgagagacaaaatggaggacatcgagaggcaagttagagagttaaaaaccaagataagcgccatgaaagaagagaaagaacagctgtcggcagagagacaggaacagattaagcagaggactaaactggagctgaaggctaaggatctccaggatgagctagctggaaattcagagcagaggaaaagactgctcaaagagaggcagaaacttctagagaaaatcgaagagaagcagaaggagcttgctgaaaccgagcctaagtttaacagtgtcaaagaaaaagaagagcggggtattgccagactcgcacaggctacccaggagcggacagatctttacgccaagcagggcagaggctcccagttcacttctaaggaagaaagagacaagtggatcaagaaagaactgaagtctcttgaccaagccattaacgacaaaaaacgtcagatagccgcaatccacaaagatttggaagataccgaagccaacaaagagaagaacctggaacaatacaacaagctggaccaggatttgaacgaggtaaaggctagggtcgaggaattggacagaaagtattatgaggtgaaaaataagaaggatgagctgcagtccgaaagaaattatttatggcgcgaggaaaacgccgagcaacaagccctagccgcaaaaagggaggacctggagaagaaacagcagctgttgagggcagctacaggcaaggcgattctgaatggaatcgactcaatcaataaggtacttgatcattttagaagaaaaggaattaaccagcacgtacaaaacggctatcacggaatagttatgaataatttcgagtgtgaacccgctttctatacatgtgtcgaagtgacagccggaaacagactgttttatcacattgtggatagtgatgaagtgtctaccaaaatcctgatggagttcaataagatgaatctgcccggagaggtgacctttctccccctgaacaagcttgacgtcagggacacggcctatcctgaaaccaacgacgctatccccatgatctccaagctcaggtacaatcctcgctttgacaaagccttcaaacatgtgttcgggaaaactttgatttgcaggagtatggaggtgtcaacccagctggcccgtgctttcacgatggactgcattacattggaaggtgaccaggtcagtcataggggggcactgacaggaggatactacgacacaagaaaatccagactggaactgcaaaaggacgtgaggaaggctgaggaggagcttggagagctggaggccaagttgaacgagaacctgcgcagaaacattgaacgcatcaacaacgagatagatcagctgatgaatcaaatgcaacagatcgaaacacaacagaggaaattcaaagcttcccgggactccattctttcggagatgaaaatgttgaaggaaaagcggcaacagtctgagaaaaccttcatgccaaagcagagaagcttacagtcactagaagcatcattgcacgccatggaaagtactcgagagtccttgaaggccgagctgggcaccgatttattgtcacagctttctctggaggatcaaaagagggtggacgccttgaatgacgaaattcgtcagcttcagcaggagaatcgtcagctgctgaacgaacggataaagttggagggtataatcactagagtcgaaacctacctgaacgagaacctccgcaagcgcctcgatcaagtggagcaggagctgaacgaactgagggaaactgagggaggcaccgtgctcaccgccacaaccagcgaactggaggcgatcaacaaacgcgtgaaagataccatggcaagaagcgaggatctagataattctatcgacaagacggaggccggaatcaaggagttacaaaagtcgatggagcggtggaagaacatggagaaggagcacatggatgctatcaatcacgatactaaggaactggaaaagatgacaaaccgccaaggtatgttactcaaaaagaaagaggagtgcatgaaaaagatcagggaactcggatccctgccgcaggaagcctttgaaaagtatcagacgctatctctgaaacagctgttccgtaagctcgagcaatgtaatactgagttgaagaagtacagccatgtgaacaagaaggcactagaccagttcgtgaactttagcgagcagaaggagaagttgataaagaggcaggaggagctcgatcgtggatataagtctatcatggaactcatgaatgtcttagagctccggaagtacgaggctattcaacttaccttcaaacaagtctcaaagaatttttccgaggtgttccagaagcttgtacctggagggaaggcgacgctagtgatgaaaaagggcgatgtggagggctcccaaagtcaggatgagggggagggctctggagagtcagaaagagggagcggctctcagagctcagtgccttccgttgaccagttcacaggtgtcggcattcgagtgtcctttacgggcaaacagggtgagatgcgggagatgcaacagctctcaggcggacaaaagtctctggtcgctctcgctctgatcttcgcaatccaaaaatgtgatcccgcacctttctacctttttgacgaaatcgaccaggccctcgacgcccaacatcgaaaagcggtgagcgatatgatcatggaactcgccgttcatgctcagtttatcaccaccacttttcggccagagctattggaaagcgcagacaaattctacggcgtgaaatttaggaacaaggttagtcacatcgatgtcatcacggctgagatggccaaggacttcgtggaagacgacaccactcatgggtag

SEQ ID NO: 242681 - DNA, 3306 bp, synthetic construct
  misc_feature 1..3306: note = Description of Artificial Sequence: Synthetic coding sequence
  source 1..3306: mol_type = other DNA
atggcaactccatcaaagaaaacgagcactccatcgccacagccatcaaagcgagcgctaccgagggatccaagctcggaagtgcccagtaagaggaaaaactcagcccctcagctcccactccttcagtccagcggccctttcgtggaggggtctatagttaggattagcatggagaactttctgacctatgacatctgcgaggtaagtccaggccctcacctgaatatgatcgtgggagccaatggaacgggaaagtcatcaatcgtgtgcgcgatttgtctgggactggcaggcaagccggcatttatgggcagagccgataaggtagggttctttgttaagcgaggctgcagcagagggatggtggagatcgaactctttagagcaagcgggaatctggtcattacacgcgaaatcgatgtcgcaaagaatcagagtttttggttcatcaataagaagtcaacaacacagaaaattgttgaggagaaggttgcagcattgaacatccaagtcggtaatctgtgtcagtttcttccacaagacaaggtgggagagtttgcaaagctaagtaagatcgagttactggaagcaaccgagaagtcaatagggccaccggaaatgcacaagtatcattgcgagctcaagaacctgcgggaaaaggagaaacagctggagaccagttgcaaggagaagaccgaatatcttcagaagatggtgcagaggaatgagaggtacaagcaggatgtggaacgattctacgagcggaagcgtcaccttgacctgatcgagatgttggaggctaagcggccttgggtggagtacgagaatgtgcgacaggagtacgaagaagtcaagcttgtgcgagatagagtcaaggaggaggtgaggaaactgaaagaaggccaaattcctgttacctgcagaatcgaggagatggagaatgagaggcacaatttagaggccaggatcaaagagaaagctactgatatcaaagaggcgtcacagaagtgcaagcagaagcaggatgtaatcgagcgcaaagataaacacattgaggagctgcagcaagcgttgattgtcaagcagaatgaagagctggatagacagcgacggatcggcaacactcggaagatgatcgaggatctgcagaacgagctgaaaacaactgagaattgcgagaacctccagccgcagattgatgctatcactaatgacctacgcaggatccaggatgagaaggccttgtgcgagggggaaattatcgacaagaggagagagagagagactctggagaaagagaagaaatcagtggatgaccatatcgttcggttcgataacctgatgaaccagaaagaagacaagctgcgccagagattcagggatacctatgatgctgtcctctggctccggaacaacagggataagtttaaacagagggtttgtgagccaatcatgctgaccatcaacatgaaggacaacaaaaatgcgaaatatatcgaaaaccatatacccagcaacgacctccgagcttttgtctttgagagccaagaagatatggaggtttttcttaaggaggtgagggataacaagaaactaagggtgaatgctgtcattgccccaaagtcctcgtacgctgacaaggctccctcccgttccctcaacgagcttaagcagtatggattttttagctatcttagggaattgtttgacgcaccagacccagttatgtcgtacctctgctgtcagtatcatatccatgaagtccctgtgggcacagagaagacacgcgagagaatagaaagggtcattcaggaaacacgcctgaagcaaatttacacagctgaggaaaaatacgttgtgaagaccagcttttatagcaataaagtgatctctagcaatactagcctgaaagtagcccagtttctcacagtcactgtcgatctggaacagcgcagacacctagaagaacagctcaaagaaatccaccgaaaactccaggctgtggatagcggcctgatcgctctccgggagacaagtaagcacctagaacacaaagataatgaattgcgccagaagaaaaaggaactgctcgaaagaaaaacaaaaaagaggcagcttgaacagaagatatctagtaagttgggttctcttaagctgatggagcaggacacctgtaacctcgaggaggaggaaagaaaagcttctacaaagattaaagaaattaatgtccagaaggccaaactggtgaccgaactaacaaatttgatcaagatttgcacaagcctccacatccagaaggtagatcttatcctgcagaacacaacagtcatcagcgaaaaaaacaagttggaaagcgattacatggctgcaagctcccagttgagactgaccgagcagcattttattgaactggatgagaatagacaacgactgctgcagaaatgtaaagagctgatgaaacgagctaggcaggtgtgcaaccttggtgctgagcagactctgccacaggagtaccagacccaggtacctacaatccccaatgggcataattcctctctccctatggttttccaggacctgccaaacactttagacgaaattgacgcactgctgactgaagaacggtcgagggcctcctgctttaccgggctcaaccctaccatcgtgcaagagtatactaaaagagaggaagaaattgaacaactgactgaagagttgaagggaaaaaaggtggagctagatcaataccgcgagaacatttcgcaggttaaggaacggtggcttaatcctctcaaggagcttgtcgagaagatcaacgaaaagttctccaattttttttcttctatgcagtgcgcaggagaagtggatcttcacaccgaaaacgaggaagactacgacaagtacggcatccgcatccgggtcaagttccgctcatctacccaactgcacgaactgaccccacaccaccagtccgggggagaaagatccgtcagcacaatgctgtacctgatggcccttcaggagttgaacaggtgcccatttcgagtcgtagacgaaatcaatcaaggaatggatccaattaacgagaggcgagtgttcgagatggtggtcaatactgcctgtaaggagaacaccagtcagtacttttttataacacccaagctgctgcagaatcttccatactctgagaaaatgacagtgctgtttgtctacaacgggccacatatgcttgagccaaacacttggaatcttaaggccttccagcgcagacggaggcgcatcacattcacacaaccgtcctag

SEQ ID NO: 242682 - DNA, 3276 bp, synthetic construct
  misc_feature 1..3276: note = Description of Artificial Sequence: Synthetic coding sequence
  source 1..3276: mol_type = other DNA
atggccaagcgaaaagaagagaatttttcatctccgaaaaacgcaaaacggcctaggcaggaggagctcgaggactttgacaaggacggtgatgaagacgagtgcaagggcactaccttgaccgcggcagaggtgggcatcatcgaaagcatccacctgaagaattttatgtgtcacagcatgctcgggcctttcaagtttggatctaacgtgaactttgtggtagggaacaacggtagcgggaagtcagccgtgttaactgcactgattgtgggactcggaggaagggcagttgccacaaaccggggatcctcactaaaaggtttcgttaaagacggacagaatagtgccgacatctccatcaccttgaggaatcgtggtgatgatgcctttaaagcgtccgtatacggcaactccatactgattcagcagcacatatctatagatggttcgcgttcttataaactcaaaagtgccacaggatccgtcgtgtccactcggaaggaggagctgatcgcgatcctggatcacttcaacatccaggtggacaatccggtgtctgtccttacccaggaaatgtccaagcagtttttacaaagcaaaaacgagggtgacaagtacaaattttttatgaaagcaacacagctggagcaaatgaaggaggattatagctacattatggagactaaggaacggacaaaagagcagattcaccaaggtgaggaacgactcacagaactgaaacggcagtgtgtggagaaggaagagaggttccagagcattgctggtctctcaacgatgaaaaccaatctggaatccctaaagcacgaaatggcgtgggccgtggtgaatgaaattgagaagcaacttaatgccattagagataacatcaagattggagaggacagagcagcccgactggaccggaagatggaggagcaacaggtgcgactgaatgaagcagaacagaaatataaagatattcaggacaagctggaaaaaatttccgaggagactaatgctcgggcacctgaatgtatggccttgaaggccgacgtggtagccaaaaagcgtgcctataatgaggctgaggtgctttacaacagaagcctaaatgaatacaaggccttaaaaaaggacgatgaacagctgtgtaaacggatcgaggagcttaaaaagagcacagatcagtccttagagcccgaacggctggaaaggcagaagaagatctcgtggctcaaagagcgggtgaaggcattccaaaatcaagagaattctgtcaaccaagaaatcgagcaatttcagcaggcgatcgaaaaagacaaggaagagcacgggaagatcaaacgcgaggaactagacgtcaagcatgccctgagctataaccagaggcagctgaaggagttaaaggactcaaaaaccgacagactcaagcgctttggcccaaacgtcccggcactcctggaggcaatcgacgatgcctataggcagggccactttacatataagccggttggaccactcggggcttgtatccatttaagagatccagaactggcattggccattgaaagctgtctgaagggcctcttacaggcttattgttgtcacaatcatgctgacgaaagagttctgcaggccctgatgaagaggttctatctgcccggtaccagtcgtcccccaatcatcgttagcgaatttcgaaatgaaatttacgatgtgagacatcgggcagcctatcacccagactttcctacagtcttaactgccctggagatcgacaacgctgtcgtggccaactccctgattgacatgcgtgggatcgagaccgtgctgttgattaaaaataatagcgtggccagggccgtcatgcagtctcagaaaccccctaagaattgcagagaggcctttactgctgacggagaccaggtatttgctggcagatattactctagcgaaaacacccgccctaaattcctctcccgcgatgtcgattccgagatatctgatctggagaatgaagtggagaacaaaaccgctcagatacttaatttacagcagcacctcagtgccctcgagaaagatattaaacacaacgaagagctcctgaaacggtgtcagcttcattataaggagttgaagatgaaaattcggaagaatattagtgagatacgagagctggagaatatcgaggagcaccagagcgtggatatcgcaacacttgaagatgaggctcaggagaacaagtctaaaatgaagatggtggaggagcatatggagcagcaaaaggagaacatggaacatcttaaaagcctaaagattgaggcagaaaataagtacgatgctataaaatttaagattaatcaactgagcgaactcgccgaccctttaaaggatgagcttaacttggccgattctgaggttgacaatcaaaaacggggtaagcggcactacgaggagaagcagaaagaacatctcgacacgttgaataagaagaagagagagttggatatgaaggaaaaggaactggaagaaaaaatgtcacaagcaaggcagatctgccctgaacggattgaagtggaaaaaagtgcaagcattctggacaaggaaatcaaccgactccggcagaagattcaggcagaacatgcaagccacggtgatagggaagagattatgcgacaataccaggaagcccgtgaaacctacttggatctggacagcaaagtcaggacactcaaaaagttcattaagctcctgggtgaaattatggaacatcgcttcaagacatatcaacagttcaggaggtgtcttacattgagatgtaagctgtactttgacaatctgttgtcacagcgcgcatactgtggcaagatgaacttcgaccacaagaatgagaccttgtccatttcggtccagcctggagaaggcaacaaggcagcatttaatgacatgagggcattgagcgggggagagaggagtttcagcaccgtctgttttattctgagcttgtggtcaatcgcagaatcccctttccgatgcttggacgaattcgacgtttatatggatatggtgaaccggcgaatcgctatggatctgattctgaagatggccgattctcagcgatttaggcagtttatcctgctgactcctcagtctatgagcagtctaccctcgtctaaactcataagaatactcagaatgtcagatcccgagaggggccagacaacactgcctttcagacctgttacacaggaggaagatgacgatcagaggtag

SEQ ID NO: 242683 - DNA, 3354 bp, synthetic construct
  misc_feature 1..3354: note = Description of Artificial Sequence: Synthetic coding sequence
  source 1..3354: mol_type = other DNA
atggctaagaggaaagaggaaaatttctcaagccccaaaaatgccaaacgaccaagacaggaggaactcgaagacttcgacaaggacggtgacgaggacgagtgcaagggcacaaccctgacggcagcggaggtggggatcattgaatccatccacctgaagaactttatgtgccattctatgctgggccctttcaagttcggttctaacgtgaacttcgtcgtcggtaataatggctcgtggagcgcagtggttaggtccaggctcaatgcaacttcagcaagccaggtgcaggcaatccttctctttcaaccatgcggaaagtccgcagtcttgactgcactgatcgttggcctcggcggacgcgctgtggcaaccaatcgcggaagttcactcaaaggctttgttaaggacgggcagaacagtgccgacattagtattacgctcagaaaccgcggtgacgacgctttcaaggcttccgtttatgggaatagtattctcatccagcagcacatctctatcgacggctcccggtcctacaagttgaagtctgccactggctctgtcgtctcaactcggaaggaggagctgattgctatcttagaccacttcaatatacaggttgataatcccgttagtgtcctgacccaagaaatgtctaaacagtttttgcagagtaagaacgagggagataagtacaagttctttatgaaagctacgcaactcgagcagatgaaagaagattattcgtatattatggagacaaaagagcggacaaaggaacagatccaccaaggagaggagagactgacagagctgaagcgccaatgcgtagaaaaggaggagaggtttcagtccatcgctggcttaagcacaatgaagaccaaccttgaaagcctgaaacatgagatggcgtgggccgtagtcaacgagatagaaaagcagctgaacgctattagagacaatattaaaatcggcgaggaccgggctgctcgccttgataggaagatggaagagcagcaagtgaggcttaatgaagccgaacagaagtacaaggacatacaggacaaattggaaaagatctcagaagagaccaacgctcgtgcccctgagtgcatggccctgaaggcagacgtggtcgccaagaagagagcctataatgaggccgaggttctgtataacaggtcgctgaacgagtacaaggctctaaaaaaagacgacgagcagctctgtaaaagaattgaggagctcaaaaagtctaccgatcaaagtttggagccagaacgactggaacgtcagaagaagatatcctggttgaaggaacgagtaaaggcgttccaaaatcaggagaatagcgttaaccaggaaattgaacagtttcagcaggctattgaaaaagataaggaggaacatggtaaaatcaaacgagaggagttagacgtgaagcacgccttatcatacaaccagagacagctcaaagagctcaaagatagcaagacagacaggttgaaaaggttcggaccaaacgtcccagcccttttagaggccatcgatgacgcttaccgtcagggccacttcacttacaaacccgttggtcctttgggggcttgtatccaccttcgcgaccccgagctggctctggcgatcgaatcctgcctgaaggggttgctacaggcatactgttgtcataaccatgccgacgagagagtattgcaggccctcatgaaacgtttctacctccccggtacgagtagaccccctatcattgtaagtgagttcaggaacgagatttacgatgtgcggcatcgagccgcttatcatccagatttccctaccgtgctgacagctttagaaatcgacaacgctgtagtggcaaattcgctgatcgatatgagggggatagagaccgtgcttttaataaagaataattccgtggctcgagctgtaatgcaaagccagaagccacccaagaactgtagggaagcattcacagcagatggggaccaagtgtttgccggaaggtactactccagtgagaacacaagacccaaattcttaagcagagacgtagattcggaaatctcggacctggagaatgaagttgagaataagacagctcaaatccttaacctccagcaacacctttcagcactggagaaagacatcaaacacaacgaagagcttcttaagcggtgccaattgcattataaagaactgaagatgaagatcaggaaaaatatctctgaaatcagagagttggagaacattgaagaacaccagtccgttgatatcgccacactcgaagacgaagcccaagaaaataaatctaagatgaagatggtggaggaacacatggagcagcagaaggaaaacatggaacatctgaagtccctaaagatagaggcggaaaacaagtatgacgcaatcaaattcaagattaaccagctgtcagaattagcagatcctctcaaggacgaactgaacctggcagacagtgaggtggataatcaaaagcgtggcaagcgccactatgaggagaaacaaaaagagcacttggacacacttaacaaaaagaaacgcgaactagatatgaaggagaaagagctggaggagaaaatgagccaagctcgccagatatgcccggagcggatagaagtcgaaaagtctgcctccatcctggacaaggaaatcaatagacttcggcagaaaattcaggcagagcacgccagtcatggggatcgcgaagaaatcatgcggcagtaccaggaggcccgagaaacttacctcgatctggactctaaggtcaggactctgaagaaattcataaagctcctgggagaaatcatggagcatcgcttcaaaacctaccaacagttccggaggtgcctcactctaagatgcaaattgtatttcgataacctgctctcccagcgcgcatattgcggcaaaatgaacttcgatcataagaacgagacactcagcatctctgtccagcccggtgagggcaataaagccgcttttaatgacatgcgtgcactgtctggcggtgaaagatccttcagcacagtttgtttcatactgagcctgtggagcattgccgaatccccttttcggtgtctggatgaatttgacgtttacatggatatggtcaataggaggatcgctatggacctcatcctaaagatggcagactctcagcgatttcgccaattcatactgcttaccccgcagtctatgagctctcttccaagtagcaagcttattcggatccttcggatgtcggatccagagagagggcagactactctcccctttcggcctgtgacacaggaagaggatgacgaccagaggtag

SEQ ID NO: 242684 - DNA, 3276 bp, synthetic construct
  misc_feature 1..3276: note = Description of Artificial Sequence: Synthetic coding sequence
  source 1..3276: mol_type = other DNA
atggctaaacgcaaagaagagaatttttccagccctaaaaatgccaagcgtccacgccaggaggaattggaggacttcgataaggacggtgatgaagatgagtgtaaagggactacgctcaccgcagcagaagtggggatcatcgagtctattcacctcaaaaactttatgtgccactctatgctcggaccctttaaattcggatcaaacgtcaacttcgtggttggaaataatggcagtgggaaatccgccgtactgaccgcccttattgtgggattagggggacgtgcagttgctaccaacagaggttcttcattgaagggttttgtgaaggacggccaaaactctgctgatatcagcatcactctcaggaatagaggcgatgatgctttcaaggcttcagtctatggaaacagcatcctgatccagcagcatatcagtattgacggatctcgttcttacaagctaaaaagcgccacaggaagcgtcgtctcaacgaggaaagaggaacttatcgcaattttagaccatttcaacatccaggtggacaaccccgtctcagtcttgactcaagagatgtccaagcagttccttcaatcaaaaaatgagggggataagtacaaattttttatgaaggcaacccagctggagcagatgaaggaggactactcctatattatggaaacaaaggaaagaactaaagaacagatccatcagggcgaggagcgcctcaccgagctgaagcggcagtgcgtagagaaggaggagcggtttcagtcaattgcaggcctgagtactatgaaaaccaacttagaatctctgaaacacgagatggcatgggcggtggtgaatgaaatagagaagcagctgaatgctatcagagacaacatcaaaattggcgaggatcgcgcagctaggctagatcgtaaaatggaggagcagcaggtacgactcaacgaggccgagcaaaagtataaggacatacaagacaagctggagaagatttcagaggagaccaatgcccgagccccagagtgcatggccctaaaggccgacgtggtggctaagaagcgagcctacaacgaagcagaggtactgtacaataggtcgctgaacgagtacaaggcactgaaaaaggacgacgagcagctctgcaagagaatagaagagttaaaaaagtctaccgatcagagcctcgagcctgagcgcttggaacggcagaaaaagatatcttggttaaaagagcgggtgaaggccttccaaaaccaggagaattccgttaatcaggaaatcgagcagttccagcaagccatcgaaaaggacaaggaggagcacgggaagatcaagagggaggagttggatgtcaagcatgcactttcatacaaccagcggcagctcaaggagctgaaggatagtaaaactgatcgactcaaacgctttggccctaatgtgcccgcactcttggaagcaattgatgatgcatacaggcagggccattttacttataagcctgtgggacccctcggcgcatgcattcatttgcgggaccctgagttggcattggctatcgaaagctgcctgaagggccttctgcaggcttattgctgtcacaatcatgccgacgagagagtcctgcaagcattgatgaagaggttctacttacctggtacctctagacctccaataatcgtttctgagtttaggaacgaaatatacgatgtccgacatcgggctgcctaccatccggactttcccacagttctgaccgcactggaaattgacaacgcagtggtggcaaacagtctgattgacatgagagggattgagacagttttgctgatcaaaaacaactcagtggccagggctgtcatgcagtcccagaaacctcctaagaattgccgggaagcatttacagccgatggtgatcaagtttttgccggacggtattactcctccgagaatacccggccaaaattcttgtcaagagatgtggattcggagataagtgatctggagaatgaggttgaaaataagacagcccagatcctgaatctccagcagcatctgtctgcccttgaaaaagatatcaagcataatgaagaattgctgaaacggtgccagctgcattataaggaactaaagatgaaaataagaaagaatatcagtgaaattcgggaattagaaaatattgaggagcaccagtcagtcgacattgcaaccctcgaggatgaagctcaggaaaataagagcaagatgaagatggtagaagaacacatggaacaacaaaaggagaacatggagcacctgaagagcttgaaaattgaagcagaaaacaagtacgatgctattaagttcaagattaatcagctgtctgaactggcagaccctttgaaagatgagttaaatctagccgactccgaggtcgataaccaaaaaagagggaagcggcactacgaggagaaacagaaagaacacctggatacactcaataagaaaaagcgcgagctggatatgaaagagaaggaactggaagaaaagatgtcccaggctcggcagatctgtccagaaaggatagaggtcgaaaagagcgctagtattttggacaaggagatcaataggctgaggcagaagatccaagctgaacacgcatcccatggcgatcgggaggaaattatgaggcagtaccaagaggccagagagacttacctcgatctggatagcaaagtgcgaactctgaaaaaattcataaagttgctgggtgagatcatggaacataggttcaagacgtatcagcagtttcgcagatgccttactttacggtgcaaactatacttcgataatctgctgtctcagagggcttattgtggcaagatgaacttcgaccacaaaaatgaaacactgagtatttcagtgcagcccggagaagggaataaggcagctttcaatgatatgcgcgcactaagtggcggagaacggtccttctcaacagtgtgcttcattctatcactgtggtccatcgccgaatctccattccggtgcctggatgagtttgacgtctacatggacatggttaatagaaggatagctatggacctgatcctgaaaatggcggactcgcagcggtttcgacaattcattctactgactccccagagtatgtctagtctcccaagcagtaagcttatcagaatacttcgcatgagtgatcctgagcgtggtcaaacgaccctgccatttagaccggtcacacaggaggaggacgacgatcagaggtag

SEQ ID NO: 242685 - DNA, 174 bp, synthetic construct
  misc_feature 1..174: note = Description of Artificial Sequence: Synthetic coding sequence
  source 1..174: mol_type = other DNA
atggctaaacggaaggaagagaatttctcaagcccgaagaacgccaaaaggccgcgtcaggaggagttggaggatttcgataaagatggcgacgaggatgaatgcaaggggaccactctcactgctgctgaggttgggattatcgaatcaatccatctaaagaattttatgtag

SEQ ID NO: 242686 - DNA, 3276 bp, synthetic construct
  misc_feature 1..3276: note = Description of Artificial Sequence: Synthetic coding sequence
  source 1..3276: mol_type = other DNA
atggccaagaggaaggaggagaatttcagctcacctaagaacgctaagcgcccacggcaggaagaactcgaggattttgataaagacggagacgaggatgaatgtaagggaacaacactcaccgctgctgaggtaggcataattgagtctatccaccttaagaatttcatgtgccactcaatgttaggtccttttaaattcggctctaatgtaaactttgtcgtgggcaataacggtagtggaaagtccgcggtactgacagcacttatcgtggggcttggcggtagggctgtcgctactaaccgtggttccagcctcaaagggtttgtgaaggacgggcagaacagcgccgacatttccattaccttacgcaatcggggtgacgatgccttcaaggccagcgtctatggaaatagcatcctcatacagcaacacataagcattgacggtagccgcagttataagctgaagtccgctacaggcagcgtggtgagtacaaggaaggaggaactgatcgctatattagaccatttcaatatccaggtggacaaccctgtgtctgtcctgacacaggagatgtctaaacaatttctccagagcaagaacgagggcgataaatacaaattctttatgaaggcaacccagctggagcaaatgaaggaggattactcatatatcatggagacaaaggagcggaccaaggaacaaattcatcagggcgaggaacggctaacggaactgaagaggcaatgtgtggagaaggaggagcggtttcaatccatcgccggactgtccactatgaaaactaatcttgagtctctgaagcatgagatggcctgggcggtggtgaacgagatcgaaaagcagctgaacgccatccgtgacaatatcaaaataggcgaggaccgcgctgctagactggacagaaagatggaggaacagcaggttagactcaatgaggcggaacagaagtacaaagatatacaggacaagctagaaaaaatttctgaagaaacaaacgcgagagctccggaatgcatggccctcaaagccgatgtggtggccaaaaagcgtgcctataacgaggctgaggtcctgtacaatcgcagcttaaacgaatacaaggctctcaagaaggatgatgaacaattgtgtaaaagaatcgaggaacttaagaaatctactgaccagagcctcgagccggaacgcctggaacgccagaaaaaaatcagttggctcaaagagagggttaaggcgttccagaaccaggagaattccgtgaaccaggagatcgagcagttccagcaggcaattgaaaaggacaaggaagaacacgggaaaattaagcgagaggaactggacgtgaaacacgccctgtcttacaaccagaggcagctgaaagagctcaaggatagcaagactgataggctcaagcgattcggacctaatgtccctgctcttctggaagccatagatgatgcctaccgtcaaggtcacttcacttacaagcccgtgggaccactcggtgcctgtattcacctgcgagatcccgagctcgcactagctattgagtcatgcctaaagggcctgctgcaggcgtactgttgccataaccatgctgatgaaagagttttgcaggccctgatgaagcgtttttatctgcccggaacatcacgtccgcctatcatcgtctctgaatttcggaacgaaatctacgacgtaagacaccgagcagcatatcaccctgacttccccaccgttctgactgccttagagatcgataacgctgtggtagcgaattccctaattgatatgcggggaatcgagaccgtcttgctaatcaagaacaatagcgtcgctagggcggtgatgcagtcacagaaaccccctaagaactgccgggaggcctttacggcggatggagaccaagtattcgccggtcgctactactcttccgaaaatacccggcctaagttcctctcgcgggacgtggattcagagatttcagacttggaaaacgaagtcgagaataagactgctcagatcctgaatcttcaacaacatttaagcgccctagaaaaggacatcaagcacaatgaggaattgcttaaaaggtgtcagctccattacaaagaactcaaaatgaaaattcgcaaaaatatatccgagatccgcgagttagaaaacatagaggaacatcaatcagttgatatcgcaactttagaggacgaagctcaagaaaacaaaagtaagatgaagatggtggaggaacatatggaacaacagaaagaaaacatggagcatctgaagagtctcaagatcgaagctgaaaataagtatgacgccataaaatttaagattaaccaactgtccgaactggctgaccctttaaaagatgagctgaacctggccgactcggaagttgacaatcagaaacggggaaagcggcactacgaggaaaagcagaaagaacatctggacacactaaataaaaagaaaagggaacttgatatgaaagagaaagaattagaagaaaaaatgtcacaggcaaggcaaatttgtcctgaaagaatcgaagtcgagaagagcgcgtccattctggacaaagaaattaaccggttgagacagaaaattcaggccgaacatgccagtcacggagaccgggaggagataatgagacaataccaggaagcccgagagacatatctggatctcgacagcaaagtgagaacattaaaaaaattcataaagctgctcggagagatcatggaacaccgatttaagacatatcaacagtttaggagatgcctcacccttagatgcaaactttatttcgataacctgctcagtcagagggcatactgtggcaaaatgaactttgaccacaagaacgaaacactctctatttcggtacaacctggcgaggggaataaggccgcattcaatgatatgcgggcattgagcggcggagagcggagtttcagtacagtctgcttcattcttagtctgtggtccattgccgaaagcccctttcggtgcctagatgagttcgacgtttacatggatatggtgaataggcgcatcgctatggatcttatcttgaagatggctgattcacagagatttcggcagtttatcctcctcactcctcagtcaatgagctctctcccctccagcaagctgatccgtatcctgaggatgtcagacccggagagaggacagactaccctgcctttccgccctgtgacacaggaggaggatgacgatcagaggtag

SEQ ID NO: 242687 - DNA, 2130 bp, synthetic construct
  misc_feature 1..2130: note = Description of Artificial Sequence: Synthetic coding sequence
  source 1..2130: mol_type = other DNA
atggctgagacactggagtttaatgatgtataccaagaggtcaaagggtctatgaacgatggcagactacggttgagccgccaaggcattatcttcaagaactctaagacagggaaggtggataatattcaagccggtgaactgacagaaggcatctggcgacgtgtggccctcgggcacgggcttaagctcctaacaaagaacgggcacgtgtataaatacgatggcttcagagaatcggagtttgaaaaattgagcgacttcttcaagacacactatcggttggaacttatggaaaaagacttgtgtgtgaaggggtggaattggggaaccgtcaaattcggcggacagttactgtccttcgacatcggggaccagcccgtgttcgagatacctttatctaacgtctcacagtgtaccaccggaaaaaacgaggtgactcttgaattccatcagaacgatgacgccgaggtgtctcttatggaagtgcggttttatgtgccccctacgcaagaggatggtgttgatccggtagaggccttcgcccaaaacgtcttgtctaaggcagacgtaatccaggccaccggcgatgcaatttgtatcttccgcgagctacagtgcttgactcccaggggacgctatgacatacgaatctacccaacatttctccacttacacggtaagaccttcgactacaagataccgtacactacagtgctgcgcctgtttctcctgccacataaagaccagcgtcagatgttctttgtaatttctttagaccccccaatcaaacaggggcagacccggtaccacttcttaatcctcctcttcagcaaggacgaggacatctctctcaccttgaacatgaatgaagaagaggtcgaaaagcggtttgaagggaggctgactaagaatatgtctggctctctgtatgagatggtttcacgagtgatgaaagcattggtcaatcgtaagattaccgttcctggaaattttcagggtcactcaggcgctcaatgtatcacttgttcttacaaagcttcgtctggactgctgtaccccctggagagaggatttatatatgtgcataagccccctgtccacatccgattcgatgaaattagttttgtgaattttgcgagaggtacaaccaccactcgctctttcgactttgaaattgagacaaagcaggggacgcagtacacgttttctagtattgaacgtgaagagtacggcaaattattcgacttcgtcaatgctaaaaaactgaacatcaaaaatcgagggctaaaggaagggatgaatccatcctacgatgagtatgccgattcagacgaagaccagcacgatgcatacctcgaacgcatgaaagaggaagggaagattcgggaagagaatgctaacgatagctccgatgattccggcgaggaaactgatgagtccttcaatcccggagaagaggaggaggacgttgcagaggaattcgactcaaatgctagcgcgtcttctagtagtaatgaaggcgatagcgacagggacgagaagaaaagaaagcagctcaaaaaggctaaaatggccaaggatcgcaagagccgcaaaaagccagtcgaggtcaagaagggcaaagaccccaacgccccaaaacgccctatgtccgcttatatgttatggttaaacgcctcaagggagaagattaagtccgaccatccaggtatctccatcacagacttgtcaaaaaaagcgggagaaatttggaaaggcatgtctaaggagaagaaggaagaatgggatcgcaaagcagaagatgcacggcgagactatgagaaagctatgaaagagtacgaggggggaaggggcgagagctccaaacgcgacaagtctaagaaaaagaagaaagtgaaggtaaaaatggaaaaaaaatcaaccccaagtcgcggtagctccagcaagtcctcctcaaggcagttaagcgagagctttaagagtaaagaattcgtgtcttccgacgaaagctctagcggtgagaacaaatcaaaaaaaaaacgtagacggagcgaggattctgaggaagaagagctggcttccacccctcctagtagcgaagacagtgctagcggcagcgacgagtag

SEQ ID NO: 242688 - DNA, 240 bp, synthetic construct
  misc_feature 1..240: note = Description of Artificial Sequence: Synthetic coding sequence
  source 1..240: mol_type = other DNA
atgaagagcctcacatggatccttggcctctgggccctggccgcatgcttcacacctggagagtcccagagaggccctaggggaccttacccacctggacctctggctccaccacagccattcggtccaggattcgtgcccccaccacctccccctccttatgggccaggcagaatccctcctcctccccctgctccgtacgggcctggcattttcccgccacctccaccccaaccttag

SEQ ID NO: 242689 - DNA, 324 bp, synthetic construct
  misc_feature 1..324: note = Description of Artificial Sequence: Synthetic coding sequence
  source 1..324: mol_type = other DNA
atgaagtcactgacttggattttaggtctctgggctctggcagcttgcttcacacccggagaatctcagcgcggtccacggggaccttacccccctggacctctggctcccccacagccttttggcccaggctttgtccccccaccacccccacctccttacggacctggacggatccctcctcctccttactcctgcacacctaatatgaataactgcagcagatgccaccaccaccacaagcggcaccattacccatgtaactactgtttctactatccaaaatacgagtttcagcactgttttcaggagaccttcacttag

SEQ ID NO: 242690 - DNA, 240 bp, synthetic construct
  misc_feature 1..240: note = Description of Artificial Sequence: Synthetic coding sequence
  source 1..240: mol_type = other DNA
atgaaaagtttaacctggatactcgggctgtgggcgcttgccgcatgcttcacaccgggagagtcccagcgaggcccaagagggccataccccccaggtcccctagcgccaccccagcccttcggcccagggttcgtgcccccaccaccaccacctccttatgggcctggccgaatcccaccgcctccccctgctccttacggtccgggaatctttccccctcctcctccacagccctag

SEQ ID NO: 242691 - DNA, 348 bp, synthetic construct
  misc_feature 1..348: note = Description of Artificial Sequence: Synthetic coding sequence
  source 1..348: mol_type = other DNA
atgtcccggcatagcaggcttcagagacaagtgctaagtctctaccgggacctgctgagggccggaaggggtaagccaggggctgaggccagagtgagagcagagtttaggcaacacgctgggcttcctcggtctgatgtgctgcgcattgagtatctttatagacgcggaaggagacagctccagctgctccgatccggccacgcgaccgccatgggagccttcgtgcgccctcgggctccgactggtgaaccaggcggtgtgggttgtcaaccagatgatggcgatagcccgagaaacccccacgatagcacaggcgcacctgagactcgacctgacggacggtag

SEQ ID NO: 242692 - DNA, 501 bp, synthetic construct
  misc_feature 1..501: note = Description of Artificial Sequence: Synthetic coding sequence
  source 1..501: mol_type = other DNA
atggcagtgtccactgtttttagcacctcaagtctgatgctcgccttgagcaggcattctctgctgagcccactgcttagcgtgacgtcttttaggaggttctacagaggcgactcacctaccgatagccagaaggatatgatcgagattccactgccaccatggcaagaacggacagacgagtctattgagacaaagcgcgctcggttgctatacgaatcacgaaagcgtggcatgctggaaaactgtatactgttgtcccttttcgctaaagagcatctccaacacatgaccgagaagcagctgaacttatatgatcggctgataaatgaaccttcaaacgattgggatatctactattgggccacagaagctaaaccggcaccagagatttttgaaaatgaagtcatggctctgttgcgtgattttgccaaaaacaagaataaggagcagagactgcgtgcccctgacctggaatatctgttcgagaagccaaggtag

SEQ ID NO: 242693 - DNA, 843 bp, synthetic construct
  misc_feature 1..843: note = Description of Artificial Sequence: Synthetic coding sequence
  source 1..843: mol_type = other DNA
atggccgcagtagttgccctgtcactaagacggagactcccagccacgaccctggggggagcctgccttcaggcgtctaggggggctcagactgccgctgctaccgctcccaggatcaaaaagttcgccatctacagatgggacccagacaaagccggagataagccccacatgcagacctacgaggtggacttgaacaagtgtggtcccatggttctcgacgctctgatcaaaattaagaacgaagtggactcaacattgacttttcggaggtcttgccgggagggtatctgcggctcatgcgcgatgaacatcaatggaggcaacaccctggcttgtacccgtcgaatcgacacaaatctcaacaaggtatccaaaatatatcctcttccgcacatgtacgtgatcaaggatttggtcccagacctgtcaaacttttacgctcagtataagtctatcgaaccctacctgaagaaaaaggacgaatcacaagaaggcaagcagcaatatctgcagagtatcgaagagagagaaaagctcgacgggttatacgaatgcatcctctgcgcttgctgcagcacaagttgcccctcctattggtggaatggagataagtacttgggcccagcggttctaatgcaggcctatagatggatgattgactccagagatgacttcacagaagaacgactagccaaacttcaggacccattttccctgtacagatgccataccattatgaattgtactaggacctgtcctaaaggattaaatcctgggaaggcaatcgccgagattaagaagatgatggctacctataaggagaagaaggccagtgtatag

SEQ ID NO: 242694 - DNA, 453 bp, synthetic construct
  misc_feature 1..453: note = Description of Artificial Sequence: Synthetic coding sequence
  source 1..453: mol_type = other DNA
atggccgctctgctcctacggcatgtcggtagacattgccttcgcgctcatttcagcccccagctgtgtatccggaacgccgtccccctgggcacaacagcgaaagaggagatggagcggttctggaacaagaatattggttccaaccggccactctctcctcatatcacaatatacagctggtctctccccatggctatgtccatctgccatcgaggaaccggaatcgccctcagtgccgatgtgggacctagaaagaggcctgaggacagtcctgctataccagtctggtcaggttgtcccggaagctattgcgtggtgttgtacggggctggttcccatgtgaagaaggggggatctcaacaccacctgcccacacactactatatccatccctcattttgcctctctttcttgtccccagcttgggaaaagttctcactgtttgtgtag

SEQ ID NO: 242695 - DNA, 510 bp, synthetic construct
  misc_feature 1..510: note = Description of Artificial Sequence: Synthetic coding sequence
  source 1..510: mol_type = other DNA
atggctgctcttctgctgcgccacgtggggaggcattgcttgcgagcccactttagtccacagctttgcattcggaacgccgtccctctgggcactaccgccaaggaggagatggagagattctggaacaagaatattggctctaaccgcccactcagccctcatattacgatttactcttggtccctgcccatggcaatgagcatctgccaccggggaaccggcatcgcgctgtcagccggagtctcactgtttgggatgtctgctttgctgctgcccggaaatttcgaaagttacctggagcttgtgaaaagcctgtgtctaggacctgcactgatccataccgctaaatttgcgttagtttttcctctgatgtaccatacttggaacggcattcgccatttgatgtgggacctgggcaaggggttgaagatcccccagctgtatcaaagtggggttgtagtactggtcttaacagtactgtccagcatgggactggccgctatgtag

SEQ ID NO: 242696 - DNA, 351 bp, synthetic construct
  misc_feature 1..351: note = Description of Artificial Sequence: Synthetic coding sequence
  source 1..351: mol_type = other DNA
atggcggctcttctgttgtcctggtcgctccctatggccatgagcatctgccacagagggactgggatagccctcagtgcgggagtgtctctatttggcatgagtgctctgctcctgccaggaaacttcgaatcttatctggagttggtcaagagcctgtgcctcgggcctgcactcattcacaccgccaagtttgctctggtgtttcccctcatgtaccatacctggaacggaatccgccacttgatgtgggatctcggtaaaggactcaaaatccctcagctgtatcagtctggcgtggtggtactggtccttactgtgttaagtagcatggggctggcagcgatgtag

SEQ ID NO: 242697 - DNA, 408 bp, synthetic construct
  misc_feature 1..408: note = Description of Artificial Sequence: Synthetic coding sequence
  source 1..408: mol_type = other DNA
atggctgcactgctgttgaggcatgtggggcgacactgtcttagagcccatttttctcctcaactgtgtatcaggaattggtctcttccgatggccatgagtatttgccacagagggaccgggattgccctgagtgcaggtgtgagcttatttggcatgtcagccttactgctcccagggaacttcgagtcatatctggagctcgtcaaaagtttgtgtcttggtccagctctcattcataccgcaaagttcgccctagtgttccccctgatgtatcacacttggaacggcatcagacacctgatgtgggatctgggcaaaggcttaaagatcccccagctgtatcagtccggcgttgttgtcctggttctgaccgtgttgtcgagcatgggcctggctgctatgtag

SEQ ID NO: 242698 - DNA, 480 bp, synthetic construct
  misc_feature 1..480: note = Description of Artificial Sequence: Synthetic coding sequence
  source 1..480: mol_type = other DNA
atggcagttctgtggcgcctgagcgcagtctgtggcgcactgggcggacgcgcattactgctccggacccccgtcgtgcgtcccgctcatatctccgccttccttcaggaccgtcctataccggaatggtgcggggtccagcacatccacctgtcaccatctcatcacagtgggagtaaagccgcttctttgcactggacttccgagagagtggtttctgtcttactcctgggcctcttaccagctgcttatctaaacccatgctccgccatggattacagcctggccgctgcactcactttacatggccactggggactggggcaggttgtgaccgattacgtacacggagatgctctgcaaaaggccgcaaaggccggactgttggcattgagcgcactgacttttgccggattgtgctactttaactaccacgatgtgggcatttgcaaagctgtggctatgctatggaagctatag

SEQ ID NO: 242699 - DNA, 465 bp, synthetic construct
  misc_feature 1..465: note = Description of Artificial Sequence: Synthetic coding sequence
  source 1..465: mol_type = other DNA
atggctgccagcatgttctacggaagattggtcgccgttgccacacttcgcaaccacaggcccagaaccgctcaacgagcggctgcccaggggcctgttttgataggcagcagtcacgggggagtgaacatcgaagacgtcgccgctgaaagtcccgaggccatcattaaggagccaatagatattgaggagggcattaagaaggagcaggccctccagttggctcagaaaatgggcttccccccaaacattgtcgaatctgccgcagagaatatggtcaagttatacagcctgtttttaaagtatgacgctacaatgatagagattaaccccatggtggaggactccgacggagctgtgctctgcatggacgctaagattaattttgattctaatagtgcatacagacagaagaaaatatttgatctacaggactggacacaggaggatgaacgcgacaagtag

SEQ ID NO: 242700 - DNA, 897 bp, synthetic construct
  misc_feature 1..897: note = Description of Artificial Sequence: Synthetic coding sequence
  source 1..897: mol_type = other DNA
agcggcaggggacacccctctgaaccccctgccagtgacggtcccgcagggtgttgctctggatcaaaagatgttgttattaaggcgcaggtcctggccggaggaaggggaaagggcacatttgaatctggattgaagggaggagtgaagatagtattctcccctgaagaagctaaggcggtgtcgtcacagatgatcggcaagaagctttttaccaagcaaactggggagaaggggcgtatctgcaaccaggttctcgtctgtgaacgaaagtatccacgcagagagtattacttcgcgataacgatggagagatcattccagggacccgtcctcatcggctcaagccacggaggcgtgaacatcgaggatgtggctgctgagtcgccagaggccataatcaaggaacccatcgatatagaggaaggcatcaaaaaagagcaagccctgcagctcgctcagaaaatgggctttccgcctaatatagtggagtccgccgctgagaacatggtaaagctttactccctctttctgaaatacgatgctaccatgatagaaatcaaccccatggtggaggacagcgacggcgcagtgctctgcatggacgccaagatcaacttcgactccaactctgcgtatcggcagaaaaagatctttgacctccaggattggacccaggaagacgaacgcgacaaagatgctgccaaggccaatctcaactacatcggcttggacggaaacattggctgcctggtcaatggagccggactggccatggccacgatggacatcatcaagttgcacggcggaacccccgctaacttcctagatgttggcggaggggctacggttcaccaggtcaccgaggcctttaagctgattacctccgacaagtag

SEQ ID NO: 242701 - DNA, 1326 bp, synthetic construct
  misc_feature 1..1326: note = Description of Artificial Sequence: Synthetic coding sequence
  source 1..1326: mol_type = other DNA
atggcagccagtatgttctacgggcgattggtggctgtggcaactctccggaatcacagaccgaggacagcccagcagcagcagcgtaatctatcacttcatgagtatatgtccatggagcttctccaggaggcaggagtcagcgtcccgaaaggatatgtggcgaaaagccccgatgaggcttacgcaatagctaaaaagcttggatcaaaagatgtggtgataaaagcccaggtgctcgctggaggtaggggtaagggtactttcgaaagtggactcaaaggtggggtgaaaatcgtgttttctccagaggaggcaaaggcagtgtcaagtcagatgatcggaaaaaagctgtttactaaacagaccggcgagaaaggtagaatctgcaatcaggtcctcgtgtgtgaacgcaaataccctaggcgtgaatattacttcgctattaccatggagagatcatttcagggacctgtgcttatcggctcaagccacggaggtgtaaatattgaagacgtggcggctgagtcgcctgaagctatcattaaggagcccatcgacatcgaggaaggtatcaagaaagaacaggcccttcagctggcccaaaaaatgggttttcctcctaacatagtggaatccgccgctgagaatatggtgaaactttactccctgttcctcaagtacgacgctaccatgatcgagatcaatcccatggtggaggatagcgatggcgctgtcctctgtatggatgccaagattaattttgatagtaacagtgcctaccgtcagaaaaaaattttcgatcttcaggactggacccaagaggacgagagggataaggatgctgctaaggccaacctgaactacattggactagatggcaacatcggctgtcttgtgaacggcgctgggctggctatggccactatggatattattaagctgcacggcggaacccccgctaattttttggatgtggggggtggtgccactgtgcaccaggttactgaggccttcaagctgatcacctccgacaaaaaggttctggccatcttggtgaacatatttggaggcatcatgagatgcgatgtgatagctcaaggcatcgtgatggcagtcaaagatctggagattaaaatccccgtcgtcgtgcgactccagggcaccagagtagacgacgccaaggctctgattgccgactcaggcctcaagattctggcttgcgatgatcttgacgaagcagccagaatggtcgtgaagctttccgaaatagtgacactggccaagcaagctcatgtcgacgtgaaatttcagctccccatctag

SEQ ID NO: 242702 - DNA, 1392 bp, synthetic construct
  misc_feature 1..1392: note = Description of Artificial Sequence: Synthetic coding sequence
  source 1..1392: mol_type = other DNA
atggccgcttctatgttttacggtcgattggttgcagtggccactttgagaaatcaccggcctcggaccgctcagagagctgctgcacaggtgttagggagctcgggactttttaataaccacgggctgcaggtgcagcagcaacagcagaggaatttgtcacttcacgagtatatgtccatggagctgctgcaagaggccggagtgagtgtgccgaaagggtacgtggcaaaatcaccagacgaggcttacgccattgcaaagaaactcgggtctaaagatgttgtgatcaaggctcaagttctggctggaggcagaggaaaaggaacgttcgaatccggactgaaaggcggagtgaaaattgtgttctcgccagaggaggcaaaggccgtgagctcgcagatgatcggcaagaaactgttcactaaacagaccggagagaagggacggatttgtaatcaggtcctcgtttgtgagcgtaagtatcccaggagggagtactatttcgcaatcaccatggaacggagcttccaaggtcctgtgctgattggctcctcccacgggggtgttaacatcgaggatgtggctgcagagagtcccgaagccataatcaaagaaccaattgatatcgaagagggtataaagaaggaacaggccctgcagctggcacagaagatgggtttccctcctaatatcgtggagagcgccgctgagaatatggtgaagctctactcactttttctcaagtatgacgcaactatgattgaaatcaatcctatggttgaagacagtgatggtgcagtattgtgcatggacgccaagattaacttcgattctaattccgcctaccgccagaagaaaattttcgaccttcaggactggactcaggaggacgaacgcgacaaggatgccgctaaagctaatctgaattatattggcttggatggtaacatcggctgcttagtaaatggagccggactagctatggcaacgatggatatcataaaactccacggcggtacgccagctaactttctcgacgtcggtggcggagccaccgttcaccaggtcacagaagccttcaaactgattacatcggacaagaaggtgctcgccatccttgtcaatatcttcggtggaatcatgaggtgtgatgtcattgctcaaggcatcgtgatggccgttaaagatttggaaattaagattccagtcgtggtgcgtttgcagggtacaagggtcgacgatgccaaggcgcttatcgcagattctggcctaaagattcttgcatgtgatgacctagacgaagctgctaggatggttgtaaagctgagcgagattgtgactcttgcaaagcaggcacatgtagatgttaagttccagctcccaatctag

SEQ ID NO: 242703 - DNA, 1218 bp, synthetic construct
  misc_feature 1..1218: note = Description of Artificial Sequence: Synthetic coding sequence
  source 1..1218: mol_type = other DNA
atgagtatggaactgcttcaagaggccggagtctcagtgccaaaaggctatgtcgctaagtctcccgacgaagcatacgcaattgctaaaaagttgggatccaaagatgtggtgattaaggcacaggtcctcgcagggggacggggtaagggcaccttcgagagtggtctcaaaggtggagtgaagatcgtcttctcacccgaggaagcaaaagctgtaagctcccagatgattgggaagaagctctttaccaaacagactggggagaagggacgaatctgcaatcaggtgctggtctgcgagagaaagtacccccgtagggagtactactttgccattactatggagcgtagctttcaggggccagtcctcatcgggtccagtcatggtggagtaaacatcgaagatgtggcagcagagtcccctgaggccatcatcaaagagcctatcgacatagaggagggaataaagaaggaacaagctctacagcttgcccagaagatgggtttcccacccaatatcgtggaaagcgcagccgagaacatggttaaactttacagcctctttcttaagtacgatgccaccatgatcgaaatcaaccccatggtggaagacagcgacggggctgtgctttgcatggatgctaaaattaacttcgactctaactccgcatatcggcagaaaaagatcttcgacctgcaagattggacccaggaagacgaacgggataaggatgctgccaaagcgaatctgaactacatcggactggatgggaacattggctgtctggttaatggcgcagggttggcaatggccacaatggatatcatcaagcttcacggaggcacccccgctaatttcttggacgtgggcggaggggctactgtgcaccaagtgaccgaggcctttaagctcattacttccgacaagaaggtcttggcaatactcgttaatatcttcggcggaattatgcggtgcgatgtcatcgcgcagggcattgtcatggctgtcaaagacctcgaaattaagattcccgtggtagtgaggctccaggggacaagagtggacgatgctaaagcgttaatcgcagattcgggcctgaaaattctcgcatgtgatgacctcgatgaggccgcacgcatggtcgttaagctgtccgagatagtcacgctggctaaacaagcacacgtggatgtcaagtttcaactgcctatttag

SEQ ID NO: 242704 - DNA, 876 bp, synthetic construct
  misc_feature 1..876: note = Description of Artificial Sequence: Synthetic coding sequence
  source 1..876: mol_type = other DNA
atggaacgcagcttccaagggccagtgttgattggaagctcacatggtggggtgaacatagaggacgttgccgctgaaagtccggaggcaatcataaaagagcctattgacatcgaggagggaataaagaaggagcaggcactgcaactagcccagaagatggggtttccacctaacattgtagaaagcgccgctgagaacatggtaaagctttactctctttttctaaaatatgatgccaccatgatcgaaatcaatcctatggtagaagacagtgatggagctgtcctgtgtatggatgcaaagattaactttgattcaaatagcgcataccgacaaaagaagatctttgacctacaggattggactcaggaggacgagagagacaaggacgctgctaaagccaatctgaactatatcgggctcgacggaaacatcggatgtcttgtgaacggcgcaggccttgcgatggctactatggacatcatcaagctgcacgggggaacccctgctaattttttggacgtggggggaggcgctacagtacatcaagtaacagaagcattcaaactcattacatccgacaagaaggttttagccatactcgttaatatctttggcggaattatgagatgcgatgtaatagcccaaggaatcgtcatggcagtcaaagatcttgaaattaaaatccccgtcgtggtgcgcttacaggggacccgagtagatgacgcaaaggcccttattgcggattcaggtttgaagattcttgcatgtgatgatcttgatgaagccgcacggatggtcgtgaaactgtccgagattgttactttggcaaaacaagcccatgttgatgtaaagttccaacttccaatttag

SEQ ID NO: 242705 - DNA, 1218 bp, synthetic construct
  misc_feature 1..1218: note = Description of Artificial Sequence: Synthetic coding sequence
  source 1..1218: mol_type = other DNA
atgtctatggaattactgcaagaagccggagtgtctgtcccgaaggggtatgtggcgaaaagccctgatgaagcttatgcaatcgctaaaaagttgggttccaaggacgtggtcattaaggcccaggttctggcagggggaaggggtaaaggaacctttgagtccggcctcaaaggcggagtaaaaatcgtcttttcgcctgaagaagccaaagcagtgagttcacaaatgatcggtaaaaaattgtttacaaagcagacaggtgagaaaggcagaatctgtaatcaggtcctcgtgtgtgaacgtaagtacccacggcgtgagtactacttcgcaatcactatggagagaagctttcagggtccagtgctcatcggatcctcccacggcggagtcaatattgaggatgtggccgctgagtctcccgaggcaatcatcaaagagccaatcgacattgaagagggtattaagaaggaacaggcccttcagctcgcccaaaagatggggtttcccccaaatatcgtagaatccgccgctgaaaatatggtaaagctctactcactctttctgaaatacgacgcaaccatgatcgagattaacccaatggtggaagacagtgatggcgcagtgttgtgtatggatgcaaagattaattttgattccaattccgcatatcgacaaaaaaagatctttgacctccaggactggacccaggaggatgaaagagacaaggacgctgccaaggcgaacctgaattacattgggctggatggcaatattggctgcctggtgaacggggctggtctagcaatggccaccatggatatcattaaactgcatggcggaacaccagctaattttctggacgtaggcggaggagcgactgtccatcaggtcaccgaggcatttaagttgattacaagcgacaaaaaagtgttggccatcctggtaaacattttcggcggaatcatgaggtgcgatgtcatcgcacagggaatcgtgatggccgtcaaggacctcgagattaagattcctgtggtggtgcggctgcaggggacaagggtggatgatgccaaggccctgattgccgatagtggtcttaaaattctggcctgcgatgaccttgatgaagcagcccgaatggtcgtaaaactttcagaaatcgtcaccttggccaagcaagcccatgtagacgttaagttccagttgcctatctag

SEQ ID NO: 242706 - DNA, 990 bp, synthetic construct
  misc_feature 1..990: note = Description of Artificial Sequence: Synthetic coding sequence
  source 1..990: mol_type = other DNA
atgatcggaaaaaaactcttcactaaacagacaggcgagaagggaagaatttgcaatcaggtgctcgtgtgcgagagaaaataccctaggcgggaatactacttcgctataacgatggaacgctcgttccagggtcctgtgctgatcggcagcagccacgggggagtgaatattgaagatgtcgcagccgaaagccccgaagctatcattaaggagccaattgatatcgaggagggaataaaaaaagagcaggctctgcagttggcacagaagatgggcttcccacccaacatagttgagagtgccgcagagaatatggtcaagctgtatagcctgtttctaaagtatgatgctactatgattgaaatcaatccgatggtcgaggattccgacggagcagtgttgtgtatggatgccaaaattaactttgattccaattcagcatacagacagaagaaaatcttcgaccttcaggactggactcaggaggatgagagggacaaagatgcagccaaagccaatctgaactatatcggcttggacggtaatatcggttgcctggtcaacggagccggattggccatggccaccatggacattataaaactccacggaggcacccccgcaaactttttagacgtgggtggaggggcaacagtgcaccaggttactgaagcttttaaactcatcacctcagacaaaaaggtgttggccattctggtgaacattttcgggggaatcatgagatgtgacgtgatagcacaggggatcgtgatggccgtcaaagatctcgaaattaagatcccagtcgtggtgcgtttgcagggtaccagagtagacgacgctaaggccctcattgccgacagtggcctgaagattctggcttgcgacgatttagatgaagccgctcgtatggttgtgaagctgtcagagattgtgacactcgccaaacaggcccacgttgacgtaaagttccagttaccaatctag

SEQ ID NO: 242707 - DNA, 1041 bp, synthetic construct
  misc_feature 1..1041: note = Description of Artificial Sequence: Synthetic coding sequence
  source 1..1041: mol_type = other DNA
atgactgcaaccttggccgctgctgcagacattgccaccatggtgtccggcagttcaggtttagccgcagctcggttgttaagtcggagctttcttttgccccagaacggcatcagacattgcagctataccgcctccaggcagcatctgtatgtggacaagaacacaaaaatcatttgtcagggattcacaggaaagcagggtactttccacagccagcaggccctggagtacggaaccaagctggtggggggaaccacaccaggcaagggagggcagactcacctgggtctgccagtatttaacactgtcaaagaagctaaggaacagacgggagccacagcttcagtgatctacgtgccacccccatttgctgctgctgcgatcaatgaggctatcgaagccgaaatacctctagttgtttgcataacagagggcattccgcaacaggatatggtacgagtgaaacataaattattacgccaggaaaagactaggctgattggacccaactgcccaggggtgatcaacccgggagaatgcaaaatagggataatgccgggtcatatccataaaaaagggaggataggtatcgtgtcacgatcaggcacactcacgtacgaggcagttcaccagaccactcaggtcggtttgggtcagtctctgtgcgttgggatcggcggagaccctttcaatggtacggatttcatcgactgtttggaaatttttctcaacgacagcgctaccgagggaatcattcttattggtgagatcgggggaaatgccgaagagaacgcagctgagttcctgaagcagcacaacagtggcccaaattcgaaacccgtagtaagttttatcgctgggctcaccgccccaccaggacggaggatgggacatgccggagctataattgctgggggtaagggcggagcaaaagagaagatttctgctttgcagtcagcaggcgtagtggtgtccatgagcccagcccagttaggcaccaccatttacaaggaatttgaaaaaaggaagatgctgtag

SEQ ID NO: 242708 - DNA, 5483 bp, synthetic construct
  misc_feature 1..5483: note = Description of Artificial Sequence: Synthetic coding sequence
  source 1..5483: mol_type = other DNA
atggctaggaaaaaattctcaggactggaaatttctcttattgttctgtttgtgatagttacaattattgcgatcgctttgattgtggttctggctacaaagacacctgctgtggatgaaatatctgactccacatcaacgcctgccaccactagagtcaccacaaacccaagcgatagtggcaagtgcccgaacgtactgaatgacccggtgaacgtacgtatcaactgtatcccagaacagttcccaacagaaggaatctgcgcgcagagaggctgttgttggcgcccttggaatgacagtttgattccttggtgtttttttgtggacaaccacggctataatgtacaagacatgacgaccacatcaatcggagtcgaagccaaactgaatagaattccgagtcctacactttttggcaatgatattaactcagtgcttttcaccactcagaaccaaacccccaacagatttcgattcaaaattaccgatccaaataaccggagatacgaggtgcctcaccagtacgtgaaggagttcacgggccctacggtgagtgacaccctgtatgacgtgaaggtggcacaaaatcctttcagcatccaggtcattcggaagagtaatggaaagactctgttcgacacgagcataggcccattagtgtattccgaccaatatctgcaaatcagcacgcggctgccctctgactatatctacggcataggtgaacaggtccacaagcgtttccgccacgatctaagttggaagacatggcccatctttacccgagaccagctgcctggcgacaataacaataacttgtatggtcatcagaccttcttcatgtgcatagaggatacctccggcaaatccttcggcgtttttctgatgaacagcaacgcaatggaaatcttcatccaacccacccccatagtgacttacagggtcaccgggggtattctggacttttatattttgctgggagacacaccagaacaggtggtccagcaataccaacagttagtcgggttgcctgctatgcctgcctattggaacctgggcttccagctgagcaggtggaattataagtctcttgacgtagtgaaggaggtggtgagacgaaaccgcgaggctgggatcccattcgatacccaagtgacggacatcgattatatggaagataagaaggattttacctacgatcaggtcgcattcaatgggctgccacagttcgtccaggatctccacgaccacggacagaagtatgtgatcatcctggacccggctatcagtatcggcagaagagccaacggcacgacgtacgcaacgtacgagcggggtaacacccaacacgtgtggatcaatgaatccgatgggagtacccccatcattggggaagtgtggcctggcctaacagtgtatccagacttcacaaatcctaattgtattgattggtgggctaacgagtgctctatttttcaccaggaggtgcagtatgatgggctttggattgatatgaatgaggtgtcttccttcatccaggggtccacaaaggggtgcaacgtgaacaaacttaattacccaccttttactcccgacatcctcgacaaattaatgtacagtaagacaatatgtatggatgcagtacagaattggggcaaacagtatgacgtacattcactgtatggctatagtatggccattgcaacagaacaggccgtccagaaagttttccctaacaaacgcagctttattctaactcgctctacttttgcaggctccggtaggcacgcagcccattggttgggagacaatacagcctcatgggagcaaatggaatggtcaatcactggcatgctcgaattctcactgtttgggatccctcttgtaggggctgatatatgtggcttcgttgccgagactaccgaggagctctgcagaaggtggatgcaactgggggctttttatccttttagtcgtaaccataatagtgatggctacgaacaccaagatcctgcttttttcggccagaacagcctgctggtgaaaagtagccgacaatacctcacgatccgttatactctcctgccattcctgtacacactattttataaggcccacgtgttcggagagacagtggccaggccggttctgcatgaattttacgaggacacgaatagctggatcgaggacaccgaattcctgtggggtccggctctcctgatcaccccagttttgaaacagggcgcagatacagttagcgcctacattcccgatgcaatttggtacgactacgagagcggggcaaaacgcccttggaggaaacagagagtggacatgtacctccctgccgataaaatcgggctgcatctgcggggagggtacatcattcccatacaggaacccgatgtgactactaccgcctcccgaaaaaaccctctaggcttaattgtggctctgggtgaaaacaacacggcaaaaggcgacttcttctgggacgatggtgaaaccaaagacaccatacaaaatggtaattatatcctttacaccttctccgtttcaaataacactttagacattgtctgcacccacagttcttaccaagagggaacaactttggccttccaaactgtcaagatcttaggattgacggacagtgtgaccgaggttcgtgttgccgagaacaaccagccaatgaatgctcacagtaacttcacttacgacgccagtaatcaggtgctgctgatcgccgaccttaagcttaacttagggaggaatttcagcgttcagtggaatcaaatcttttccgagaatgagcgatttaactgctacccagatgctgacctggctaccgagcagaaatgtacacaaagggggtgtgtgtggaggactggcagctctctctcaaaggctccagaatgctacttcccgaggcaggacaactcttattccgtgaattcggcgaggtactcatccatgggaatcaccgccgatctccagttaaatacagcgaatgcaagaattaagttaccctcagatccgatctctacgctccgggtcgaggtgaagtatcacaagaacgacatgttacagtttaagatttacgacccccagaaaaaaagatatgaggtgcccgtccctttgaacatccccacaacaccaatctctacatacgaggaccggttgtatgatgtagagattaaggagaatcctttcggtatccagatccggaggagatctagcgggagagtcatatgggattcttggttgccaggcttcgcctttaacgaccagttcattcaaattagcacaaggctcccctctgagtacatctatggcttcggagaggttgagcacaccgcgtttaaacgagacctcaactggaatacgtggggcatgtttacacgggaccaacccccagggtacaagctcaattcgtatgggttccacccctactacatggctctcgaagaagaaggcaacgcccatggcgtctttttgctcaatagcaacgcaatggatgtgactttccaacccacacctgcgctgacatatcgtaccgtcggcggaatcttagatttctatatgttcctaggccctacgccagaagtggccacaaagcagtaccacgaggttattggacatccggtgatgcccgcttattgggctcttggcttccaactctgcagatatggctacgcaaatactagtgaagttagggaactgtatgacgccatggtcgcggcaaacattccatacgatgtccagtatacggacattgactacatggaacgtcaactggactttactatcggagaggcattccaggatctgccacagttcgtcgacaagatcagaggggagggcatgcggtacatcatcattctggacccggcaatctctggcaacgagacaaagacatacccagcatttgaacgaggacagcaaaatgatgtgtttgtcaagtggccaaacacgaacgacatttgctgggccaaggtctggccagatttgccaaatataactattgacaaaactttaacagaggacgaagccgtgaatgcttcacgcgctcacgttgccttccctgacttctttcgcacaagcactgccgagtggtgggccagggaaatcgttgacttctataacgagaagatgaaatttgacggcctctggattgatatgaacgaacctagctcctttgtaaacggcacaactaccaatcaatgtcgaaatgatgaactgaattaccctccatattttcctgagctgactaagagaaccgacggactccatttccgaaccatctgcatggaagcagagcagattctctctgatgggacctcggtgctgcactacgatgtacataatttgtatgggtggtcacagatgaagcctactcacgacgcactgcaaaagactacaggcaagagggggattgtgatctcaagaagtacgtaccctacgagtgggaggtgggggggacattggctgggtgataactatgcccgatgggacaacatggataagagcatcatcggcatgatggagttttcactgtttggaatgtcgtataccggagccgatatatgtggcttttttaacaattcggagtaccatctgtgcacccgttggatgcagctcggtgcgttttatccttactccagaaaccacaatattgccaatacccgcagacaggacccagcaagttggaacgagacattcgccgagatgtcccggaacattctgaacattaggtacacgcttcttccatacttttatacacagatgcacgaaattcacgctaacgggggtacagtgattcggccacttctgcatgaattctttgatgaaaaacccacctgggacattttcaaacaattcctctggggcccagccttcatggtgacaccagtcttggagccatatgtccaaaccgtgaatgcatacgtcccaaacgcaaggtggtttgattaccatacagggaaggatatcggggttcgagggcaatttcaaacgttcaacgcgagttacgacacgatcaatctgcacgttcggggaggtcacatattaccctgtcaggagccagcccagaataccttctacagtagacaaaagcacatgaagctcatcgtggccgcagacgataaccagatggctcaggggagtttattttgggatgatggtgaatcgatcgacacatacgagcgcgacttgtatcttagcgtgcagtttaatctcaatcaaacaactctgacatctaccatcctgaagaggggatatatcaacaaatccgaaacacgactggggtccctacacgtttggggtaaaggtaccacccctgttaatgccgttacactgacttacaacggaaataaaaattctctcccatttaacgaagacacaacaaatatgatcctgcgaatcgatctgaccactcataatgtgacccttgaggagccaatcgagattaattggagtta

SEQ ID NO: 242709 - DNA, 2616 bp, synthetic construct
  misc_feature 1..2616: note = Description of Artificial Sequence: Synthetic coding sequence
  source 1..2616: mol_type = other DNA
atgaagtactcttgttgtgcgctggtgctggcagtgctcggaacggaattgcttgggagcctctgctcaactgttcggtcgcccagattccgcggtcgtattcagcaggagcggaagaatatccggcctaatatcattttagtgttaacagacgatcaagatgttgaactgggaagcttacaggtgatgaacaagaccagaaagataatggagcacggaggggcaacatttataaacgcctttgtgacaacgccgatgtgttgtccaagtagaagtagtatgttgaccgggaagtacgtgcacaaccataacgtttataccaataatgagaactgcagcagtccaagctggcaggccatgcacgagcccaggacattcgcagtgtatttgaataatacaggctaccgcaccgcgttctttggcaagtatcttaacgagtacaacgggtcctatattcctccaggatggcgggagtggcttgggctgattaagaattcccggttctataactacaccgtgtgtcgaaacggaataaaagaaaagcacggttttgactacgctaaggattacttcacagacctgatcactaatgagtctattaactacttcaaaatgagcaagcggatgtaccctcaccggccagtgatgatggtcatcagtcatgctgcccctcacggccctgaggacagcgccccacagtttagtaagctgtatccaaatgcctcccagcacattacaccgtcgtataattacgcgcctaatatggacaaacactggattatgcagtataccggtccaatgctacccatccacatggagtttaccaatatcttgcagcgaaagcggttacaaactcttatgagtgtggacgactctgtggagcgtctctataacatgttagtggaaactggagagttagagaatacttacataatctacacagctgatcatgggtaccacatcggccagttcgggctggtgaagggcaagtccatgccctacgacttcgatatccgggtccccttctttatccggggacccagcgtcgaacccggtagcattgtgcctcagatcgtactcaatattgatctcgcacctactattctagatattgccggtctcgacacccccccagacgtggatgggaagtccgtgttaaagttgctggatcccgagaaaccaggaaaccgcttccggacaaataagaaggctaaaatttggcgggacacctttcttgtggaacgagggaagttccttcggaaaaaagaagagtcaagcaagaacattcagcagtctaatcacctgcctaagtacgaacgggtcaaagaattgtgccagcaggctagatatcagacggcctgtgaacagcccggacagaaatggcagtgtattgaggacacatcaggaaagttgcggatccataagtgtaaggggccatccgacctgttaaccgtccgccagtctacaaggaacctgtatgcacgcggatttcacgataaggacaaggagtgctcttgtagggagagtggttatagagctagccgcagccagaggaagtctcaaaggcaattcttgaggaaccagggaacccccaaatacaagcccaggttcgtccatacacgccaaaccagatctttgtcggttgaatttgaaggggagatttacgacatcaacctagaagaggaggaggagctccaggtgctgcagccaaggaatatcgcaaagcggcacgatgagggccataagggtcctagagacttacaggctagttcgggcggtaaccggggacggatgctcgccgattcatccaatgccgtaggaccaccgaccacagtgcgtgtgacccataaatgctttatcctaccaaacgacagtatccactgcgagcgggaactataccaatccgcacgcgcatggaaggaccacaaagcctacattgacaaagagatcgaggccctgcaagacaagattaagaaccttcgcgaggtcagaggtcatctgaaaagacggaagccggaagagtgctcttgctccaagcaatcgtactacaataaggaaaagggagtcaaaaagcaagagaagctaaaatcccacttgcacccctttaaagaagccgcacaggaggtcgacagtaaactgcagctgtttaaggagaacaacaggagaaggaagaaggagaggaaagagaagagacgccagcgcaagggggaagagtgttccctcccaggcctcacctgctttacacacgacaataaccactggcagacagctcctttctggaacctcggaagtttttgcgcctgcacttcatcgaacaacaatacatactggtgtctaagaaccgtgaatgaaactcacaacttcctattctgtgagtttgcaactgggttcttagagtacttcgacatgaacaccgatccctaccagctgacaaatacggtgcacacagtggagcggggtatcctaaaccagctccatgtacaacttatggaactgcgttcttgtcaggggtacaaacaatgcaaccctaggcctaaaaacctcgatgttggaaataaagatgggggaagctatgatttacacagggggcagctctgggatggatgggagggatag

SEQ ID NO: 242710 - DNA, 2616 bp, synthetic construct
  misc_feature 1..2616: note = Description of Artificial Sequence: Synthetic coding sequence
  source 1..2616: mol_type = other DNA
atgaagtatagctgttgtgccctggtgcttgccgtgttaggtactgaacttcttgggtcactctgttccactgtacgatcaccacgcttccgtgggaggatccagcaggaaaggaaaaacatacggcctaatatcattttggtcttgactgacgaccaggacgtcgaactcgggagcctgcaagtgatgaacaagacacgcaagattatggaacatgggggagcaacctttattaacgcatttgttaccacccctatgtgttgtccctcccggtcatcaatgttgacagggaagtatgttcacaatcacaacgtctacacgaacaacgagaattgcagctccccgagctggcaagccatgcacgaacccagaaccttcgcagtatacctgaataataccggctacaggactgcattcttcgggaaatatcttaacgaatataatggctcatacattcccccagggtggagagagtggctggggttaattaagaactcccgtttctacaactataccgtctgcagaaacggcatcaaagagaaacacgggtttgattatgcgaaggattatttcaccgaccttatcacaaacgagtctattaattacttcaagatgagtaagcgcatgtatccccaccgccctgtcatgatggtaattagccacgccgcacctcacggaccagaagattcagcccctcagttctctaagctgtatccaaacgcttcgcagcacattacgccgtcctataactatgccccaaatatggataagcactggattatgcagtacacgggacccatgctgcctatccacatggagtttacaaatatcttacagcgaaaacggctacagactctgatgtctgtcgatgacagtgttgagcgcctttataacatgctggtagagaccggagagcttgaaaatacctacattatttacaccgcagatcacggttaccacatcggtcaatttggcctggtgaagggtaaatccatgccatacgatttcgatattagagtgccattcttcatcagaggcccttcggtagaacctggtagcattgtccctcagatcgtgctgaatattgacctggccccaacaatactggacatcgccggactcgacaccccgcctgacgtagatggtaaatctgtgctaaagctgttagatcctgagaagccgggaaatcgattccgaaccaacaagaaagccaaaatttggagggacacttttttggttgaaaggggcaagtttctccgcaagaaagaagagtcaagcaagaacattcaacagagtaatcacctgccaaagtatgagagagtcaaagagctgtgtcagcaagctcgataccaaactgcatgtgagcagcctgggcagaagtggcagtgtatagaggacacatccggtaagctccgaatccataagtgcaagggcccttcagatctcctgactgtacgccagtccacacgcaatctgtacgcaagaggcttccatgacaaggacaaggaatgtagctgtagggaatctggttacagggcctccagaagtcaaaggaagtcacagaggcagttccttagaaatcaaggtactccaaaatataagccacggttcgtgcacaccagacagactcgttccctttctgttgagttcgagggcgagatttatgatataaacttggaggaagaggaggaactgcaggtgttgcagcccaggaacatcgccaagcggcacgatgaaggtcataaaggaccgcgagatctgcaagcatcgtcaggcggaaatagggggagaatgctcgcggactccagcaatgctgtcggaccgcctactacggtacgcgtgacacataaatgctttatactgccaaacgactctatccattgcgagagggaactttaccagagcgcccgtgcttggaaggaccacaaggcctacattgacaaagaaattgaggctctgcaggacaagatcaaaaaccttagagaagtgcggggtcatctgaagaggcggaagccagaagaatgctcctgttctaaacagagttattacaacaaggaaaagggggtgaaaaaacaggagaagttaaaaagccatcttcaccccttcaaagaggctgcccaggaagtggatagcaaactacagttgtttaaggagaataaccgcagaagaaagaaggaaagaaaagaaaaacgtcgccagaggaaaggagaagagtgtagcttgcccggtctgacttgtttcactcatgacaacaatcactggcagacggctccattttggaatttgggcagcttttgcgcctgcacttcttccaacaacaatacgtactggtgcctcagaactgtgaacgaaactcacaatttcctgttttgtgagttcgcaacgggattcctcgagtactttgatatgaacactgacccatatcagctgactaatactgtccatacagtcgagagagggatcctaaaccagctgcacgtgcagcttatggaactcaggtcatgccagggatacaaacaatgcaatcctcgccctaaaaacctcgatgtgggcaataaggacggcggatcatacgatctgcacaggggccagctgtgggacgggtgggagggatag

SEQ ID NO: 242711 - DNA, 2616 bp, synthetic construct
  misc_feature 1..2616: note = Description of Artificial Sequence: Synthetic coding sequence
  source 1..2616: mol_type = other DNA
atgaagtatagttgttgcgccctggtgctggctgtgctcgggactgaactcctcggaagcctgtgctcgactgtccggtcaccgcgattccggggacgcatacagcaggaacgaaagaacatacgtcccaatatcattctggtcctgaccgatgaccaggacgtggaactgggctccctccaagtgatgaataagacacggaagattatggaacatggtggtgcaacgttcataaacgctttcgtcacgactcccatgtgctgcccttcccggtcatccatgctgaccggaaaatatgtgcacaaccataatgtttacactaataatgaaaattgttcatcaccatcctggcaagccatgcacgaaccacgtacttttgcagtctacctgaacaacaccggttatcgcaccgccttcttcggaaagtaccttaatgaatacaatgggagctacattcctcccggatggagagaatggctgggattgatcaagaacagtcgattctataattacactgtctgcaggaacggcatcaaagaaaagcatggtttcgattacgccaaagactactttaccgatctcatcaccaacgaatcaattaattacttcaagatgtcaaaaagaatgtatcctcaccgccctgtcatgatggtgatatcccacgccgcaccacatggtcctgaagacagcgccccacaattttccaaattataccctaacgcctcccagcacatcacgccctcctataattatgcaccaaatatggacaagcactggataatgcagtacactggcccaatgctgcctatccacatggagttcaccaatattctccagagaaaacgacttcagaccctgatgtctgtggatgacagcgtggagagattatacaatatgctcgtcgaaacgggagaactggaaaatacatatatcatttacaccgccgatcacggttaccacattggccagttcggactagtcaaggggaagagtatgccatacgattttgatatccgggttccattcttcattcgcggaccttccgtcgaacctggaagcattgtcccacagattgtgctcaacatagatttagcccctacgatcctcgatatcgccggactcgatacccccccagatgtcgatgggaagtccgttctaaagctcttagatccagagaaacctggaaaccgcttccgaaccaataagaaagctaaaatctggagggacacttttctcgttgaaaggggcaagttcctgcgcaagaaggaggaatcctcaaaaaatatccagcagtccaatcatctgcccaagtatgaaagggtgaaggagctctgtcaacaggccaggtaccagaccgcctgcgaacaaccgggtcagaaatggcagtgtattgaagacaccagcgggaagctgcgtattcacaagtgtaaaggcccaagcgacctgcttacagttaggcagtctacccgcaacctgtatgcacgcggattccacgacaaggataaggaatgttcatgtcgcgagtctggttaccgggcatccaggagtcagaggaagtcccaacggcaatttctcaggaatcagggcacgccgaagtataagccacgatttgtgcatacaaggcagacccgaagtttgagtgtcgaattcgagggcgaaatctacgacatcaacctggaggaggaagaggaactgcaggtgctgcaacctagaaatatcgcaaaacggcatgatgaaggccataaggggcctcgcgatctccaggcttcaagcggcggtaatcgtggtagaatgctggcagattcaagcaatgccgtggggccacctaccactgttagggtgacccacaagtgtttcattctacctaatgactcaatccattgtgaaagggagctctatcaaagcgctcgcgcttggaaggatcataaggcctatatcgacaaagaaattgaggccctgcaggacaaaatcaagaatctccgcgaggtgcggggacacctaaagcgtaggaaacctgaggagtgcagctgtagtaagcagtcctattataacaaggaaaaaggggtgaaaaagcaggagaagctgaagagccacttgcacccatttaaagaggcggctcaagaggtcgatagcaaactacagctctttaaggaaaataaccggcgacgcaagaaagagagaaaagaaaagcgcaggcaaaggaagggcgaggaatgttccctgccaggtctgacatgcttcacacacgataacaaccactggcagacagcccctttttggaaccttggctctttctgtgcatgcacaagttccaacaacaatacatactggtgtttgcgtaccgtcaatgaaactcacaattttctgttctgcgagttcgccacaggcttcctggagtactttgatatgaacaccgacccatatcaactaacaaataccgttcataccgtagaacgtggaattctcaaccagctgcatgtgcaacttatggagctgaggtcctgccaggggtacaagcagtgcaacccccgtcccaagaatctagatgttggtaataaggacggtgggtcatacgatcttcataggggacagctctgggacgggtgggagggctag

SEQ ID NO: 242712 - DNA, 2616 bp, synthetic construct
  misc_feature 1..2616: note = Description of Artificial Sequence: Synthetic coding sequence
  source 1..2616: mol_type = other DNA
atgaagtactcttgttgcgccctggtgctcgcagtcctgggtacagaattgttggggtctctgtgctctactgtccgttctcctaggtttcggggacggatccagcaggaacggaagaacatcaggccaaacataattctggtccttacggatgaccaggacgtcgaactcgggtctctacaggtgatgaataaaacccgcaagataatggaacatggaggagccacttttataaatgcattcgtgactacccccatgtgctgtccatcccgctcctccatgctgaccgggaagtatgtccacaatcacaacgtttacactaataatgagaactgttcatcaccctcatggcaggccatgcacgagccaaggacctttgctgtgtacttaaacaataccggctatcgcactgcgttttttgggaaatacttgaacgaatacaacggatcatacattcctccagggtggagagagtggttgggccttatcaagaactcacggttttacaactacaccgtgtgcaggaacggcatcaaagagaaacacggcttcgattacgctaaggactattttacggatctcattaccaatgagagcatcaactattttaaaatgtccaaacggatgtatccccacagaccggtaatgatggtgatttcccacgcagcccctcatggcccagaggatagtgcaccccagtttagcaagctgtatcctaatgccagtcagcacattacaccaagttacaattacgcgcctaacatggacaagcactggataatgcagtacaccgggcctatgctgcccattcacatggagttcaccaacatactgcagcggaaacgccttcagactctgatgagcgttgacgacagtgtggaaagactctataatatgcttgtcgagactggcgaactggagaacacatatatcatttacactgcagaccatggttaccacataggccagtttggcttggttaagggcaaaagtatgccttatgattttgacatccgggtaccatttttcattaggggtccctccgtggaacccggaagcattgtgccccaaatcgtccttaatattgatctcgcaccgacgattctggatatcgcgggtctcgatacgccccctgatgtggacggtaaatccgtgctgaaacttctcgacccagagaagcccggaaacaggtttcggacgaataagaaggcaaagatctggagggacaccttcctggtggagaggggaaagtttctgaggaaaaaagaggagtcttccaagaatatccagcagagcaaccatctgcctaaatatgagcgcgttaaggagctatgccagcaggcccgttatcagaccgcctgcgagcagccagggcaaaagtggcagtgtatagaggacacctccggcaaactcaggatccacaaatgcaaggggcctagcgacctactgaccgtcagacagtcaacacggaatctgtacgcacgtggctttcacgataaagacaaggagtgtagctgtcgcgagtcgggctaccgagcaagtcggtcccagaggaaatcccagcggcaattcctgcgcaaccaaggcacaccaaaatacaagccacgcttcgtccatacacggcagacccggtcactcagcgtggaattcgagggcgaaatctacgatattaatcttgaggaggaggaagagcttcaagtgctgcagcctaggaacatcgccaagcgacacgatgagggccacaaaggtcccagggatttgcaggcatcctcagggggaaatagggggagaatgttggctgatagcagtaatgccgttggccctcccacaacagtgcgcgttactcacaagtgttttattcttccaaatgactccatccactgcgaacgggaactttatcagagcgctcgagcctggaaggaccataaagcttacatcgacaaggaaattgaggccctgcaggacaaaattaaaaatcttcgcgaggtcagggggcatttaaagcgccgtaagcccgaagagtgcagttgttccaaacagtcctattataacaaggagaaaggagtgaaaaagcaagagaaactcaagtcccatctgcacccttttaaagaagctgcccaggaagtggattcaaaactgcagttgtttaaggagaataaccgtagacgcaagaaggaaaggaaggaaaagcgtcgacagcgaaaaggggaggaatgctcattgccgggactgacgtgcttcacccatgataacaaccactggcagacagcccctttttggaatctgggaagtttctgtgcatgtacatcgtctaacaacaatacctactggtgcttgcgcaccgtgaacgaaacccacaacttcctcttctgtgaatttgcaacaggattcctggaatattttgatatgaatacagacccttatcagttgacaaacaccgtccacaccgtggagcgcggaattctgaaccaactgcacgtccagctgatggagctcaggtcttgccagggctacaagcagtgtaaccccagacctaaaaatttggacgtcggcaacaaggacggaggttcctacgacctgcatcgtggccagctgtgggacggatgggaggggtag

SEQ ID NO: 242713 - DNA, 90 bp, synthetic construct
  misc_feature 1..90: note = Description of Artificial Sequence: Synthetic coding sequence
  source 1..90: mol_type = other DNA
atgaagtacagctgttgtgctttggttctggccgtcctagggacagaactgttggggtcactctgcagtacagttcgttctcccagatag

SEQ ID NO: 242714 - DNA, 519 bp, synthetic construct
  misc_feature 1..519: note = Description of Artificial Sequence: Synthetic coding sequence
  source 1..519: mol_type = other DNA
atgaagtactcttgctgtgctctggtgcttgccgtcctgggcacagagctccttgggtccctgtgctctaccgtcagatccccacgcttcagaggaaggatccagcaggaaagaaaaaatatccgcccaaatataattcttgtcttgacagacgatcaggatgtagagctgggcagcttgcaggtcatgaacaaaactaggaagataatggagcacggaggcgctaccttcatcaacgcgttcgttacaacccccatgtgctgccctagtaggtcaagtatgctaacgggcaagtacgtgcacaatcacaatgtctacacgaacaacgagaattgcagttctccttcttggcaggcaatgcacgaaccaagaacattcgctgtttacctaaacaataccgggtataggaccgcattttttggaaaatacctcaacgagtataacggatcctatattcccccaggttggcgagagtggcttggtctcatcaagaactctcgcttctacaactacacctag

SEQ ID NO: 242715 - DNA, 231 bp, synthetic construct
  misc_feature 1..231: note = Description of Artificial Sequence: Synthetic coding sequence
  source 1..231: mol_type = other DNA
atgaagtatagctgttgtgccttagtgctggccgtgctgggaacagagcttctgggtagtctctgctcaaccgtgcgcagccccagatttagaggacggatacagcaggaacgtaagaatataagacccaatattattctcgtgttaactgacgaccaggacgtcgaactgggctcattgcaggtgatgaataagactcgaaaaatcatggagcacgggggtgccacatag

SEQ ID NO: 242716 - DNA, 258 bp, synthetic construct
  misc_feature 1..258: note = Description of Artificial Sequence: Synthetic coding sequence
  source 1..258: mol_type = other DNA
atgaagtacagctgctgcgcattagtactggctgtcctcggaaccgaacttctgggatccctgtgcagcacagtgcgatctccaaggtttcgtgggagaatccagcaagagaggaagaatattcggcctaacataatcttggtgctgaccgacgaccaggacgtggaattgggtagcttgcaagtgatgaacaaaacccgcaagattatggagcatggaggagcaacatttataaacgcctttgtcaccactccatag

SEQ ID NO: 242717 - DNA, 171 bp, synthetic construct
  misc_feature 1..171: note = Description of Artificial Sequence: Synthetic coding sequence
  source 1..171: mol_type = other DNA
atgaagtactcttgctgcgccttggtcctcgctgtcttggggacagagctgctgggcagcctctgcagtacggtcagatcacccaggttccgtgggagaatccagcaggagcgcaaaaacatccgaccgaatatcatcctggttctgaccgatgaccaggacgtggaatag

SEQ ID NO: 242718 - DNA, 2613 bp, synthetic construct
  misc_feature 1..2613: note = Description of Artificial Sequence: Synthetic coding sequence
  source 1..2613: mol_type = other DNA
atgggcccaccatcactggtgctatgtctgctgtcagctaccgtgtttagcctcctcggagggagtagcgccttcctctcccaccatcggctgaaagggagattccaaagagacaggcgtaatattcgacccaatatcattctggttctcactgatgatcaggatgtggagcttgggtcaatgcaggtcatgaataaaacacgtcggatcatggaacagggtggcgcacacttcatcaacgcattcgtgacaacacctatgtgctgtcctagtcgcagctccatcttgactgggaagtacgtccacaatcataacacctatactaataatgagaactgttcctctccctcttggcaggcccagcacgagtccagaactttcgccgtgtatctgaactccaccgggtaccgcacagccttcttcgggaaataccttaacgaatacaacgggagttatgtgcctccaggatggaaagagtgggtcgggctgctgaagaatagtaggttttacaactataccttatgcaggaacggggtcaaggagaaacacggaagcgattactctaaagactacctcacagatttgatcacgaacgattccgtgagcttcttcagaacatctaaaaagatgtacccacatcgacctgtgctgatggtgatcagccatgcagcccctcacgggcctgaagatagcgcccctcagtacagtcgcctgtttcccaacgcttcacaacatataaccccttcttacaattacgcgcctaatccggataagcactggatcatgagatacactgggccaatgaaacccattcacatggagtttacgaacatgctgcagcgtaaaagactgcagacactcatgagcgttgacgattcaatggagacaatatacaacatgttggtcgaaactggtgaactcgacaacacatatatagtatatactgcagatcatgggtaccacatcggccagtttgggctggttaagggaaagagcatgccttatgagttcgatattcgtgtgccattttacgtgcggggacctaacgtcgaagccggatgtcttaacccccacatcgtgctgaatatcgatctggcccctacaatactcgacatcgccggtttggacatccccgcagacatggatgggaagagcattttgaagcttctggacaccgaacgcccagtcaaccggttccacctgaaaaagaagatgagggtatggagagattccttcctcgtcgagagggggaaattactgcataaaagagacaacgataaggtggacgcccaggaggagaactttctcccgaagtaccagcgggtgaaggatctgtgccaacgcgctgagtatcagacagcttgcgaacagctggggcaaaagtggcagtgcgtggaggacgcaactggcaaactcaaactccacaaatgcaaaggcccaatgaggttgggcggtagtcgcgctctcagtaacctggttcctaaatattatggccagggatctgaagcttgtacatgtgacagcggtgactataaactgagtctcgcagggagaagaaagaaattatttaagaaaaagtacaaagccagctacgtccgcagccgcagtatcaggagcgtggccatcgaggttgacgggcgagtgtaccatgttgggctgggtgatgccgcacagccacgtaatttaaccaagcggcactggccgggtgctcccgaggatcaagacgataaagatggcggagacttctccggcaccggagggctgcctgactactcagccgctaaccctatcaaagttacacaccgctgttacattctggagaacgacacagtgcagtgtgatttggatttgtataagagtctccaggcatggaaagaccacaaattacacatcgaccacgaaattgaaactctgcagaacaagattaagaacctacgggaggtgcgtggacatctgaaaaaaaaaaggcctgaggagtgcgactgccataaaattagctaccatacccagcacaaagggaggctaaagcacagagggtcatcattacatcccttccgcaaaggcctgcaggaaaaagacaaggtgtggcttctgagggagcagaagcgaaaaaaaaaactgagaaagctcctcaagcggctccagaacaacgatacctgttcaatgcctggcttaacctgtttcacccacgataaccagcactggcagacagcgccattttggaccttgggccctttttgtgcctgtacgtccgctaacaataacacatactggtgtatgaggactattaacgagacccataattttttgttttgcgaatttgccaccggatttctggagtattttgatctcaacaccgatccttaccagctcatgaacgctgtcaacacgttggatcgagatgtgctcaaccagctgcacgtgcagctgatggagctgcgatcttgtaagggatacaaacaatgtaacccaagaacccgcaatatggatctcggtcttaaggacggcggatcatacgaacagtaccgtcagtttcagagacggaaatggcctgaaatgaagcggcctagcagcaagtcgctcggacaactttgggagggctgggaaggttag

SEQ ID NO: 242719 - DNA, 2559 bp, synthetic construct
  misc_feature 1..2559: note = Description of Artificial Sequence: Synthetic coding sequence
  source 1..2559: mol_type = other DNA
atgggccctccaagcctcgtgctttgtttacttagcgctaccgtgttcagcttgctcggcggaagctcagccttcctgtcacatcatagacttaaaggccgattccagcgcgacagaaggaatatacgtcctaacatcatcctggtcctgactgatgatcaggacgtcgagctgggcagtatgcaagttatgaataagaccaggcgcatcatggagcagggcggagcacactttattaatgcctttgtgaccacccctatgtgctgtccttcccggtcgtccattctgaccgggaagtacgttcataatcacaacacatacacgaataacgagaattgttcaagtccctcttggcaggcccagcacgaaagtcgcacgtttgcggtttatctgaactctaccggttacaggaccgccttttttggcaagtacctgaacgaatacaatggatcatatgttccccctggttggaaggagtgggtgggactcctgaaaaattcgcggttttataactataccctttgccgaaatggcgtgaaagagaagcacgggtctgactactctaaggactacctaactgacctgatcacaaatgacagtgtgtcattcttccggacctccaagaaaatgtatccacacaggcctgttctgatggtgatttcccatgcagcccctcatggaccagaggactctgctcctcagtatagcagactcttccccaacgcttctcagcacattactcctagttataattacgcacctaatcctgataagcactggatcatgcgctatacagggccaatgaaacctatacacatggagtttactaacatgctacagcggaagagactgcaaaccctcatgagtgtagacgatagcatggaaacaatctataacatgctcgtagaaacaggagaactcgacaatacctacatcgtctacaccgcagaccacggatatcacattggccagtttgggctggttaagggcaaatccatgccctatgaatttgatatcagggtgccattctatgtccgaggtccaaacgtcgaggctgggtgtttgaacccccacatagtgttgaacatcgacctggcgcctaccattctggatatcgctggcctggacatacccgcagatatggacggcaagtctatactcaagctgctcgatactgagcgaccagtcaaccggtttcaccttaaaaaaaagatgcgagtgtggagggatagctttctggtagagcggggtaaactgttgcacaaaagggataatgacaaagtggacgcgcaggaggagaatttcttacccaaataccagagagtcaaggatctttgccaacgggctgagtaccagaccgcgtgtgagcaactggggcagaagtggcaatgcgtggaagacgcgaccggaaagctgaagctgcacaaatgcaaaggcccaatgagacttggcggatcccgggctttgagcaacctggttccaaagtattacgggcaagggagcgaggcctgtacttgtgacagcggagactacaagctgtctttagctggacgtcggaagaaattgttcaagaagaaatataaagcttcctatgtccggagtagatctatccgatcagtcgccattgaggttgatgggagagtgtaccacgtcggcctcggggacgccgcacagcctcggaacttgaccaagcgtcactggcctggcgcacctgaagaccaggacgacaaggacggtggcgattttagtgggactggcggtttgccagactactctgccgctaacccaatcaaagtcactcacagatgctatatcctggaaaatgatactgtgcagtgcgacctcgatctttacaagtccttgcaggcatggaaagaccacaagttgcatattgatcacgaaattgagactttacaaaacaaaattaagaatttgcgagaggtgaggggacatctaaaaaagaagagacctgaggaatgcgattgtcacaagatttcttaccatacccaacacaagggtcggctgaaacatcgcggttccagcctgcatcccttcaggaaaggattgcaggaaaaagataaggtttggttgctgcgcgagcagaagcgcaaaaaaaaactgagaaagctgttaaaacggctgcagaataacgacacttgttccatgcccggattaacctgtttcacacacgacaaccaacattggcaaactgcgccattctggacgctggggccattttgcgcttgtacaagtgcaaacaacaacacgtactggtgtatgagaacaatcaatgaaacacacaattttctgttctgcgagttcgcaaccggatttctagaatattttgatctcaacaccgatccatatcaattgatgaacgccgtaaacacactcgaccgtgacgtccttaaccagctgcatgtgcaactcatggaactaaggtcttgtaagggctataagcaatgcaacccaagaaccaggaatatggacttgggcctgaaggatgggggttcctacgaacaataccgcggacaactgtgggagggatgggagggctag

SEQ ID NO: 242720 - DNA, 870 bp, synthetic construct
  misc_feature 1..870: note = Description of Artificial Sequence: Synthetic coding sequence
  source 1..870: mol_type = other DNA
ttttctgggacgggcggattgccagattatagcgctgctaatccgattaaggttacacacaggtgctacatcttagaaaacgacaccgtgcaatgcgatctggatctctataaaagcctccaagcttggaaagaccacaagctccacattgaccatgagatcgaaactctgcaaaataagatcaagaatcttcgcgaagtgcgaggacacttgaagaaaaaacggcctgaggagtgtgattgccacaagatttcttatcacacacaacataaggggaggttaaagcatcggggatcatctctgcacccattccggaaaggactgcaagagaaggacaaggtctggcttctcagggagcagaagcgaaaaaagaaactcaggaaattactgaagagactgcaaaataacgacacatgcagcatgccgggactgacatgtttcactcacgataaccagcattggcaaactgcccctttttggaccctgggcccattttgtgcctgtacatctgccaacaacaatacctattggtgtatgcgcactatcaatgagacccataactttttattttgcgagttcgcaactggttttctcgagtattttgacctcaatacagatccatatcagttgatgaatgcagtgaatactctggatcgggatgtgctgaatcagctgcatgtgcagctgatggaactgagatcttgtaaggggtacaagcagtgtaaccctagaacaaggaatatggacctcgggctcaaagatggaggcagctatgagcagtatcggcaattccaaagacgaaaatggccagagatgaaacgtccttcttctaagagcctcgggcagctgtgggagggctgggaggggtag

SEQ ID NO: 242721 - DNA, 2604 bp, synthetic construct
  misc_feature 1..2604: note = Description of Artificial Sequence: Synthetic coding sequence
  source 1..2604: mol_type = other DNA
atgggcccaccttctctcgtgctgtgcctgctctctgccaccgttttcagcctcctgggtgggtcaagcgccttcctgtcccatcataggctcaagggccgtttccagagggaccgtcgaaacattcggccaaatatcattctggtgttgaccgatgatcaggatgtcgaactggggtcgatgcaggtgatgaataagacacgcagaattatggaacaggggggtgcccatttcattaacgcctttgtcacaacaccaatgtgctgtccttcgagaagctcaatcctcacagggaaatatgtgcataaccacaacacctacactaataatgagaactgctcgtccccatcctggcaggctcaacatgagtcacgcacatttgcagtttatctgaacagcaccggctataggacagcgttcttcggaaaataccttaatgagtacaacggcagctacgtaccacccggatggaaggaatgggtcggactcctgaaaaacagccgcttttacaattacactctgtgtagaaatggcgtgaaagaaaagcacggttccgactactctaaggactacctgacagacctaattacgaatgactcagtgtccttctttagaacctccaagaagatgtatccacaccgtccagtgctaatggtgatctcacatgcagccccacacggcccagaggacagtgctccacaatactcgagactctttcctaatgcttcccaacacattaccccttcctataattacgccccaaaccccgataagcactggatcatgcgctataccgggcctatgaagccaatccatatggaattcactaacatgctccagcgaaaacgtcttcagaccctgatgtccgtggacgactccatggaaactatctataatatgttggtcgagaccggcgaactggacaacacgtacatcgtgtacacggccgaccatggctaccacatagggcagtttgggctggttaagggtaagtccatgccctatgagttcgatattagggtaccattttacgtacggggtcccaatgtcgaggcaggatgccttaatcctcacattgttctcaacatcgatctggcacccactatcttggacattgctggtctggacattcctgccgacatggacgggaaatcaatcctcaaactactcgacaccgagcggcctgtgaacagatttcacctaaaaaaaaagatgagggtgtggcgggattcatttctggtcgagcggggaaaactcctgcacaagagggacaacgataaagtggacgcgcaagaggagaatttcctgcctaagtaccagagggtcaaggatctgtgccagagagccgagtaccagactgcatgtgaacagctgggccagaaatggcagtgcgtggaggacgcaaccggcaagctgaagctccacaagtgcaaaggcccaatgcgattaggaggttcacgagcactttcgaacctcgtgccgaagtattacggacagggcagtgaggcctgtacatgcgattccggcgactataagctgtcactggcagggaggaggaagaagttgttcaaaaagaaatataaggcctcatacgtgaggagccgaagcattaggtctgtagcaatagaagtggatggcagggtgtaccacgtcggcttaggcgatgcagcccaacccaggaatcttacaaagcggcactggcccggtgcgcctgaagatcaggacgataaggatggaggggacttctcaggaactgggggattgcccgattacagcgcagccaaccctattaaagtgactcatcgttgttacattctagaaaatgataccgtgcagtgtgacctggacctctataagagtttgcaagcctggaaagaccataagctgcacattgatcacgagatcgagacactgcagaataagatcaagaacctccgggaagtccggggtcatctgaagaaaaagaggccagaggaatgtgactgccacaaaataagctaccatacgcagcataaaggtagactcaagcaccggggttctagtctgcaccccttccggaagggactgcaagagaaagataaagtttggctcctgcgcgagcagaagcggaagaaaaagctcaggaaattgctcaagcgactgcaaaacaatgatacatgttctatgccaggcctgacttgttttacacatgataatcagcactggcagacagcccctttttggacacttggacccttttgcgcttgtaccagcgccaacaacaacacctattggtgcatgcgcaccatcaacgaaacccacaatttcttattctgcgagtttgccacaggtttcctggaatactttgatctgaacaccgacccatatcaactgatgaacgcagtaaacacgctggatcgcgatgtgctaaaccagctgcacgtccaacttatggaattgcggtcctgcaagggctacaagcagtgcaatccacggacgagaaacatggatcttgacgggggatcctatgaacagtaccggcagttccagcggcgtaaatggcctgaaatgaagcggcctagcagtaaatccctcggacagttgtgggagggatgggaggggtag

SEQ ID NO: 242722 - DNA, 2613 bp, synthetic construct
  misc_feature 1..2613: note = Description of Artificial Sequence: Synthetic coding sequence
  source 1..2613: mol_type = other DNA
atgggtccaccctccctcgtcctgtgcctgctctctgctaccgttttttccttgctcggcggtagcagtgccttccttagccaccacaggctgaaaggcaggttccaacgggaccggagaaatattcgaccaaacatcattttggtattaaccgatgatcaggacgtggagctcggctcgatgcaggtcatgaataagacacgacgtattatggaacagggcggagcccactttataaacgccttcgtgaccactccgatgtgctgtccatctcggtccagcatactgacaggcaaatacgtccataatcacaatacctacacaaacaatgaaaactgcagctcgccttcttggcaagcccagcacgaatcaagaacttttgctgtttacctgaattcaacgggttaccggacagccttttttggaaagtacctcaatgagtataacggttcctatgttcctcccggatggaaggagtgggtgggcttattaaagaatagtagattttacaactatacactttgccgcaatggggtgaaagagaagcatggctctgattatagcaaggactacttgacagatctaattaccaacgactctgtgagcttctttcgcacgtcgaaaaaaatgtacccccatcgcccagtgctgatggtgatatcgcacgcagcacctcacgggccagaggactccgcccctcagtactccagactctttccgaacgcttctcaacatatcaccccaagctataactacgcacccaaccctgacaaacactggattatgagatacacaggtcccatgaaaccgatacatatggaattcacaaatatgctacagagaaagaggcttcagactcttatgagcgtggacgatagcatggagacaatatataacatgctcgtagagaccggggaacttgataacacgtatatagtttacactgctgatcatggataccatatcggccagttcggcctggtcaagggcaaatccatgccatatgagttcgacattcgcgtcccattctacgtgaggggtcctaatgttgaagctggctgcctgaacccccacatcgtgctgaatatcgatctagctcccaccatactcgatatagcaggcctggacataccggcagatatggatggcaagtcgatactgaagctgttagacaccgagcgcccagtgaatagatttcatttgaagaaaaagatgagggtgtggcgggacagcttcctggtcgaaaggggtaaacttctgcataaacgggataatgacaaggtggatgctcaggaagagaatttcctgcccaagtatcagagggtaaaagatctgtgtcagcgggctgaatatcaaaccgcttgcgagcagttggggcagaaatggcagtgcgttgaggatgcgacaggaaagttgaagctgcacaaatgtaaaggtccaatgcgcttaggcggaagcagagctctctctaacttggtgccgaaatactatggacaaggatcagaggcatgcacttgtgatagcggggattataagcttagtttggcagggcgacgaaaaaagctcttcaagaagaagtataaagccagttacgtacgcagtagaagtatcaggtccgtggcaatagaggtggacggtcgcgtctaccatgtgggcttgggggacgcggcacagcccaggaatctgaccaaaaggcactggccaggagcacctgaggaccaggacgacaaggacggcggtgatttcagcggcacgggcggacttcctgactatagcgcagcgaacccgatcaaggtcactcatagatgctacattcttgagaacgacaccgtgcagtgcgacctcgatctctacaaaagcctccaggcctggaaagatcataagctccatatcgaccacgagattgaaactttgcaaaataaaatcaagaacctgcgggaggttaggggacaccttaagaagaagcgacccgaagagtgtgattgccacaagatctcatatcatactcaacataaaggtcgcctaaaacacagaggctccagccttcacccttttaggaaaggtttacaggagaaggacaaggtgtggctgctgagggagcaaaagagaaaaaagaaactgcgtaaacttctcaagcgcttgcagaataacgatacttgcagcatgcctgggctaacttgtttcacgcacgacaaccagcattggcaaacagcccctttttggacactgggaccattttgcgcttgcacaagcgctaacaacaacacatattggtgcatgaggaccatcaacgagacacacaatttcctgttctgcgagtttgccactgggtttctcgagtatttcgatctgaatactgacccttaccaattaatgaacgccgttaacacactggaccgggatgtcctgaaccagctacatgtgcagctgatggagctgcggtcttgtaagggttataagcagtgcaatccgcgtactagaaatatggatctcggcctgaaggatgggggttcatacgagcagtatcgtcagtttcagcgtcgcaaatggccagaaatgaagcgtccctcttctaaaagcctcggccagctgtgggaaggctgggagggatag

SEQ ID NO: 242723 - DNA, 1125 bp, synthetic construct
  misc_feature 1..1125: note = Description of Artificial Sequence: Synthetic coding sequence
  source 1..1125: mol_type = other DNA
atggctgctcctgctttgggactggtgtgcgggaggtgcccagagttaggacttgtcttactgctcctgctcctatccttgctctgcggtgctgccggatcccaggaagcgggaactggggctggagccggatccttggccggttcttgtggctgcggaacaccacaacgccctggagcccacggctctagtgcggctgcccacaggtacagtcgggaagcaaacgccccaggtccggtcccaggcgaacgtcagctggctcacagtaagatggtgcctatacccgcaggagtttttactatggggaccgatgacccccagataaaacaagatggagaagctcctgcaaggcgtgtgaccattgacgctttttatatggatgcttatgaggtgtctaatacagagtttgagaaatttgttaattccactggatacctgaccgaggcagaaaagttcggtgattcattcgtgttcgagggtatgctatcagagcaggttaagactaacatccagcaggccgtcgccgcagctccctggtggcttcctgtcaaaggagctaactggcgtcatcctgagggccctgactccactatactgcacaggccagatcatcccgtactgcatgtaagctggaatgacgcagtggcttattgcacatgggctggaaaaagattgcccactgaggccgaatgggagtattcatgccgaggcggtctccacaatcggttattcccatggggtaacaaactgcaacccaaaggtcaacactatgcgaacatttggcagggagagtttccagtgaccaacacaggggaggacgggtttcaggggaccgcacccgtagacgccttccccccaaatggatacggtctgtacaatatcgtgggtaacgcttgggagtggaccagtgactggtggacagtacaccattctgtggaggagactctgaaccctaaaggtcccccttcaggaaaagaccgtgttaagaaagggggtagctacatgtgtcatagatcttactgctaccgctatcgctgtgcagccagatctcagaataccccagattcgtcagcctccaaccttggctttcgttgtgccgctgaccggctgcctacgatggactag

SEQ ID NO: 242724 - DNA, 1281 bp, synthetic construct
  misc_feature 1..1281: note = Description of Artificial Sequence: Synthetic coding sequence
  source 1..1281: mol_type = other DNA
atggccgctccagcccttggcctagtgtgcggcaggtgcccagagctggggttggtgctcctcctgttactgctgtctctcctctgcggggctgctggctcccaggaagccggtacaggtgccggagcaggctcccttgcaggaagctgcgggtgtgggacaccgcagaggcccggagcccatggaagcagtgcagccgcacatcgttattctcgcgaagccaatgcacctggccctgtgccaggcgaacgtcagctcgcgcactctaagatggtgccaatacccgctggtgttttcactatggggaccgacgatcctcagattaagcaagacggtgaggctcccgcaagaagggtgacgattgatgccttttacatggacgcctatgaggtgagcaacacagagttcgagaagttcgtgaactccacagggtacttgacagaagccgaaaaattcggggatagcttcgtattcgagggcatgctgtctgaacaggtgaagactaacatccaacaggccgtcgctgccgctccctggtggttgccagtgaaaggtgctaactggcggcatccagagggacctgactcaaccatcctgcatcgccctgaccaccctgttcttcatgtaagctggaacgacgctgtcgcctattgcacgtgggccggaaagcggttgccaacagaggccgaatgggaatacagctgccgcggtggcctccacaataggctgtttccgtggggaaataaactgcagccgaaagggcaacactatgctaacatttggcagggtgaatttccagtcacaaataccggcgaagacggctttcagggaacagcaccagtggacgcctttccaccaaacggctacggcttatataacatcgtcggtaacgcgtgggagtggacaagtgactggtggactgtgcaccactctgtcgaagagacactgaatccgaaaggccctccttccggcaaagatcgagtgaaaaaaggcggatcctacatgtgccaccgatcccaggagtattacgacccctatttccaggacgtggccagcgagatgctgcggagacacactgcctcacggtggaaagcttttagctctctggaaccatgctgttccattaggcgacaccagcagtatgccgcaatcgagagactgacctgtgggaaatttgagctgcgttgtgcgtctctgagaaaaattgactgtttaaacactaatatcgcttgtagctattccatgcgccaggatggcccacgcctgcattgtgtcgattag

SEQ ID NO: 242725 - DNA, 1287 bp, synthetic construct
  misc_feature 1..1287: note = Description of Artificial Sequence: Synthetic coding sequence
  source 1..1287: mol_type = other DNA
atggcagcaccagccctgggattggtgtgtggcagatgccctgaacttggcttggtgttgctgctgctgctcctatcactcctgtgcggtgccgcagggtcccaggaagccggtaccggggctggggctggcagcctggctggaagctgtggatgcggaaccccgcagaggcctggcgcacatggcagcagcgctgcagctcatagatattcacgcgaagctaacgccccagggccagtgcccggagagcggcaactggctcacagcaagatggtccccatacctgccggtgtcttcactatgggaacagatgatccccagattaaacaggatggtgaagccccagcgagaagagtgacaatcgacgccttctatatggacgcctatgaggtgtctaacaccgaatttgagaagttcgtgaatagcacaggctacctcaccgaagccgaaaagttcggagatagcttcgtgttcgaaggaatgttatccgaacaggtgaagacaaacattcaacaagctgtggcggcagccccttggtggctgcccgtaaaaggggcaaattggaggcaccctgagggcccagactcaactatcctgcacagaccggaccatccggtgctgcatgtatcttggaatgatgccgttgcctattgcacctgggccggaaagcgattgcctacagaagccgaatgggagtacagttgtcggggtggactacacaacaggctgttcccttggggcaacaagctgcagcccaaaggccagcactacgcgaatatttggcagggcgagttccctgtgaccaacactggggaggatggctttcaaggcaccgcgccagtggatgcctttcctcctaacggctacggtctttacaacatcgtcggcaatgcttgggagtggaccagtgattggtggacagtacaccacagtgtcgaagagactttgaaccccaaggggccaccctctgggaaggaccgggtcaaaaaaggcggactgtcaaaagcacaccagagaatttcacaggaatactacgatccctactttcaggatgtagcatccgagatgctgcgtcgccacaccgctagtaggtggaaagcgtttagctccctcgagccctgctgctccatccggagacaccagcaatacgctgccattgaacgtctgacctgcggaaaatttgaactgcgctgtgctagcctgcggaaaatcgattgcctaaacaccaatatcgcgtgcagctatagtatgcgacaagatggcccaaggctgcactgtgtcgactag

SEQ ID NO: 242726 - DNA, 1050 bp, synthetic construct
  misc_feature 1..1050: note = Description of Artificial Sequence: Synthetic coding sequence
  source 1..1050: mol_type = other DNA
atggccgctcccgcactgggactagtatgcgggaggtgccccgagttaggactcgtgttactgctgttactactgtccttgttatgcggtgccgctggatctcaggaggcagggaccggggctggcgcaggatcactagctggaagttgcggatgcggtactcctcagcgtccaggcgcacacggctcttcagcggcagcccacaggtattcccgagaagctaacgctcctgggcctgttccgggtgagagacagctggctcattccaagatggttccgatcccagcgggtgttttcaccatggggacggacgaccctcagataaaacaggacggcgaggctcccgctcgcagggtcaccattgacgcattttacatggacgcttacgaggtcagtaatactgaatttgaaaagtttgttaactcaacgggataccttacagaggtggccgctgctccctggtggctgcctgtgaagggggctaactggaggcacccagaaggcccagactctaccatcctgcaccgcccagaccaccccgtgctccatgtctcctggaacgacgccgtcgcatactgtacatgggccggaaaaaggctccccacggaagccgagtgggagtattcatgtcgaggaggattacataatagactcttcccttgggggaacaagttacagcccaaaggacaacactacgctaacatctggcagggcgaatttccggtcacaaacacaggagaagacggtttccagggcaccgcacctgtggatgcttttccacctaacggttatggcctgtataatatcgtgggaaatgcgtgggaatggaccagcgattggtggaccgtgcaccactcagttgaagagaccctgaaccccaaaggacctccttccgggaaagatcgggttaagaaaggcggaagttacatgtgccatcgatcttattgctatcgttatcgatgcgccgcaagaagtcagaacacccccgacagttcagcttctaacctgggtttccgttgtgccgcagacaggctccccacaatggactag

SEQ ID NO: 242727 - DNA, 1065 bp, synthetic construct
  misc_feature 1..1065: note = Description of Artificial Sequence: Synthetic coding sequence
  source 1..1065: mol_type = other DNA
atggctgccccagctctcggcttggtgtgcggaaggtgccctgaattggggctggtgctgctgctgctactcctgagccttctttgcggcgctgccggatctcaagaagcagggacaggcgcaggcgcaggaagcctggcgggatcctgcggctgtggcaccccccagcggccaggagcccacggatcgagcgccgctgctcaccgctacagccgggaggccaatgcgcctgggccagtccctggggagaggcagctggcacattctaaaatggtgccaatcccagcaggggtgtttacaatgggcaccgacgacccgcagattaagcaagacggagaggcccctgccagacgggttacgatcgacgctttttatatggatgcctacgaagtaagtaacaccgaattcgagaagttcgtgaatagtaccggttatctgacagaggccgaaaagtttggcgactctttcgtttttgaaggcatgctgagcgagcaagtgaaaaccaacattcagcaggcagtggctgccgcaccgtggtggctgcccgtcaaaggagctaactggagacatcccgaaggcccagatagtacaatactgcatcgcccagatcaccccgttctgcacgtctcctggaatgacgcggtcgcctactgcacctgggcaggaaaaaggctgccgaccgaggccgagtgggaatactcgtgccgtggcggtctgcataacagactctttccttgggggaacaagctgcaacccaaggggcagcattatgctaatatctggcagggtgagtttccagtgaccaacacgggagaggacgggttccagggtacagcacccgtggacgcgttccctcctaatggctacggattatacaatatcgtaggcaatgcatgggagtggacttcagattggtggactgtgcatcactcagtcgaagagactctgaatccaagctattgctatcggtaccgatgcgccgctaggtcccagaatacccctgattcttccgcatccaatctgggttttagatgcgcagccgatcggcttccgacaatggactag

SEQ ID NO: 242728 - DNA, 1638 bp, synthetic construct
  misc_feature 1..1638: note = Description of Artificial Sequence: Synthetic coding sequence
  source 1..1638: mol_type = other DNA
atgcttctgctgcaccgggctgtcgttctccgtctccaacaggcatgcagactaaaatccatcccttctaggatctgcatccaggcctgctccaccaatgatagttttcagccacagaggccatctcttacattctctggagacaactcgtcaacgcagggctggagggtgatgggcacattgctgggcctgggagccgtgcttgcttaccaagatcaccgctgccgcgctgcacaggaatccacacacatatacacaaaggaagaagtcagctctcataccagcccagaaaccggcatttgggttaccttggggtctgaggtattcgacgtcaccgaatttgttgacttgcatccaggcggtccatcaaagctcatgctggccgcaggcggtcctctggagcccttttgggcactgtacgccgtacacaatcagagtcacgtgcgggaactgctggcacaatacaagattggcgaactgaacccagaggacaaagtggctcccactgtagagacatctgacccctacgctgacgaccccgttcgacatccagccttgaaagtgaattctcagcgaccgtttaacgcagagcccccaccagagctgctgactgagaattacatcacccccaacccgattttttttacaaggaatcatctcccggttcccaatttagaccctgatacctatcgccttcacgtcgtgggcgcacctggcggacagtcactgagtcttagtctggacgatcttcacaactttccaagatatgaaatcaccgttacgttacaatgtgccggtaacagacggtcagaaatgacacaagtgaaagaggtcaaggggctcgagtggagaaccggagccatctctacggccagatgggcgggagcgaggctgtgcgacgtgttggcacaggccggacatcagctgtgcgaaacagaagctcacgtgtgtttcgaaggcctcgacagcgaccccactggcaccgcctacggcgcttcaattccgctagcgagagcaatggatccggaggccgaggttttattagcctacgaaatgaacggccagcccctccctagagatcatggctttcccgttcgcgtggtggtgcccggagttgtcggtgcccgtcacgtaaagtggttaggtcgagtgagtgtgcagccggaagaatcatatagccactggcagcgtagagattacaaaggtttcagcccctcagtggactgggagactgtcgactttgattccgctccatcaattcaggaactgcctgtgcagtctgccatcacagagcccagggacggcgagactgtagagagtggcgaggtcacaatcaaaggatatgcttggtccgggggagggagagcagtcatacgcgtggatgtatctctcgatggcggtctgacgtggcaagtcgcaaagctggacggcgaagaacagcgacctcggaaagcgtgggcatggcgactctggcagctgaaagctccagtgccggctggacagaaggagttaaatatcgtatgtaaagctgtcgatgacggttacaatgtacaacccgatactgtggccccaatctggaacctacgcggtgttctcagcaacgcatggcatagagtgcacgtgtatgtctcgccatag

SEQ ID NO: 242729 - DNA, 1638 bp, synthetic construct
  misc_feature 1..1638: note = Description of Artificial Sequence: Synthetic coding sequence
  source 1..1638: mol_type = other DNA
atgctcctgctgcatcgcgctgtggtcctgaggttgcagcaggcgtgccgtctgaagtccatcccctctcgcatttgcatacaggcatgttccacaaacgattcttttcagccccagcgcccaagtctgacattttccggggacaatagtagtacccagggttggcgtgtgatgggaaccctgttgggcctcggagccgtgctggcctatcaagatcatcgttgtcgcgcagctcaggaatctactcacatctatacgaaggaggaagtctcatctcataccagtcctgagaccggaatttgggtgactttgggatccgaagttttcgatgtaaccgagtttgtcgacctccatcccggagggccaagtaaactgatgctggccgctggtgggccactggagcccttttgggcactttacgctgtgcacaaccaatcacacgttcgggaactgttggcacagtataagatcggtgaactgaatcccgaggacaaggttgcgcctacagtagagaccagcgacccttacgccgatgatcccgttcggcatcccgctctcaaggttaactctcagcgcccattcaacgccgaaccgcctcccgaactactcacagagaactatatcactcctaatcctattttcttcacccgcaaccatctgcccgtgcctaaccttgacccagacacatacagactgcacgttgtgggtgcccctggaggtcagtcgctgagcctttctctggacgatttgcataattttccaagatacgagatcacagtgacattgcagtgcgccggaaatcggaggtccgaaatgacacaagtgaaggaggtgaaggggttggaatggcgcacgggtgcaatttccaccgccagatgggctggcgcacggctgtgtgatgtattagctcaggcaggccaccagctgtgcgaaactgaagcacatgtctgcttcgaggggttagatagtgatcccaccggaaccgcttatggcgcttctatccccctagcccgtgctatggatccagaggctgaagtgctgctggcctatgagatgaatgggcagcctctccccagagaccatgggtttcctgtgcgcgtagtggtgcctggtgttgtgggggctaggcatgtgaagtggcttggcagggtttccgtgcaaccggaagagagttactcacattggcagagacgcgattataagggcttctccccttctgtagactgggagactgtggatttcgactcagcgcctagcatccaggagctaccggtccagtcggccatcacagagccgcgtgacggagagaccgtggaaagcggggaggtcaccataaaaggctatgcatggtctggaggcggacgagcggtaatccgggtggacgtgtctctggacggcggtcttacctggcaggtggccaaactcgatggggaggagcaaaggccaaggaaggcctgggcctggcggctttggcagttgaaagctcctgttcccgctgggcagaaagagttgaacattgtctgtaaagctgtagacgatgggtataacgtgcaaccagatacagtggcccctatctggaacctccgaggggttctctcaaatgcctggcatagggtccacgtatacgtctcaccctag

SEQ ID NO: 242730 - DNA, 1638 bp, synthetic construct
  misc_feature 1..1638: note = Description of Artificial Sequence: Synthetic coding sequence
  source 1..1638: mol_type = other DNA
atgctactcctacaccgagctgttgtgttgcgccttcaacaagcgtgtcgattgaaaagcatcccctctcgcatatgtatccaagcctgctctacgaacgactcattccagccccagagaccgtctctgacatttagcggtgataacagtagcacgcaggggtggagggtgatggggaccttgttagggttaggtgccgtactggcctaccaagaccataggtgccgtgccgctcaagagtcaactcacatatacactaaggaggaggtctccagccacacaagcccagagacaggcatttgggttactctagggagcgaggtgtttgatgttacggagttcgtcgacctgcaccccggaggtcctagcaagctgatgttagcagcaggtggccctctggagcccttctgggcactctatgccgtgcataaccagtcacatgtgcgggaactgctggctcagtacaaaattggcgagctgaacccagaggacaaagtcgcgccaactgtagagacatctgatccctacgccgacgatccggttcggcaccccgcactgaaagttaactcccagcgacccttcaacgcagaaccacctccggaactcctcactgagaattacatcacccccaacccgatattcttcacacgaaaccatcttcccgtcccaaacttggacccggatacgtaccgtctccacgtagtgggcgctcccggaggccagtctttaagtctgtcgttggatgacctgcacaatttccctaggtacgagattaccgtgacactgcagtgtgcgggaaaccgtcgctctgagatgacccaagtaaaagaagtgaagggccttgagtggcgtacaggcgctatctctacggcccgttgggcaggcgctcggttgtgcgatgtgcttgctcaagctggacatcagctgtgtgagacagaggcacacgtgtgtttcgaggggttggatagtgaccccaccggcacagcttatggggctagcatccctcttgctagggcgatggaccctgaggccgaggtccttctggcttatgaaatgaacggccagcctctgccacgcgatcatggctttcccgttagagttgtggttcccggagtggttggggcaaggcacgtaaagtggttggggagagtgagcgttcagcccgaggaaagctattcacactggcagcggagggattacaaaggctttagtccctcagtagattgggagacagtggatttcgatagcgccccatcaattcaggagctgcccgtgcagagtgctatcaccgaacctcgggacggcgagaccgtggagtccggagaagttacaattaaagggtatgcctggtctggagggggacgggcagtaatccgtgtggatgtgagtctggacggtggcctcacttggcaagtggcaaaactcgacggagaagagcaacgcccacgaaaagcctgggcctggagactatggcagcttaaagcaccagtacccgcaggacagaaagagctgaatattgtgtgtaaggccgttgacgacggctataatgtgcagcccgatactgtggccccaatttggaatcttcggggagtcctttccaacgcctggcacagagtgcatgtatatgtgtccccctag

SEQ ID NO: 242731 - DNA, 1638 bp, synthetic construct
  misc_feature 1..1638: note = Description of Artificial Sequence: Synthetic coding sequence
  source 1..1638: mol_type = other DNA
atgctgctgttgcaccgggctgttgtcctgcgcctgcaacaagcttgccgcctaaaatccatcccttcacgcatctgtattcaggcgtgcagcactaacgattccttccagccgcagaggcccagccttaccttttctggggataattccagcacgcaggggtggcgggtgatggggaccttgctgggcctgggcgcagttctcgcataccaagatcacaggtgtagagctgcacaggaaagtactcatatctacaccaaagaggaggtgtcatcacacacctcccccgagaccgggatctgggtgactctgggttctgaagtgtttgacgtcactgaattcgtggaccttcaccctggcggaccatcaaaacttatgctggcggctgggggtccactcgagccattttgggccctgtatgcagtccacaatcagtcccacgtcagggaactgttggcgcagtacaaaatcggagaactcaatcctgaagacaaagtcgctccaactgtggagacttctgatccttatgctgacgaccccgtgcgtcacccggctctgaaggtcaatagtcaaagaccttttaacgccgagcctccccctgaattgctgaccgagaattatataacacccaatccaatttttttcacccgtaatcacttaccagttccaaatctggaccctgatacataccggctccacgtcgtcggtgctccagggggacaatcattgtccttgtccctggacgatctgcacaacttccccaggtacgagatcacagtcacgctgcagtgcgccggaaatcgcagatctgaaatgactcaggtgaaagaagtgaagggcctggaatggaggacaggagccatcagtacagcaagatgggcgggagcaagactctgtgatgttctggctcaggccggacaccaactctgtgaaactgaggcccacgtatgctttgaaggtcttgattccgatccaaccggcaccgcctacggggcatccatcccgctagccagagcaatggacccagaagccgaggttctcctggcttatgagatgaacggtcagccgctccccagagaccatggcttccctgtccgtgtggtcgtccccggtgtcgttggagccagacatgtcaaatggctcggcagggtatctgtgcagcctgaggagtcctactcacattggcagagaagggattataaaggtttcagtccatctgttgattgggaaacagtggattttgatagcgctccatccattcaggagctgcccgtgcagtccgccatcactgaaccaagggacggcgagactgtagagagtggagaagtgacaataaagggatacgcctggtctggcggagggagggctgtgatacgggtcgacgtctccttggatggcggattgacctggcaagtagcaaaactggacggtgaggaacagcgcccacgtaaagcctgggcatggaggttgtggcagcttaaggcgccagtgccagctgggcagaaggaattgaacatcgtgtgcaaagcagtggacgatgggtataatgttcagccagatactgtagcacccatttggaacttgagaggggtcctttccaatgcctggcatcgagtgcacgtgtatgtgtctccatag

SEQ ID NO: 242732 - DNA, 489 bp, synthetic construct
  misc_feature 1..489: note = Description of Artificial Sequence: Synthetic coding sequence
  source 1..489: mol_type = other DNA
atgcttctgctccacagagccgtggtgctgcggttgcaacaggcgtgcaggctcaaatccattccaagccgaatttgcatccaagcctgctcgacaaatgacagtttccagccccagcggccaagcctcactttttccggggacaactcctccacacaagggtggcgcgtaatgggaacactgttaggactgggtgctgtgctggcctaccaggaccacagatgcagggctgctcaggaaagcactcatatctatactaaggaggaggtcagtagccacacgtctcctgagactggcatttgggtcacactgggtagcgaagttttcgatgttacggaattcgtcgacctccatcctgggggtccgagcaaacttatgctggcagccggtggacccctggaacctttttgggccctgtacgctgtccataaccagtcccacgtgagagagctgctagcccagtacaagataggcgaactaaacccctag

SEQ ID NO: 242733 - DNA, 132 bp, synthetic construct
  misc_feature 1..132: note = Description of Artificial Sequence: Synthetic coding sequence
  source 1..132: mol_type = other DNA
atgctgcttctccacagagcagtcgttctgaggctacagcaggcctgtagactcaaaagcattccctctagaatctgcatccaggcctgttctaccaatgactcgtttcagccgcagagaccatctctttag

SEQ ID NO: 242734 - DNA, 1638 bp, synthetic construct
  misc_feature 1..1638: note = Description of Artificial Sequence: Synthetic coding sequence
  source 1..1638: mol_type = other DNA
atgctgcttttacaccgtgctgtggttctgcggctgcagcaggcatgccgcttgaagtctattccctccaggatatgcatccaggcttgtagtacaaacgatagttttcagccgcagcgaccctcattaacattctctggtgataactctagtacccaaggttggcgggtgatgggaaccctgttagggcttggggcagtcctcgcttatcaggatcatcgatgtcgcgcagcccaggagagcacccacatctataccaaagaggaggtctccagccacacctcccctgaaaccggtatttgggtgactctgggctccgaggtttttgatgtgacagagtttgttgacctgcatccaggtggcccttctaaactgatgctcgcagccggaggccctcttgagcccttctgggctctgtatgctgtacataaccagagccacgtccgggagttgctggctcagtacaagattggggagcttaacccagaagataaagtggctcccaccgtggaaactagtgacccctacgctgatgatcctgtgcggcaccccgctttgaaggtgaacagtcagcgcccattcaacgccgagccaccaccagaactgctcaccgagaattatattaccccaaatcccatctttttcactcgtaaccacttaccagtgccaaacttggaccctgatacataccgccttcacgtggttggcgctcccggaggacaatctctgtctctatctctagacgatctccacaattttccacggtacgaaataacagtgactctgcagtgtgcagggaatcgacgctcagagatgacccaggtcaaagaagtgaaggggctcgagtggagaaccggagcaatctctactgcgaggtgggcgggtgccagactttgtgatgtactggcccaggctggacaccaattgtgtgaaactgaggcccatgtttgcttcgagggattggatagcgatcccaccgggactgcatatggtgcttctataccgctggctcgagccatggatcccgaggccgaagtactcctagcctatgagatgaacggacagcccctccctagggaccacggttttcctgtgagagttgtggtgcccggagtggttggggcacggcacgtgaaatggttggggagggtgagtgtccaaccagaagaatcttattcacactggcaaagacgggattacaagggatttagtcccagcgttgactgggaaacggtcgactttgattcagccccttcaattcaagaactgccagtccagagcgccattactgagccccgagacggagaaactgtagagtctggtgaggtgactattaagggatacgcctggagtggaggaggtcgcgcagtgatccgggtggacgtgagcttggacggcggactgacctggcaggtggctaaactcgacggcgaggaacagcgccctcgtaaggcctgggcatggcgactgtggcagttgaaagccccagtgcctgccggacaaaaagaattgaatattgtgtgcaaagctgtggacgacggatataacgtccagccagatactgttgctccaatctggaacttacggggtgtgctgagcaacgcttggcatagagtacatgtgtatgtgtccccttag

SEQ ID NO: 242735 - DNA, 1638 bp, synthetic construct
  misc_feature 1..1638: note = Description of Artificial Sequence: Synthetic coding sequence
  source 1..1638: mol_type = other DNA
atgctattgttgcatagggctgtggtgctgaggctgcaacaagcctgtagattgaaatcaattccatcaagaatatgcatacaggcctgcagcacaaacgatagctttcaacctcagaggccaagcctaacattcagcggcgacaattcctctacccagggatggcgcgtaatgggaacccttctgggtctgggcgctgtactcgcttaccaggaccacaggtgtcgcgctgctcaggaaagcacccacatctatacaaaagaggaggtttccagccacactagtcccgagacagggatttgggtgacactcggcagtgaagtgtttgacgttacagaatttgtggaccttcaccctgggggaccatccaaactcatgctggccgcaggcggaccgctcgaaccattttgggccctctacgctgtgcacaaccagagccatgtccgggaactattggctcagtataagattggcgagctcaacccagaagacaaagttgcccctaccgttgagacatctgacccctacgccgacgaccccgttcgtcacccagccctgaaagtgaattctcagagaccatttaatgccgaaccccctccagagctgctgactgagaactacatcacaccaaaccctattttcttcactaggaaccacctcccagtcccgaaccttgacccagacacttacagactacatgttgtgggagctccgggaggacaatcactctctctatcactggatgacttacataacttcccaagatatgaaatcacagtaacattacagtgtgccggaaaccggaggtcagagatgacacaggtcaaggaagtgaaaggcttggagtggaggaccggggcaatcagtaccgctcgctgggccggagccaggctctgtgacgtgctggcccaagctgggcatcagctttgtgagaccgaggctcacgtctgtttcgaaggcctggactctgacccaaccgggacagcatacggggcatcgatccctttagcacgggctatggatcccgaggccgaggtgcttctggcttacgagatgaacggacagccgctgcctcgtgaccacggttttccagtgagagtagtagtgcccggagtagtgggcgcaagacacgtgaagtggctcggcagggtttcagtgcagcctgaggaatcttactcccactggcagcggagggattacaaaggcttcagccccagcgtggattgggagactgttgatttcgacagcgctccgagcatacaggaactccccgtgcagtctgctatcacggagcctcgggacggcgagactgtggagtccggcgaagtcaccatcaaggggtatgcgtggagcggcggaggcagagccgtaatccgcgtggacgtaagcctcgacggcggattaacttggcaggtcgccaaactcgatggcgaagagcaaagacccaggaaagcttgggcttggagactgtggcagctcaaggcacctgtccctgcaggtcaaaaggaattaaacatcgtgtgcaaggctgtggacgatggctacaacgtccagcctgataccgtcgcccctatatggaacctgaggggtgtgctgtccaacgcatggcatcgcgtgcacgtgtacgtctcgccatag

SEQ ID NO: 242736 - DNA, 366 bp, synthetic construct
  misc_feature 1..366: note = Description of Artificial Sequence: Synthetic coding sequence
  source 1..366: mol_type = other DNA
atgctgcttctccaccgggctgtcgttctgcgacttcaacaggcctgccggcttaagtcaataccatctagaatctgcatccaggcctgcagcaccaacgattcattccagccacagcgccctagcctgacttttagcggtgacaattcttcaacccaaggatggagggttatgggtaccctcctcgggctgggcgctgtgctagcttatcaagaccatagatgccgcgctgcacaagagtcaactcatatatacacaaaggaagaggtctccagccatacctcaccggaaacaggcatttgggtaaccctgggctccgaagtgtttgatgtcactgagttcgttgatctgcacccaggaggttag

SEQ ID NO: 242737 - DNA, 783 bp, synthetic construct
  misc_feature 1..783: note = Description of Artificial Sequence: Synthetic coding sequence
  source 1..783: mol_type = other DNA
atggccgaaagtgaggccgaaaccccctcgacaccaggcgaattcgaaagtaagtacttcgaatttcatggagtacgcctgccaccattctgtcgtggcaagatggaagaaatcgctaacttcccagttcggcctagcgacgtttggatagtcacataccccaagtcagggactagtctcctacaggaagtggtatacctcgtctcacagggggcagatcccgacgaaatcggtctgatgaatatagacgagcagttacccgtattggagtacccccagcccggacttgacatcataaaagagctgacgtctccgcgactgattaaatcccacctcccgtatagatttctgccatccgaccttcacaacggggatagtaaagtaatctatatggccagaaacccaaaagacttggtggtctcgtactaccagttccacagatcactcagaactatgagttatagagggacctttcaggaattctgtcgaagatttatgaatgataagctgggatacggctcttggtttgagcacgtacaggaattctgggaacaccgtatggactcaaacgtcctgtttctcaagtacgaggatatgcatcgggaccttgtgacaatggtggagcagctggctcggttcctaggtgttagctgtgataaggcccagctggaggcactgaccgagcattgtcaccagctggtggaccagtgctgtaacgccgaagcacttcccgtgggccgtgcacactgtgtcttcgctcgaaaaatctttctctcctggtag

SEQ ID NO: 242738 - DNA, 855 bp, synthetic construct
  misc_feature 1..855: note = Description of Artificial Sequence: Synthetic coding sequence
  source 1..855: mol_type = other DNA
atggccgagagtgaggctgagacaccctccacacctggagaatttgagtcaaaatatttcgaattccacggggttaggctccctccattttgccgcggaaaaatggaagagatcgcaaatttccctgttcgaccctcagatgtctggatcgtgacttatcccaaaagtgggaccagcttgctccaggaggtcgtctatctggtgtctcagggggcagaccccgacgagatagggctaatgaacatcgacgaacagctcccggtcttagaatatcctcagccaggtctggacatcattaaggagctaacgtctccccgactgattaagtcccatttgccttaccggtttctcccaagcgatttgcacaatggagactctaaggtgatctacatggcccgaaaccctaaggacctagtggttagttactaccagttccacaggagcctgaggactatgagctaccgtgggacgtttcaggaattttgtcgcagattcatgaatgataaactgggatacggtagttggttcgaacacgtccaggaattttgggagcatagaatggactccaacgtgctgtttctgaaatatgaggatatgcatcgggacctcgtaacgatggtagaacagcttgctagattcctgggagtttcgtgcgacaaagcacaattagaggccctgacagagcactgtcatcagctcgttgaccagtgttgtaatgccgaagcattgcctgttgggagaggcagagtggggctgtggaaagacatctttacagtctcaatgaacgaaaaattcgatttggtatataagcagaagatggggaaatgcgatctgaccttcgacttctatctgtag

SEQ ID NO: 242739 - DNA, 516 bp, synthetic construct
  misc_feature 1..516: note = Description of Artificial Sequence: Synthetic coding sequence
  source 1..516: mol_type = other DNA
atggcagagagtgaagcagagacgccttccacaccaggggagtttgagagtaagtacttcgaattccatggcgttcggctgcctcctttttgtcgcggaaaaatggaggaaatcgcaaattttccagtgcgacctagcgacgtttggatcgtgacctatccaaagagcgttggctatggtagttggttcgagcacgtgcaggagttttgggaacatcggatggactcgaatgtgcttttcctaaagtatgaggatatgcatagagacctggtgactatggtcgaacagctcgctcgtttcctcggcgtgagctgcgacaaggctcagctggaggcattgacagagcactgccatcaacttgtggaccagtgctgcaatgccgaagccttacccgtcggtaggggacgcgtgggcctttggaaagatatcttcaccgtttcgatgaatgagaaattcgacttagtgtataagcaaaaaatgggtaaatgcgacctaaccttcgatttttacctctag

SEQ ID NO: 242740 - DNA, 171 bp, synthetic construct
  misc_feature 1..171: note = Description of Artificial Sequence: Synthetic coding sequence
  source 1..171: mol_type = other DNA
atgctcgcaaagcttctgtgtgaccaagtggttggtgcgcctattgcagtaagtgctttctacgccggaatgtcaattctccagggtaaggatgacatcttccttgatctgaaacagaaattctggaatacttatatgcagacgcaatcttggctgtggaggtctctgtag

SEQ ID NO: 242741 - DNA, 888 bp, synthetic construct
  misc_feature 1..888: note = Description of Artificial Sequence: Synthetic coding sequence
  source 1..888: mol_type = other DNA
atggagcttatccaggatacctcccggcctccccttgagtacgtgaaaggcgtgcccctaataaaatacttcgccgaagccctcgggccacttcagtcctttcaggctagacctgatgatttacttatcagcacctaccctaagtctggcacaacttgggtgagccagattttggacatgatttatcaggggggagatctggagaaatgccatcgagcgcctatttttatgcgggtcccctttctcgaattcaaggctcctggcatccccagcggcatggaaaccttgaaggatacgccggctcccaggctcctgaagactcacttgcctctcgccctgctcccacaaaccttactcgaccagaaagtcaaagtagtgtatgttgctagaaatgccaaagacgtggccgttagttattatcacttttatcacatggcgaaggtgcatccagaacctggaacctgggacagcttcttggagaagtttatggtgggggaagtctcctacgggtcttggtatcaacacgttcaagaatggtgggagttgagccggactcaccctgtattgtatttattctacgaggacatgaaggagaatcccaagagagaaatccagaaaattctcgaattcgtaggtcggtcccttccagaggaaacggttgactttgtggtgcagcacactagttttaaagaaatgaagaagaacccgatgacaaattacaccaccgtcccgcaggaattcatggatcacagcattagcccctttatgcggaagggcatggcaggcgactggaagaccaccttcaccgtcgcacagaatgaacgcttcgatgccgattacgcagaaaaaatggctggatgcagcctgtctttcagatccgagctctag

SEQ ID NO: 242742 - DNA, 888 bp, synthetic construct
  misc_feature 1..888: note = Description of Artificial Sequence: Synthetic coding sequence
  source 1..888: mol_type = other DNA
atggagttgatacaagacacctctaggccacctctggagtacgtaaaaggagtgccactgatcaaatacttcgcagaggcgctgggcccactgcagagcttccaggccaggcctgatgatcttttaatttcaacatacccaaaatccggtaccacctgggtgtcccaaattctggacatgatatatcaggggggtgatctagaaaaatgtcaccgggctccaatcttcatgcgggtccccttcctcgaattcaaggcacccggaatccccagcggaatggagaccctgaaggatacacccgctcccaggctacttaagactcatcttccattggcactgttgccacagacactgctcgaccaaaaggtaaaagtggtgtatgtcgccaggaacgcgaaggacgttgccgtcagttattatcatttctaccacatggccaaagtgcatccagagcccggaacgtgggatagcttcctcgagaagttcatggtgggggaagtgtcctacgggagctggtatcaacacgtacaggagtggtgggaactctctaggacgcaccccgtgctgtacctattctatgaagatatgaaagaaaatccaaaacgtgaaatccagaaaattttggagtttgtagggagatctctgcccgaagaaactgtcgatttcgtggtgcagcacaccagttttaaagagatgaagaagaatcctatgacaaattataccacggtcccccaagagtttatggatcactctatttctccgttcatgcgaaaggggatggcgggtgactggaaaaccacttttaccgtggcacagaacgagcgatttgatgcagattatgccgaaaaaatggccggatgctctctgagcttcagatccgagctgtag

SEQ ID NO: 242743 - DNA, 654 bp, synthetic construct
  misc_feature 1..654: note = Description of Artificial Sequence: Synthetic coding sequence
  source 1..654: mol_type = other DNA
atgcttgctaaactgctgtgtgatcaggtagtgggcgctcccatagctgtgtctgccttctacgccggaatgagcattcttcagggtaaggacgacatcttcctcgatcttaaacagaagttctggaacacatacatggtagtttacgttgctagaaacgccaaagacgtggcagtgagttactaccacttttatcacatggccaaagtccacccagaaccaggaacatgggattcattcctggagaaattcatggtcggtgaggtgtcatacggctcttggtaccagcatgtgcaggaatggtgggaactaagccgcacgcatccagtcctctacctcttctatgaggacatgaaagagaaccctaaaagagaaatacaaaagatattggagtttgtgggtagatcacttccagaagagactgttgacttcgtggtgcagcatacttcatttaaagagatgaaaaagaaccccatgaccaactacaccacagtgcctcaggagttcatggatcacagcatcagccccttcatgcggaaaggaatggccggagactggaagactactttcacggtcgcccagaacgagcgcttcgatgcagactatgccgagaaaatggctggttgctctctgtcattccggtccgagctgtag

SEQ ID NO: 242744 - DNA, 888 bp, synthetic construct
  misc_feature 1..888: note = Description of Artificial Sequence: Synthetic coding sequence
  source 1..888: mol_type = other DNA
atggagttaattcaggatacctctagacctccgttggagtatgtgaagggggttccgttgattaagtacttcgcagaagcactcggccctctgcagagttttcaagccagacccgatgatcttttgatcagtacttatcccaagtctgggaccacttgggtgtctcagattctggacatgatctaccagggcggtgaccttgaaaagtgtcatcgggcacccatctttatgagggttcccttcttagagtttaaagctcctggaattccgagtggcatggagaccttgaaagacactccagctccaaggctgcttaagacccatctgcccttagctctattaccacagactctgctggatcagaaagttaaggtcgtgtacgtcgccagaaacgcaaaggatgtagccgtttcctactaccatttctatcacatggcaaaagtgcacccagagccaggaacttgggattcgttcctggaaaagttcatggtgggcgaggtatcttatggctcctggtatcagcacgtgcaagagtggtgggaactgtcaagaacccatcctgtgctttacctgttctacgaggacatgaaggagaatccaaagcgggagattcagaagattcttgaatttgtggggaggtcactcccagaagagaccgtggacttcgtcgttcagcacacttcctttaaggaaatgaaaaaaaacccgatgacaaattacactaccgttccgcaggagtttatggaccacagtatctcacctttcatgcggaagggcatggccggagactggaagacgacattcacggtggcacagaacgagaggtttgatgcagattatgccgaaaagatggccggttgctccttgtcattccggagcgaactgtag

SEQ ID NO: 242745 - DNA, 888 bp, synthetic construct
  misc_feature 1..888: note = Description of Artificial Sequence: Synthetic coding sequence
  source 1..888: mol_type = other DNA
atggaactgatccaggataccagcagacctcccttggagtatgtgaagggcgtgccgttaattaagtattttgctgaggccttaggccctcttcaatccttccaggcaaggcctgatgatctcttaatttctacctatccaaaaagtggtacaacctgggtaagtcagatcctggatatgatctaccagggtggcgatctggaaaagtgtcacagagcacccatcttcatgagagttccttttctagagtttaaggcacctggaatccccagcggcatggagactctcaaagatacgccagccccacgcctgcttaagacacacctgcctcttgccctgctgcctcaaaccttgctggaccagaaggtcaaggtcgtgtatgtggcacggaacgcaaaggatgttgctgtgtcctactaccacttctaccacatggccaaagttcatccagagccgggtacctgggactcctttctggagaaattcatggtgggcgaggtgtcttatggatcttggtatcagcacgtgcaggagtggtgggagctttccagaacgcaccctgtactgtatctcttttacgaggacatgaaggaaaatccaaaacgggagattcagaagatccttgaattcgtgggcaggtctttgccggaggagacagttgactttgtagtccagcatacgtcctttaaggaaatgaagaaaaaccccatgaccaactacacaaccgtgcctcaggaatttatggaccacagcatttcaccttttatgcgcaagggaatggctggagattggaaaactacgtttactgtcgctcagaacgagagattcgatgccgactacgcagagaagatggccggatgctctctctctttccgatctgaactttag

SEQ ID NO: 242746 - DNA, 888 bp, synthetic construct
  misc_feature 1..888: note = Description of Artificial Sequence: Synthetic coding sequence
  source 1..888: mol_type = other DNA
atggagttgattcaggacattagtaggccaccactggagtacgttaaaggcgtaccactcatcaagtatttcgctgaggccctcggccctctgcagtcttttcaggcccgtcccgacgatctgctgatctctacatatccaaagtcaggcaccacctgggtcagccagatcctggacatgatctaccagggtggggatttggagaaatgccacagggctccaattttcatgcgggtaccttttctagagtttaaggtacctggaatcccttcaggtatggagacattgaagaacacccccgctcccagacttttgaagacgcatctacctctggctctcctgccccagactctactggatcagaaggtcaaagttgtgtacgtagctagaaacgcaaaggacgtggccgtgtcttactatcatttttaccacatggcaaaggtctacccccacccgggaacttgggagtcttttttggagaagtttatggccggagaagtttcctatggtagttggtaccagcacgtgcaggaatggtgggaattatctagaacacaccctgtcctgtacctgttctatgaggatatgaaagaaaacccgaaaagagagatacaaaagattttggaatttgtaggtagatccctcccagaggagactgtggatttgatggtggaacacacaagctttaaggagatgaaaaaaaacccaatgaccaattacacgacagtgcgacgcgagtttatggatcacagcattagtccttttatgcgtaaaggtatggctggcgattggaagaccacttttacagtcgcccagaatgaaagattcgacgcagactatgcaaagaaaatggcaggttgctccctgtcattcaggtctgaattgtag

SEQ ID NO: 242747 - DNA, 888 bp, synthetic construct
  misc_feature 1..888: note = Description of Artificial Sequence: Synthetic coding sequence
  source 1..888: mol_type = other DNA
atggagcttattcaggacataagtaggcctcctttagaatatgtgaagggcgtgcctctgattaaatacttcgccgaagcgctcggtccgctgcagtcgttccaggcccgacccgacgacttgctgattagtacttatccaaagtcaggaacaacctgggtttcacagattctggacatgatttaccagggcggtgacctcgagaaatgtcatcgtgctccgatcttcatgagagtgccgtttctggagtttaaggtgccagggattccgtctggaatggagactctgaagaacacaccagcacctcggctattgaaaacccacctgccccttgccctgctgccacaaaccctcttagaccagaaggtaaaagtggtctacgtggcccgtaacgctaaagatgtagcagtaagctactaccacttttatcacatggcaaaagtttatccccatcccggtacctgggagtctttcctcgagaagtttatggcgggtgaagtgagttacggatcatggtatcagcatgtgcaggagtggtgggaattatcacgtactcaccctgtactgtacttattctatgaggacatgaaggaaaatcctaagagagagattcagaagattttggaatttgtgggacgatcactgccagaagagaccgtagatctgatggtggagcacacaagctttaaggagatgaaaaaaaaccctatgacgaactataccaccgtccgtcgggagttcatggatcacagcatttcccctttcatgcgtaagggaatggcaggtgactggaagacgacatttaccgtcgcgcagaatgagcgcttcgacgccgactacgctaagaagatggccggttgttctctgtccttcaggagtgaactgtag

SEQ ID NO: 242748 - DNA, 579 bp, synthetic construct
  misc_feature 1..579: note = Description of Artificial Sequence: Synthetic coding sequence
  source 1..579: mol_type = other DNA
atggaactgattcaagatatcagccggccaccgttggagtacgtaaagggtgtgcctctgatcaagtactttgccgaagcgctggggccattacagagttttcaggcgagacctgacgatctattaatttccacgtaccctaagtcgggaacaacctgggtatcccagatactggatatgatctatcaaggaggagacctagaaaagtgtcatcgggcaccaatttttatgcgggtgcctttcctcgagttcaaggtgcccggaattcctagcggaatggagaccctaaagaatactcccgctcccaggctcctgaaaacccatttacctctggctttacttccccagactctgctggaccagaaggtgaaggtcgtctacgtcgcacgcaatgccaaggacgtcgccgtgtcttattatcacttttaccacatggctaaagtataccctcatccaggaacttgggagagcttccttgagaagttcatggctggggaggtgtcctacggctcttggtatcagcatgtgcaagaatggtgggaattgagtaggacccatcccgttttatatctgttctag

SEQ ID NO: 242749 - DNA, 891 bp, synthetic construct
  misc_feature 1..891: note = Description of Artificial Sequence: Synthetic coding sequence
  source 1..891: mol_type = other DNA
atggccctaacttccgacctgggcaagcagatcaaactgaaagaagtcgagggaactctactgcagcctgcaactgtggataactggagtcagatccaatcatttgaggcgaagccagacgacttactgatatgcacctaccccaaggcgggaaccacttggatacaggagattgtggatatgattgagcagaatggcgatgtggagaagtgccagcgcgctatcattcagcacaggcaccctttcattgaatgggcacgccctccccagccaagcggtgtcgaaaaggcaaaagctatgccgtcaccacgaatcttaaaaacccacctttctacccagctgctgcctccaagtttctgggagaataactgtaaatttctgtacgtagcgagaaatgccaaggattgcatggtgtcctactaccactttcagcgtatgaatcatatgttgccagacccaggcacttgggaggagtacttcgaaaccttcataaatggcaaggtggtgtggggctcctggttcgatcacgttaagggttggtgggagatgaaggatagacaccagatcctgttccttttctatgaagacattaaaagggatccaaaacacgaaattcgtaaggtgatgcaattcatgggaaaaaaagtggacgaaaccgtactggataagattgtgcaagagacatctttcgagaagatgaaagagaacccaatgactaacagatctacagtatcaaaatcaattctggaccaatctatctcttccttcatgcgcaagggtacggtgggtgactggaagaaccacttcactgtggcccagaatgagagattcgacgaaatttatagaaggaagatggaggggacgtccattaatttttgcatggaactgtag

SEQ ID NO: 242750 - DNA, 924 bp, synthetic construct
  misc_feature 1..924: note = Description of Artificial Sequence: Synthetic coding sequence
  source 1..924: mol_type = other DNA
atggccctcacatccgacctaggcaaacagattaaattgaaagaagtagagggcactctcttgcaacccgctaccgtggacaactggtctcaaattcagagcttcgaagctaaaccagacgatttgttaatctgtacttatccaaaggcgggtactacctggattcaggagatcgttgatatgatagaacagaatggtgacgtggagaaatgccagcgggcaatcatccaacatcgccaccccttcatagagtgggccagacccccacagccaagtgaaaccgggttccatcatgtggcacaggccggactcaagttactttcatcctcaaacccccctgcctccacatcacaaagtgccaagatcacggacttactccctccctctttttgggaaaacaattgtaaattcctctacgtcgcacgaaacgccaaagactgtatggtctcttattaccacttccagaggatgaaccatatgcttccggatcccggaacttgggaagagtatttcgagacctttatcaatggcaaagtcgtgtggggcagctggttcgatcacgtcaaggggtggtgggaaatgaaagatcgccaccaaatcctgtttctgttttacgaggacatcaaaagagaccccaaacatgaaatcagaaaagtgatgcaattcatgggtaagaaagtcgacgaaactgtgcttgacaagatcgtgcaggagacaagctttgagaagatgaaagaaaatccaatgaccaatcggtccactgtttcaaaaagcatactcgatcagagtataagctcattcatgaggaaaggcacggtgggcgattggaagaaccacttcaccgtggcacagaacgagaggtttgatgagatctataggcgtaagatggagggaacatctattaacttttgcatggagctttag

SEQ ID NO: 242751 - DNA, 933 bp, synthetic construct
  misc_feature 1..933: note = Description of Artificial Sequence: Synthetic coding sequence
  source 1..933: mol_type = other DNA
atggcgctgacatcagacctagggaagcagattaaactaaaggaggttgaaggcaccctgctgcagcctgccactgttgataactggtcccagattcagagcttcgaagcaaaaccagacgatcttcttatatgcacttacccaaaagccggtacaacctggatccaggagatagtggatatgatcgagcagaacggtgacgtggagaaatgtcagcgcgcaatcattcaacatagacatccatttatagaatgggcacgcccaccacagccgagtgtcctggtgctccgtcgctgctttctcctctcctactttaagggcgtggagaaggctaaggcgatgccctcccccagaattctgaagactcatctgagtacccagctgttgccaccatcattttgggaaaacaactgcaaattcctctacgttgctagaaatgccaaagactgcatggtgtcctattaccacttccagaggatgaaccacatgctgcctgaccctggcacctgggaagaatatttcgagacctttatcaacgggaaggtggtgtggggttcctggtttgaccacgtcaaggggtggtgggaaatgaaagatcgacaccagatcctttttttgttttacgaagatatcaagagggacccgaagcatgagatccgaaaggtgatgcagtttatgggtaagaaggtggacgaaacagttctggataagatcgttcaggagacctcttttgagaagatgaaggagaatcccatgaccaacagatcaaccgtttcgaaatctatattggatcagagcatctcctccttcatgcgcaaaggaactgtgggagattggaaaaaccactttactgtcgctcagaatgaaagattcgacgagatttacaggagaaagatggaggggacctctatcaacttttgcatggagctgtag

SEQ ID NO: 242752 - DNA, 639 bp, synthetic construct
  misc_feature 1..639: note = Description of Artificial Sequence: Synthetic coding sequence
  source 1..639: mol_type = other DNA
atgggtccgccatccgccagcccacacagagaatgcatcccttggcagggcctcttgttaaccgccagcctgctcaacttctggaatccgccaaccaccgcgaaactgacaattgagtccatgcctttaagtgtggccgagggaaaagaagtcctgctactcgtgcacaacctccctcagcatttattcggctatagctggtataagggagagcgcgtggacggcaatagccttatcgttggttacgtgatcggaacccaacaggcaacccccggagcagcatacagcggtagagaaactatctatacaaatgcatctcttttgattcagaacgtgacacaaaatgacataggcttttacacccttcaggtcatcaagagcgacctggtgaatgaggaggcaacagggcagtttcacgtgtatcaggaaaatgccccaggactccctgttggcgctgtcgcaggtatagtgacaggagtcctggtgggcgtggctcttgttgcagccttggtttgcttcctgctgttggctaagaccggcaggccttggagcctgccccagctttgtctgctggatgttccttctttgcactgtcccggaccgcctacccagccgcaggactcttccttccacttatag

SEQ ID NO: 242753 - DNA, 1098 bp, synthetic construct
  misc_feature 1..1098: note = Description of Artificial Sequence: Synthetic coding sequence
  source 1..1098: mol_type = other DNA
atggacggcccagccgagcctcagatacctggcctatgggatacctatgaagacgacatctctgaaatatcccagaagctccctggtgagtactttagatacaaaggtgtgcccttcccggtggggctgtacagtctggagagcatcagcctggctgaaaatacacaagacgttcgtgatgacgacatattcataatcacctaccccaagtctggtaccacatggatgatagaaattatttgcctgatccttaaagagggtgatccctcctggattcgctctgtcccgatttgggaacgcgcaccttggtgtgagaccattgtgggcgcatttagtcttcctgatcagtactctcctagactcatgtcctcacatctgccgatacaaatctttaccaaagccttctttagttcgaaggctaaggtgatttatatgggacggaacccccgagacgtggtggtcagtttgtaccattactccaagattgccggtcagctgaaggaccctggaacacccgatcagttcttacgggactttctgaaaggagaagtccagtttggctcctggtttgatcacattaaaggctggctgcgtatgaagggcaaggacaacttcctttttatcacctacgaggagctccagcaggacctccagggatccgtcgaaaggatttgtggcttcctggggagaccactcggcaaggaggcgttgggctcagtcgtagcccactccaccttttccgctatgaaggccaacaccatgtctaattatactctgttgcccccatcactgctcgatcaccgaaggggggcattcctgcggaaaggggtgtgtggagactggaagaatcacttcactgtcgctcaaagcgaggccttcgatcgggcttatagaaagcagatgagagggatgcctacgttcccctgggacgaagaccccgaggaagacggcagtcctgatcctgagccgtctccagaacctgagcccaagccctctttggaacccaacaccagcctggagagggaaccacggccaaacagcagcccatctcctagtccaggccaagcatctgagacgccacatccaaggcctagctag

SEQ ID NO: 242754 - DNA, 1053 bp, synthetic construct
  misc_feature 1..1053: note = Description of Artificial Sequence: Synthetic coding sequence
  source 1..1053: mol_type = other DNA
atggcttctccgcctcccttccacagccagaagctgcctggggagtatttccgctacaagggggtgccctttccggtcggactttattcactagaatcaatcagtctggcagagaacacccaggacgtacgggatgacgatatatttattatcacttaccctaagagcggcactacctggatgattgaaatcatttgtctgatccttaaggagggagaccccagctggatccgaagtgttcccatatgggaacgagccccttggtgcgaaactatcgtgggagccttctccctccccgatcagtacagccctcgacttatgtcttctcacctcccaatacagatcttcacgaaggcattcttcagcagcaaggccaaagtcatttatatgggcagaaatcccagagatgtggtcgtttcactctatcattatagcaaaatcgctggacagctcaaggatcctggaactcctgaccagttcctacgcgactttctgaagggagaggttcagtttggcagttggttcgatcacatcaagggatggctgcggatgaagggcaaagacaacttcctgtttatcacttatgaggaattgcagcaggaccttcagggatctgtggagcggatatgcgggtttctggggaggcctctcgggaaagaggctttgggcagcgtggttgcgcattccacgttcagcgccatgaaggcaaacaccatgtcgaactacaccctcctgccaccttcgcttctcgatcataggcgtggagcgtttctgcgcaagggcgtatgtggcgattggaaaaatcacttcactgtggctcagagtgaggccttcgaccgggcttacaggaaacagatgagaggcatgccgacatttccatgggatgaggatcctgaagaagatggctcccccgacccggagccctcccctgaaccagaaccaaagccctcgctggagccgaatacgtcactggaaagggagcctcgcccaaacagctcaccttcaccctcgcccggacaggccagcgaaacgcctcacccgagaccatcgtag

SEQ ID NO: 242755 - DNA, 1041 bp, synthetic construct
  misc_feature 1..1041: note = Description of Artificial Sequence: Synthetic coding sequence
  source 1..1041: mol_type = other DNA
atggtggaaaaggaagaggctggcggtggtatttccgaggaagaggccgctcagtatgacaggcagatccggttatggggcctcgaggcacagaaaaggttacgcgcatcccgagtgctgctggtgggactaaaaggtctgggagccgaaatcgccaagaacctcattctcgcgggtgtgaagggcttaactatgcttgaccacgaacaggtcactccggaagatccgggtgctcagtttctgattcggacagggtctgtaggtagaaatcgggcagaggcctcacttgaacgggctcagaacttgaaccccatggtggatgtcaaagtggataccgaggacattgaaaaaaaaccagagtcttttttcactcagtttgacgctgtttgtttgacgtgctgctctcgcgatgtcattgtcaaagtggaccagatctgtcacaagaactctatcaaattttttactggcgacgttttcgggtatcatggttacacatttgccaaccttggcgagcacgagttcgtggaagaaaagaccaaggtagccaaggtctcgcagggcgtggaggacgggcctgataccaagcgggcaaaactggactctagcgagactacaatggttaagaaaaaggttgtgttttgtccagtgaaagaagccctagaggtggactggagttcagagaaagccaaagcagccctgaagcgcacgacttccgactactttctgttacaagtcctattaaaatttagaaccgacaaaggtagggacccatcaagtgacacatacgaagaagactctgagctgcttctgcaaatccgcaatgatgtgttggactccctgggaatatcacctgatctgctgccggaggactttgtcaggtattgtttttccgaaatggccccagtctgtgctgtggtgggcggaattttggcacaggaaattgtaaaggcccttagccaaagggacccacctcataacaactttttttttttcgacggaatgaaaggaaacggcatcgtcgagtgtctaggacccaagtag

SEQ ID NO: 242756 - DNA, 801 bp, synthetic construct
  misc_feature 1..801: note = Description of Artificial Sequence: Synthetic coding sequence
  source 1..801: mol_type = other DNA
atggtcgagaaggaggaggccggtggcggaatctctgaggaggaagccgctcaatacgatcgccagatccgcctctggggcctggaagcccagaagcggctgcgtgcttcacgtgtgctgctcgtaggtctcaaaggattaggtgctgagattgccaagaatttaatactggccggagtgaaagggcttacaatgctggaccacgagcaagtcacacctgaggatcctggcgctcaattccttatcagaaccggctccgtggggaggaaccgggctgaggcaagccttgagcgggcacaaaacttgaacccaatggtggatgttaaggtggataccgaggatattgagaagaaacctgagtcattttttacccagttcgatgctgtatgcttgacttgctgctctcgggatgtgatagtgaaggttgatcagatctgtcataagaattccattaagttcttcaccggagacgttttcggttatcacggatacacctttgctaatctcggtgagcacgagttcgtggaagaaaagacaaaagtagcaaaggtcagccagggagtggaagacgggccagatacaaagagggccaagctggactcaagtgaaacaactatggtgaagaagaaagtggtgttttgccccgtgaaggaggccttggaagtcgattggtcttctgagaaagctaaggccgctctcaaacgtacaacaagcgactattttctgctccaggggactgcatccccccgatggccgcagtgcgttcgttggcttgagggattttggcacagaaaattgtag

SEQ ID NO: 242757 - DNA, 900 bp, synthetic construct
  misc_feature 1..900: note = Description of Artificial Sequence: Synthetic coding sequence
  source 1..900: mol_type = other DNA
atggtagagaaggaggaagctgggggaggaatctccgaagaggaagccgctcagtatgatcgacagattaggctatggggtcttgaggctcagaaacgcttgcgggcatcacgagtgctactggtcggacttaaggggttgggggctgagattgctaagaacctaattctagcgggtgtgaagggattgaccatgctggaccatgaacaggtcactccggaggatcctggggcacaatttcttatccggaccggcagtgttggcagaaacagggccgaagcttcactcgaaagggcccagaatctgaaccccatggtcgacgtgaaggttgataccgaagatattgagaagaagccagaatcgttcttcacccagttcgatgcagtgtgcctgacatgctgttccagagatgtgatcgtgaaagtggatcaaatttgccacaaaaattccattaaattctttacaggtgatgtgtttggataccacggttacacctttgccaatctaggcgaacacgagtttgttgaggaaaagacgaaggtggctaaggtgtcccaaggagtcgaggatgggccagataccaaaagagcgaagctggacagctcggaaactacaatggtcaagaagaaggtagtcttctgtcctgtgaaagaagctctcgaagttgattggagcagcgagaaggccaaagctgccctcaagcgcactacgagcgattactttctgctccaggggcctgtgtctgctggacccagtagtcagcagttattgctgctgagatggcacgaaggtgagtgggattgtggtgtcccttggcctcaggtcaatagcagattcggatcccctagagatgccaattgcagcatgccgacttgcatcccttgtccactgccttcatag

SEQ ID NO: 242758 - DNA, 900 bp, synthetic construct
  misc_feature 1..900: note = Description of Artificial Sequence: Synthetic coding sequence
  source 1..900: mol_type = other DNA
atggttgaaaaagaggaggcaggcggaggcattagcgaagaggaggccgcacaatacgatcgtcagattagactctggggtcttgaggcgcaaaaacggctgagagccagtcgggtgctgctagtgggcctgaaaggtctgggggctgagattgctaagaacctgattctggctggtgttaaaggactaacaatgctggatcacgagcaggtgacacccgaggacccaggagcacagttcctgattcgcaccggttcagtgggtcgcaaccgggcagaggcctctttggagagagcccagaatctcaatcctatggtcgatgtgaaggtggacaccgaagacatcgagaagaagcctgagtccttttttacgcagttcgacgctgtgtgcctcacttgttgctcacgggatgtgattgtcaaagtggatcaaatctgccataaaaattccatcaaattttttaccggcgatgtgttcggatatcacggctacacatttgccaacctgggcgagcacgaattcgtagaggaaaagactaaggtagcgaaggtttcccagggagtggaagatgggccagacaccaagcgcgcaaaacttgatagttcagagacaaccatggtcaaaaaaaaggtcgtcttctgtcccgttaaggaagccctggaagttgactggagcagcgagaaggctaaggcagccctaaagagaacaacctcggattacttcctgctgcaggagctgtttccccgaatcgtagaacgtgtgtatgcccagcgacatccaagaagcaccgagcgcacccacgctaaaatgctcattccatttttgaccaaggaaaaacccggtttcttgggtgagatggctgtcagtaggagcggcgtcgggaaattgcagtgttcctag

SEQ ID NO: 242759 - DNA, 519 bp, synthetic construct
  misc_feature 1..519: note = Description of Artificial Sequence: Synthetic coding sequence
  source 1..519: mol_type = other DNA
atgctcgagaaaactaaggtcgcaaaggtcagtcagggagtcgaggatgggccagacaccaaaagggccaagttggattcctctgagaccactatggtgaaaaaaaaggtggtgttctgccctgtcaaagaggccctcgaagttgattggtcctctgaaaaggccaaggcagctctgaagcggactacttctgattactttctgctacaggtcctcctaaagtttcggactgataagggtcgggatccttcatccgatacttacgaagaagactccgagctcttgttgcagatccgcaatgacgtactggacagtttgggcatttcaccagatctactccccgaggactttgtgcggtattgtttctcagagatggcccctgtatgtgcagtagtggggggaatactggcacaggaaatcgtgaaggcactctcacagcgggatcctccccacaacaatttctttttttttgatgggatgaagggcaacggcatcgtcgagtgcctaggcccaaagtag

SEQ ID NO: 242760 - DNA, 1935 bp, synthetic construct
  misc_feature 1..1935: note = Description of Artificial Sequence: Synthetic coding sequence
  source 1..1935: mol_type = other DNA
atggacgatatcgctgatcggatgcggatggatgctggggaagtgacactggtcaatcacaatagtgtattcaagacacacttactcccccagacaggatttcccgaagaccagttatcactgagcgatcagcaaatactgtcctcccggcagggccacctcgacaggagttttacttgctccacacgttcagctgcttacaatccaagctattactccgataaccctagttctgattctttcttgggatctggggacctgcgcacgttcggccagagcgccaatggccagtggcgcaacagcacccccagctctagtagctctttgcaaaagtcacgcaattctcgaagcttgtatttggagactcggaaaacaagctcggggttgtccaatagcttcgctgggaagtctaatcatcattgccatgtttccgcctatgagaagtcgttccccatcaagcccgttccgtctccttcatggagcgggagctgcagacgcagcttactcagtccaaaaaagactcaacgcaggcacgtttcaactgcagaggagactgtgcaggaggaggaacgggagatctatcggcaattactccagatggtgaccggtaagcagttcaccattgcaaaacccaccacacacttccccctccacctttcccgttgtctctcttcaagcaaaaatactttaaaagactctttattcaaaaacggcaactcatgcgcctctcaaattattgggagcgacacgtcttcctcaggcagcgcttccattctgactaatcaggagcaactgagtcattccgtctactcactcagctcttatacacctgatgtggcctttgggtccaaagacagcgggaccctgcatcacccccaccatcatcatagtgtgcctcaccaaccagataacctggcagcatcgaacacgcagagtgaaggctctgattccgtgatcctcctaaaagtgaaggattcacagacacctactccttcctcgactttttttcaggccgagctgtggatcaaagaactgacatctgtatacgattctagggcacgcgagagactgcgacagattgaggagcagaaagctttagcattgcaacttcagaatcagagattacaagagcgtgaacacagcgtccatgattcggtagaactgcatttaagggtgcccttggaaaaggaaataccagtgaccgtcgtacaggagactcagaagaagggacataagctcactgacagcgaagacgagtttcctgaaataaccgaagaaatggaaaaggagattaaaaacgtgtttcgtaatggcaatcaggatgaggtcttatcagaggcattccgtcttacaattaccaggaaagacatccagaccctgaaccacctcaattggcttaacgatgagattatcaacttttacatgaacatgcttatggaaaggtcaaaggaaaagggcctgccgagcgtgcatgcatttaacacgttcttctttaccaaactgaagaccgccggttaccaagccgtgaagcggtggacaaagaaggtcgatgtgttctccgttgatattctgcttgtccccatccacctgggggtacactggtgtttggccgttgtggacttccgaaagaaaaatatcacatattacgacagtatgggagggataaacaatgaggcgtgccggattcttctccagtatctgaaacaggaaagtattgacaagaagcgcaaggaattcgataccaacggatggcagctcttctcaaagaagtcccaggaaatcccgcagcagatgaacggttccgattgcggaatgtttgcctgcaaatatgccgattgcatcacgaaagatagacccatcaatttcacccagcagcacatgccatattttagaaagagaatggtgtgggagattctccacagaaagttgctatag

SEQ ID NO: 242761 - DNA, 489 bp, synthetic construct
  misc_feature 1..489: note = Description of Artificial Sequence: Synthetic coding sequence
  source 1..489: mol_type = other DNA
atgaagatccctctgactgccacaatttgcctgcccggttcttcaccccctggtctttgcatattcgcaaaggtgtccgatgtgaagcggttagaaatggatgatatagctgataggatgcgaatggacgctggtgaagttacccttgttaaccacaattcagtatttaagactcatctactgccccagacgggattcccagaagaccaactgtcactgtctgatcaacagattttatccagtagacagggacatctcgaccgctcttttacttgcagtacacgctctgcagcttacaacccgtcatactattcaggcccaggattaggtgtcttggccagatatagctggggtaaaatgctgactttcggtggacatcatggagtcacactgatgcagatacggcatatggccgtggcaggttttagctccttcataaattttcagatcatcctgcctcagactgtgttcttggcccaggccatttag

SEQ ID NO: 242762 - DNA, 1932 bp, synthetic construct
  misc_feature 1..1932: note = Description of Artificial Sequence: Synthetic coding sequence
  source 1..1932: mol_type = other DNA
atggatgacatcgccgacagaatgcgcatggacgcaggcgaagtgaccttggtgaaccataatagtgttttcaagacacatctgttaccccagacagggttcccagaggaccagctgtccttaagcgatcagcagatcctgtcgagccgacagggccacctcgatcgaagctttacttgctcgactaggtcagcagcctataacccctcctattactctgataatccaagcagtgattccttcctgggctctggggacttgagaaccttcggccaaagtgctaatggacagtggcggaacagtaccccgtcctcgagtagttctctgcagaagagtagaaactctcggagcctttaccttgagacgcgaaaaactagctcaggactgtctaattccttcgcagggaagagcaatcatcattgccacgtcagcgcctatgagaagagcttccccatcaagccggtgccttcaccttcttggagtggctcatgcagaagaagcttactgagcccaaagaaaacgcaacggcgacacgtgtctacggcagaagagaccgtgcaagaagaagagagggagatctaccgacagctgctgcagatggttaccggcaagcaatttacgatcgctaagccaacaacacactttcccctgcacctgtccaggtgtctaagctcttccaaaaacacacttaaagacagtctttttaaaaatggcaactcctgcgcgtcacaaataattggcagtgacacatcatcctctgggtccgcctcaatcctcaccaaccaggagcaattgtcccattccgtgtatagcctgtcctcctacaccccggacgtggctttcggatccaaggacagtggcaccctgcatcacccacatcaccatcacagtgtgccacaccaacccgacaatctggcggcttctaacacacagagtgaagggtcagatagcgtgattctactcaaagttaaggacagtcagacaccgacacccagttcaacctttttccaggccgagctttggattaaggagcttacttccgtgtatgattctcgggctagggagcgtctgcgacaaattgaagagcagaaggcgctggcgttgcagctgcaaaaccagcggttgcaagagagagaacacagcgttcacgattcggttgaattgcacttgagggtgcctctggagaaggagatcccagtcaccgttgtccaagagacccaaaagaaagggcacaaactgacagattctgaggatgaattccctgaaatcactgaagaaatggagaaggagatcaagaacgtgttccggaatggtaatcaggacgaggtcttgtcagaggcctttcggttgaccataacacgaaaggacattcagaccctcaatcaccttaactggttaaacgacgaaatcatcaatttttatatgaatatgctaatggagcgctctaaggaaaagggtctgccttccgtacatgccttcaacacttttttcttcactaaactgaagaccgcgggatatcaggctgtgaagcgctggactaagaaggtggatgtgttctctgtcgatattttactagtaccaatccacctcggcgtacattggtgtctggccgtagtggatttcaggaaaaaaaacattacttactacgactcgatggggggtatcaataatgaggcctgtcggatcctgttacagtacttgaaacaagaaagtatagataaaaaacggaaggaattcgacacgaatggttggcagctgttttcaaagaaaagtcaaatcccccagcaaatgaatgggtccgactgtgggatgtttgcttgtaagtacgcagattgtattacaaaagataggccaatcaactttactcagcagcacatgccctacttccgaaaaaggatggtgtgggagatcctacatagaaagctgctgtag

SEQ ID NO: 242763 - DNA, 1935 bp, synthetic construct
  misc_feature 1..1935: note = Description of Artificial Sequence: Synthetic coding sequence
  source 1..1935: mol_type = other DNA
atggatgatatcgctgacagaatgaggatggatgccggagaggtcactctagtgaaccacaattccgttttcaagacccacttgttaccccagacaggctttccagaagatcagctctccctgtccgatcagcaaattctttcctccaggcagggacaccttgatcgttcctttacatgttccacccggtctgccgcatacaatccctcctactactctgacaatcccagttcggactcttttctgggctccggagacctgagaaccttcgggcagtctgctaacggccagtggcgaaattccacacctagcagcagtagctcactgcagaaaagcagaaactctagatcgttgtatcttgaaactagaaagaccagttctgggcttagcaactccttcgcgggaaagtctaatcaccattgccatgtgtctgcgtatgaaaagagctttccaatcaagccggtgccatccccctcctggtctggttcctgtcgtagaagtctgctgtctcccaaaaaaacacagagaagacatgtgagcacagccgaagagacagtccaggaagaagagcgtgaaatctaccggcaactacttcagatggtgacaggtaaacagttcaccattgctaaaccaaccacacattttcctttgcacctgagcagatgtctgagctcctccaagaacaccctgaaggacagcctcttcaagaatggcaactcttgcgctagccagattattggctcagataccagcagtagtggctcggcctcaatcctgacgaaccaggaacagttatcccactctgtctacagtctctccagctatacaccagatgttgctttcggtagtaaagattcagggactttgcaccacccacatcatcaccactccgtaccccatcagcccgacaacctggcagcatccaacacacagagtgaaggatccgactccgtgatcttactgaaagttaaggattctcagacacccactccatctagtacgtttttccaagctgagttgtggattaaggaactcaccagtgtctacgattctagagccagggagcggctgagacagatcgaggaacagaaggcactggccctccaactccaaaatcagaggttgcaagaaagggaacactctgttcacgattcagtcgaattacacctgcgagtgcccctggagaaggagatccccgtgacagtcgtccaggagacccaaaaaaaggggcataagctcaccgatagtgaggatgaattcccggaaatcacagaggaaatggagaaagaaatcaaaaacgtctttcggaacggtaaccaggatgaggtgctctccgaagctttcaggttaaccatcacaaggaaagatatacagacactgaaccacctgaactggctcaatgacgagatcatcaatttctacatgaacatgctaatggaacgttctaaagagaagggtctgccgagcgttcacgcatttaataccttcttctttacaaagttgaaaactgctgggtatcaggccgtcaagaggtggacgaaaaaagttgatgtgtttagtgttgacatacttttggttcccattcatctgggggttcactggtgccttgcagtcgtcgactttagaaagaaaaacatcacatactatgactccatgggcggaataaacaatgaggcttgtaggatcctgctgcagtatttgaaacaggaaagcattgataagaagagaaaagagtttgacacaaatggatggcagctgttctcaaaaaaatcacaggagatcccccaacaaatgaacgggtccgactgtgggatgttcgcttgtaagtatgcggactgcataactaaggatcggcctattaattttacgcagcagcacatgccatactttaggaagcgtatggtgtgggagattctgcaccggaaactcctgtag

SEQ ID NO: 242764 - DNA, 1932 bp, synthetic construct
  misc_feature 1..1932: note = Description of Artificial Sequence: Synthetic coding sequence
  source 1..1932: mol_type = other DNA
atggatgatatcgcagaccgcatgaggatggatgccggagaggtcactctggtcaaccataactccgtctttaagactcacctgctaccccagacggggttccctgaagatcagcttagcctttccgaccagcagattctgtcttcccgtcaggggcacctcgacagatcttttacatgctccacacgatcggccgcatacaacccaagctactattccgacaacccatcaagcgattcattcctgggatccggggatttaagaacctttggtcagtccgcgaacggccagtggagaaacagtactcctagttcctcaagtagtctgcagaaaagccgcaatagccggtctttgtacctggaaacccgtaagacctcgtcaggtctgagtaactccttcgcaggcaagtcaaaccatcactgtcatgtgtcggcctacgaaaaatcctttcccataaagcctgtgccatcccctagttggagtgggtcctgccgcagaagcctgctgtcaccgaaaaagacccaacggcgacacgtctccacagcagaggaaactgtgcaggaggaggagcgggagatttatagacagctgctgcagatggtgaccggcaagcagttcaccatcgcgaagccaactacacactttccactgcatctgtctagatgtctgtcatcctccaaaaatacactcaaggacagcctgtttaaaaatggtaacagctgcgcctcccaaattatcggttccgacacctcatcatcaggcagcgctagtattctgaccaatcaagagcagctgagtcactccgtgtatagtctgagctcttacaccccagacgtggcttttggttctaaagatagtgggactctgcaccacccccaccaccatcatagtgtcccacatcagccggataatctggctgcttcaaatacacaatccgaagggagtgattcggtgattcttctgaaggtgaaggattctcagactccaacaccatcaagcactttttttcaggccgaactttggataaaggaactaaccagcgtttacgattcacgtgcccgagagcgattacgccagatcgaggagcagaaggccctcgcattacagctacaaaaccagagactgcaggagcgagagcactcagtgcacgactcagttgagcttcatctgagggtgcccttggagaaggagatccccgtcacagtcgttcaggaaacccagaagaagggacacaagctcactgactctgaagatgaattcccagagattacagaagagatggagaaagagattaaaaatgtattcaggaatggtaatcaggatgaggtcctatctgaggccttccgacttactattacccgcaaagacattcagaccttaaatcacttgaactggcttaatgatgagatcattaatttctacatgaacatgctgatggagaggtccaaggagaagggcttgccctctgtgcacgcttttaacacctttttttttactaaactgaaaaccgccggataccaggcagtcaaacgatggacaaaaaaagtagacgtcttcagcgtggacatccttctggttcccatacacctgggagtgcattggtgcttggccgttgtggatttcagaaagaaaaacataacctactatgatagcatgggcggtattaacaatgaagcgtgccgcatcctgctgcaatatctgaaacaggagtctatcgataaaaaacgtaaagagtttgatacaaacggctggcagttattttctaaaaagagccagatccctcagcagatgaatggatctgattgcggcatgtttgcctgtaaatatgctgactgtataacaaaggatcgccctattaactttactcagcagcacatgccgtattttcggaaacggatggtctgggaaatccttcacagaaaactcctatag

SEQ ID NO: 242765 - DNA, 1935 bp, synthetic construct
  misc_feature 1..1935: note = Description of Artificial Sequence: Synthetic coding sequence
  source 1..1935: mol_type = other DNA
atggacgatatcgccgaccgcatgcgtatggacgcaggcgaagtcacactggtgaaccacaatagtgtcttcaagactcatctgttgccgcaaaccggtttccccgaagatcaattgtctctttctgaccagcagatcttatcctctcggcaaggacatctggatagatcgttcacctgcagcactcgctcagcagcctacaacccctcctattattcagataatccctcatccgattccttcctgggctctggggacctgaggacctttggacaatcagcaaatggccagtggagaaactccacaccatcgagtagttcttcccttcagaaatctcgcaactcacgatctttatacctggaaaccaggaagactagtagcggcttgagcaacagtttcgctggcaagtctaatcaccactgtcacgtctctgcatatgaaaagtctttccctatcaaacccgtgccctctccatcttggtcgggctcttgccgaaggtcactgttgtcacccaaaaagactcagaggagacatgtgtctacagcagaggagactgtgcaggaagaagagcgggaaatttatcgacagttgctgcagatggtgaccggcaaacagtttaccatcgcgaaacctaccacccactttcccctgcacctgtccagatgcctgagttcttccaaaaatactttaaaagacagcctcttcaaaaatggcaactcatgtgcctcgcagatcatcggcagcgataccagcagctctggttccgctagtatccttaccaaccaggagcaactgtcccacagtgtgtactcccttagctcctatacgcctgacgtagcctttggttccaaggattccggaactctgcaccacccacatcatcatcactctgtcccacatcagccagacaacttggcagcaagcaacacacaatctgaaggttcggattcagtgatattgctgaaagtgaaagacagccagacacctactccaagctccaccttcttccaggctgagctgtggatcaaggaactcaccagcgtttacgactcccgagcgcgagagaggttgcgccaaattgaggagcaaaaggctctggcactccaactgcagaaccagcgcctgcaggaacgggagcactctgtacacgacagtgtcgagttgcatctgagagtacctctggagaaggagataccggttacagtggtgcaggaaacccagaagaagggacacaagctgacagactcagaggatgaattcccagagatcaccgaagagatggaaaaagaaatcaaaaacgttttcaggaacgggaatcaggacgaagtgctgtccgaggcgttccggttgaccatcaccaggaaggacattcagacactcaatcacctaaactggctcaacgacgaaataatcaacttctatatgaacatgttaatggagaggagtaaagagaaggggcttccttcggtccatgcctttaacaccttcttttttacgaagctcaaaactgcaggttatcaggccgtgaagcggtggactaagaaggtcgatgtattctcggtggatatcctgctggtgcccatccaccttggggtccattggtgcctggccgttgttgatttccgaaaaaaaaatatcacgtactatgattccatgggtggcattaataatgaggcgtgtagaattctgcttcagtacctcaaacaggagagcatcgataagaaaagaaaggaattcgatacgaacggctggcagctgtttagcaagaagtcccaggagattcctcagcagatgaacggaagtgattgtggtatgttcgcctgcaagtatgctgattgcatcaccaaggaccgacccattaatttcacccagcagcacatgccttacttcaggaagcggatggtgtgggagattcttcataggaagctcctgtag

SEQ ID NO: 242766 - DNA, 2268 bp, synthetic construct
  misc_feature 1..2268: note = Description of Artificial Sequence: Synthetic coding sequence
  source 1..2268: mol_type = other DNA
atgaagaagcagcgcaagatcctgtggcgtaagggaatccatctcgcgttttccgagaagtggaatacgggattcggaggcttcaagaagttctacttccatcagcacttgtgtattcttaaggccaaactgggtcgccctgtcacatggaatagacagttgaggcattttcaagggaggaaaaaagcactccagattcagaagacctggatcaaggacgaacctttgtgtgcaaaaactaaattcaatgtggcgactcagaacgtcagtactctctcttctaaagtcaaacggaaagacgccaagcattttatctcctctagtaaaacccttcttcgcttacaggcagagaagctcctgtcctctgctaagaattcagaccatgagtactgtcgcgagaagaacttattgaaagctgtgaccgactttcccagcaatagcgcactgggccaggctaacggccatcgccctcggacagatcctcaaccaagcgattttcccatgaaatttaatggggaatcccaatcaccaggagaaagtgggacaatagtggtcaccctgaacaatcacaagaggaaaggcttctgctacgggtgctgtcagggcccagagcaccatagaaacgggggtcctctgatacctaaaaagtttcagctcaaccagcaccgaagaataaaactcagtcctctgatgatgtatgagaagttgtcgatgattaggttcagatataggatccttagatcgcaacatttccgaaccaagagcaaggtgtgcaagttacgtaaagcacagaggtcctgggtccagaaggttaccggggatcatcaggagacaagacgggaaaatggggaaggagggagctgctccccctttccatccccagagcctaaagatccttcttgtcgtcaccagccgtattttcccgatatggacagcagtgcagtggtgaaaggcactaatagtcatgtgcccgattgccacactaagggttcttcattcttaggaaaggaactgagcctcgacgaggcgttcccagatcagcagaacggtagcgccaccaatgcctgggatcagtcatcttgtagttcccccaaatgggagtgcacagaactgattcatgacattcccctgcccgagcaccgcagcaacacaatgtttatctcagagaccgaacgggaaattatgaccttgggccaggagaaccagacaagttctgtgagtgatgatcgcgtgaagttaagcgtgagcggtgcagacacctctgtctcgtccgtcgatggccctgtaagccagaaggcagtgcagaacgaaaacagttaccagatggaagaggatggatctcttaagcaatccatcctgtcttccgagcttctggaccatccctattgcaagtcgccactggaggcacccctcgtctgtagcggtttgaagctcgagaaccaagtgggcggaggcaaaaatagccaaaaggccagcccagttgatgacgaacaactctcagtgtgtctctccgggttcctggacgaggtgatgaagaagtatggttcactggtgcctctgagtgaaaaagaagtgctcggtaggctgaaagacgtgtttaatgaggacttttctaaccgcaagccctttattaacagagagattacaaactaccgggcaagacaccagaagtgcaactttcggatattctataacaagcatatgctcgatatggacgacttagccacgcttgatggtcagaactggttaaatgatcaggtgatcaatatgtacggggaactgattatggacgccgtgcctgacaaagtgcatttcttcaactcattctttcaccgtcagctggttaccaagggttataatggagtaaagcgatggaccaaaaaagttgacttgttcaaaaagagcctgctgctgatccctattcatttggaggtgcattggtcgctgatcactgtaactttgtccaatcgtatcatttctttttatgacagccagggaatccactttaagttctgtgtggagaatattcgtaaatacctacttacagaagccagagagaagaatcgacctgaatttctgcagggttggcagactgccgtaacaaagtgtatcccccagcaaaagaacgattccgactgcggagtgttcgttctgcagtactgtaagtgtctcgctctggagcaaccatttcagttttctcaggaagatatgcctagagtgaggaagagaatttataaggagctctgtgaatgtcgcctaatggactag

SEQ ID NO: 242767 - DNA, 3318 bp, synthetic construct
  misc_feature 1..3318: note = Description of Artificial Sequence: Synthetic coding sequence
  source 1..3318: mol_type = other DNA
atggctgccggtaaatctggcggatctgcaggggagattacgtttttagaggccctggctaggagtgaatccaaacgggacggtgggttcaaaaacaactggtcatttgatcatgaggaggaatcggagggagacaccgataaggatggaacaaatctcctgtctgtcgacgaagatgaggacagcgagacttccaaaggaaaaaagcttaatcgaagaagcgaaatagtcgcaaatagctcaggcgagtttattctaaagacatacgtgcggcgtaataaatcagagagcttcaagactctgaaaggcaacccaattgggttgaatatgcttagtaataacaaaaaattgtcggagaatactcaaaatacctctctgtgcagcggaaccgtggttcacggcagacggttccaccacgcccatgcccagattcccgtcgtaaaaaccgccgcacagcgcaaggaatacccgccacacgtacaaaaggtggagataaatccagtgcgtctgagtcgattgcaaggggtggagcggataatgaagaagacagaggagtctgagtcccaggtcgagcccgaaattaagaggaaagtccaacagaaaaggcactgctcaacttaccagccgactccacccctctccccagcatcaaaaaagtgtctcacacacctggaagatctccagcgtaactgtaggcaagccattaccctaaatgagtcaaccggacccctcctcagaacctctattcatcagaatagcggcggtcaaaagtcccagaataccggactgacgaccaaaaaattttacggcaacaatgtggagaaagtacctatcgatattatcgtgaactgcgacgactcaaagcatacttatctccagacgaacggtaaggtaatcttgcctggcgctaagattcccaagatcacaaacctgaaagagcgcaagacctccctctctgatctaaacgaccccatcattctaagctccgatgatgatgatgacaatgatcgcactaatcggagagagtcaatctctcctcaacctgctgattctgcttgcagtagcccggcacctagcactggcaaggtcgaggccgctctgaatgagaacacctgtcgcgctgagcgcgagctgcgctctatcccagaggattccgaactaaacactgtcacccttccaagaaaggcaaggatgaaggaccaatttggcaattctatcattaatacccctctgaaacggaggaaagtgtttagtcaggaacccccagacgctttggcgctttcctgccagtccagcttcgatagcgtcatactgaactgtcgaagtatcagagttggaacattgtttagacttcttattgaacccgtcatcttttgtctggacttcatcaagatacagctggatgagcccgaccatgaccctgtggagattattctgaatacgagtgacctgacaaagtgcgagtggtgtaatgtgaggaagctccccgttgttttcctgcaggctattcccgctgtttatcagaagctttccattcagctgcaaatgaataaagaggataaggtgtggaatgattgtaaaggagttaataagctgacaaatctcgaggagcaatatataatattgattttccagaacggcttagacccccctgcgaatatggtcttcgagagcataattaatgaaataggtatcaagaacaacatttcgaatttctttgccaagattcccttcgaggaggctaatgggaggctggtcgcctgtactaggacctacgaggagagcatcaagggctcttgtgggcagaaggaaaataaaattaaaactgtctcatttgagtccaagattcagctaagaagtaagcaggagtttcaattcttcgacgaagaggaagaaacaggtgagaaccatacaatttttatagggccagtcgagaagttgattgtctacccccctccacccgctaagggcggaatcagcgtgactaacgaggatttacattgcctgaacgagggtgaattcttgaacgatgtcattatagacttctatcttaagtatctagtacttgaaaaactgaaaaaggaagatgctgaccgcatacatattttcagttctttcttctataagagactcaatcagagggaaagacgtaaccacgagactactaaccttagcattcagcagaaaagacacggccgagtgaagacctggacgaggcacgtggatatcttcgagaaagactttatcttcgtccctctgaacgaagccgcacactggttcctggcagttgtgtgcttcccgggattggaaaagccaaagtacgaaccaaacccccactaccatgaaaacgctgtgattcagaaatgcagcacggtcgaggatagttgtatttctagctccgccagcgagatggagtcctgttctcagaatagcagcgccaaacccgtcatcaagaagatgctgaataagaagcattgcatagccgtgatcgattcaaaccccggtcaggaagaatcagatcctcggtacaagagaaatatctgcagtgtgaaatactctgtgaaaaagattaaccatacagcctcggaaaatgaggagtttaataagggtgaatcgacatctcaaaaggtggcagataggaccaagtcagaaaatggccttcagaacgagtctttgagctctacgcatcatacagatggtctgtcaaaaatacgccttaactatagcgatgagtcacctgaggccggaaagatgctggaggatgaacttgttgacttcagtgaggaccaggacaatcaggatgatagttcagacgatggtttcttggctgacgacaattgcagctctgaaattgggcaatggcatctcaagcctaccatctgcaagcagccttgcatactcctgatggattccctcagagggccttcgcggtcaaatgtggtaaagatccttcgcgagtacctggaggtggagtgggaagttaagaagggctcgaagcgctccttttccaaggatgtgatgaaagggtcgaatccaaaggtacctcagcagaacaatttttccgattgcggcgtgtatgtcctgcagtatgtggagtctttctttgaaaaccccattctttcattcgaacttccaatgaatctcgccaactggtttccacccccacgtatgcgaaccaagcgcgaggagattagaaacattatcttgaagctgcaagaggatcagagtaaagagaaacggaagcacaaggacacttacagcaccgaggctccactcggggaggggacagagcagtacgtgaatagcattagtgactag

SEQ ID NO: 242768 - DNA, 3339 bp, synthetic construct
  misc_feature 1..3339: note = Description of Artificial Sequence: Synthetic coding sequence
  source 1..3339: mol_type = other DNA
atggctgctggaaagtccggtggctcagcaggtgagatcaccttcctagaggcactggcacggagcgagtcaaaaagggacggcggatttaagaataattggagcttcgatcatgaagaggagtctgaaggggatacagataaggatggaaccaatttactttccgtggacgaggacgaggacagcgagacatcaaagggcaaaaaactcaacagaaggagtgaaattgttgccaactcaagcggcgaatttattctgaagacttacgtccgccgaaataaatcggaatccttcaaaacccttaagggcaacccaatcggcctgaatatgttgagcaataataaaaaacttagcgagaatacccagaacacatctttatgctccggcacagtggtgcatggtagacgcttccaccatgcgcacgcacaaatccctgtggtgaagactgctgcccagaggctcctatctaaccagattctgaaagagtacccgccacacgtgcagaaagtggaaatcaaccccgtacgactgagtcggttgcagggtgttgagaggatcatgaagaaaactgaggagtccgaatcacaggtcgagcccgaaatcaaacgcaaagtccagcagaagcgacactgttctacttaccaaccaaccccaccactgtcacccgcttccaagaaatgcctaacgcacctcgaagatcttcagcgtaattgtcgccaagcgatcactctgaacgagagcaccggtccccttttgcgcacaagcatccaccaaaacagtggtggccagaagagccaaaacactggtctgacaacaaagaaattttatggcaataacgtagaaaaggtgccgattgatatcatcgtcaattgcgatgactcaaaacatacctatctccagaccaacggcaaggtgatactcccaggcgctaagatccccaagattaccaacctgaaagagcgcaagacttccctgtccgacctgaatgatcctatcattctgtcatctgatgacgatgatgataacgacaggaccaaccgcagggaaagtatttcgccccagccagccgattccgcctgctctagccccgctccatcaacaggcaaagtggaagctgccctgaacgaaaatacatgtagagcagagagggagcttcgctctatcccagaggactctgagctgaatacagtcaccctccctcgaaaggcaagaatgaaagaccagtttggaaattccatcattaacaccccgctaaaacggcgaaaagtgttttcccaggagcctcccgacgccctagcgctcagctgccagtcatcctttgattccgttatcctgaattgcagaagcatccgcgtaggtaccttatttagactgctgatcgagccagtgattttttgtctagattttatcaagatccaactagacgagccagaccacgaccccgttgaaataatcttaaacaccagcgacctgacaaagtgcgagtggtgcaacgttaggaagcttccagtggtcttcctgcaggctattcctgctgtgtaccagaagttgagcatacagctgcagatgaataaagaggacaaggtctggaatgattgtaagggggttaataagctgaccaatttggaagagcagtatatcattctgatttttcagaatggcctggaccctcccgctaacatggtatttgagtccatcattaatgagataggcatcaaaaataacatttcaaacttctttgcgaaaataccattcgaggaggctaacggacggcttgtagcttgcaccagaacatatgaggaatcaatcaagggctcgtgtggacagaaggaaaacaagatcaaaactgtttcctttgagagcaaaatccagctgcgatccaagcaagaatttcaattttttgacgaggaggaggagacgggcgagaaccacacaatttttattggccctgtggagaagctgatcgtgtacccccctcccccagccaaagggggaatcagcgtaaccaacgaagatctgcattgtctgaatgagggtgaattcttgaatgatgtgatcatcgacttttacctgaaatacctggtcctcgagaagctgaaaaaggaggacgctgatcgaattcacattttcagctcattcttttacaaacgtttgaaccagagggaacgccgtaatcatgaaacaacaaatttgtctattcaacagaagcgacatgggagggtcaagacctggacccgacatgtagatatttttgaaaaggactttatcttcgttcctctcaatgaggccgcacattggtttctcgcggttgtctgttttcccggacttgagaagcccaaatatgagcccaatccacactatcatgaaaatgcagttattcagaagtgcagtactgttgaagatagctgcatttcttcttctgcatcggaaatggaaagttgctcacagaacagcagcgccaaacccgtgattaagaagatgctcaacaaaaagcattgtatcgccgtgattgactccaacccaggccaggaggagagcgacccacgctacaaaaggaacatatgctctgtgaagtactcagtgaagaagattaatcacaccgccagcgagaacgaggaattcaataagggtgagagtacctcccagaaggtggccgacaggactaaatcagagaacggactgcagaatgaatcattgtcctctactcatcacaccgacggtctttctaagatccgtctcaattatagtgacgagtctccagaggccggtaagatgctggaggatgagcttgttgacttctctgaagatcaagataatcaggacgacagcagcgatgatggcttcctggccgacgataattgctcctctgaaattggacaatggcatctcaaaccgacaatttgcaaacagccctgtatcctgctcatggactcgctcaggggaccgagtagatctaatgtggttaaaattcttagagaatacctggaagtggagtgggaggtgaagaaggggtccaaacgctcgttctctaaagatgtgatgaaagggtccaacccaaaagtgccccagcagaacaatttctctgactgcggagtctacgtactacagtacgtagagtccttttttgagaatccaatcctctcatttgagttacctatgaatttggcgaactggttcccccctcctcggatgaggaccaaaagagaggaaataaggaacatcattttaaagttacaagaagatcagtccaaggaaaagaggaaacacaaggacacctactcgactgaagctcctctgggagaggggacagagcagtacgtcaatagtatttctgactag

SEQ ID NO: 242769 - DNA, 3339 bp, synthetic construct
  misc_feature 1..3339: note = Description of Artificial Sequence: Synthetic coding sequence
  source 1..3339: mol_type = other DNA
atggccgcaggcaaaagcggcggatcagcaggggaaattacattcttagaggccctcgctaggtctgagtcaaagagggacggtggatttaagaacaattggtcctttgatcacgaggaagagtcagagggggatactgacaaggacggaaccaatctgttaagcgtggatgaagatgaggattctgaaacttctaagggcaaaaagctaaatagacggtcagaaatcgtggctaactcgtccggtgagttcatcctaaagacctacgttcggaggaacaagagcgaatcattcaagactttgaagggaaaccctatcggcctgaatatgctgtcaaacaataaaaagttgtccgaaaacactcagaatacttctctgtgctcaggcacagtggtccatggcaggcgattccatcatgcccacgcacagatccccgtggttaaaactgcggctcaatcatccctggataggaaggagagaaaggagtaccctcctcacgttcagaaggtggagatcaatcccgttcggctttcacggctgcaaggtgtggagcggattatgaagaagacggaggagagcgagtctcaagtcgagcccgagataaagcgaaaggttcagcagaagcggcattgttctacctatcaaccaacacccccattgagtccagctagcaaaaagtgtctcacccacctcgaggatctccagagaaactgccgccaggcgatcactttgaacgaatccacaggccctttattaaggacatccatccatcagaactcaggtggacagaagagccagaacaccgggctaacaacaaagaagttctatggcaataacgtggagaaggtgccgatcgacatcatcgtcaattgcgatgattcaaagcatacatacctgcagactaatggcaaagtcattctacctggggcaaagataccaaagataacaaacctcaaagagcggaagacaagcctgagcgacctcaatgatcccattatcttgagctctgacgatgatgacgataatgacagaacaaacagacgggagagcatttctccacagccggctgattctgcctgctcatcgcctgcaccatctaccggaaaagtcgaggcagctctgaatgagaatacatgccgcgctgagagggagctccggtccattcccgaggattccgaactcaacacagttacgcttcctagaaaggctaggatgaaagatcaattcggcaactcaatcatcaacactcccttaaaacggcgaaaggtgttcagtcaggaaccgcctgacgcgttggcactcagctgccagagctcatttgactctgtaattttaaactgtcggtccataagggtgggaactctgtttcgactactgattgagcccgtgatattctgcctcgacttcattaagattcagctggatgaacccgaccatgaccccgtggaaatcattctgaatacatcggatctgacgaagtgtgaatggtgcaatgtgagaaagctccccgtagtgttcctgcaggctattcccgcagtgtatcagaaattgagcatccaacttcaaatgaataaggaggacaaagtgtggaacgattgtaaaggggtgaacaaactgaccaaccttgaggaacagtatatcattctgatctttcaaaatggcttagacccaccagcgaacatggtctttgagtctattatcaacgagatcgggatcaagaacaacattagcaatttctttgccaaaattccttttgaagaagccaacggaagattagttgcctgtacaagaacatatgaggaatccattaaaggatcttgcgggcagaaagaaaacaagatcaaaaccgtgtcattcgagagcaaaatccagcttcggtcaaaacaagaattccagttttttgacgaagaagaggaaacaggcgagaatcataccatctttataggccctgtcgagaagttaatcgtttatccaccacctcctgccaagggagggatttcagtaaccaacgaagacctgcattgtctgaacgagggcgagttcctgaacgacgtgataatcgatttttatttaaagtaccttgtgctggaaaaacttaaaaaggaggatgccgaccgcattcatatattctcgtccttcttttacaagcggctgaatcagagggaacgccgaaatcatgagaccacaaatctttctatacagcagaaaagacacggtagggtgaagacctggaccaggcatgtggacatattcgaaaaagattttatatttgtgcccctgaacgaagcagctcattggttcctggcagtcgtctgttttcccggtctcgagaaaccaaaatacgaaccaaatccccactatcacgagaatgcagtgatccagaaatgtagcactgtggaagacagttgcatcagcagctctgcttctgagatggaatcctgctcacagaactcttctgctaagccagtcattaaaaaaatgctgaataagaagcactgcatcgcggttattgacagtaacccagggcaggaagaatccgacccacgatacaaacgaaatatctgctctgtcaaatactccgtcaagaaaattaatcacacagctagcgagaatgaagaattcaataagggggagtcgacctcgcaaaaggtcgctgaccgcacaaaatcagagaacggacttcagaacgagtctctgagttccacccatcacacggacggactctcgaaaatccgtttgaactattcagatgaatctcccgaggccggtaaaatgctcgaggacgaactggttgactttagtgaagatcaggacaaccaggatgattccagcgacgacggttttctcgccgacgacaattgcagtagcgagatcggtcaatggcacctgaagcctaccatctgcaagcagccgtgtattctgctcatggattcattgagaggtccttcccgctccaacgtggtgaagatactccgggaatacttggaggtagaatgggaggttaaaaagggatctaaacggagtttcagcaaggatgtgatgaaaggatccaatcccaaggtcccccaacagaacaatttcagcgattgtggggtttacgtgttgcaatacgtcgagtctttcttcgagaacccaatcttgtcattcgagctgcccatgaacctagccaactggttcccgcctccacgcatgcgtacaaaacgggaggagatcagaaatataattctgaagctgcaggaagaccagtccaaagaaaaacgtaaacataaagacacctattcaactgaggcccctcttggggagggaacagaacagtacgtaaattcaatctcggattag

SEQ ID NO: 242770 - DNA, 1074 bp, synthetic construct
  misc_feature 1..1074: note = Description of Artificial Sequence: Synthetic coding sequence
  source 1..1074: mol_type = other DNA
atggccgctggcaagtctggaggctccgcaggcgagatcacgttcctggaagccttagccagatcagaatctaagagggacggaggtttcaagaataattggtctttcgaccatgaggaagagtccgagggcgatactgataaggacggtactaacttgctgtccgtggacgaggacgaggacagcgagaccagcaaaggcaagaaactcaaccgtcgctctgagattgtggctaactccagcggggaattcatcctgaagacatacgtacggagaaataagtcagaatcctttaaaacacttaagggcaaccctatcggtttgaatatgcttagtaataacaagaagctgtccgagaacacccagaacacatccttatgctctggtactgtggtccatggcagaagatttcaccatgctcatgcccagatccctgttgttaagacagccgcacagtctaatcagatcctcaaagagtatcctcctcacgtccagaaagtcgagataaaccccgttcgattgtcacggctccaaggcgtggtaatactcagttctgatgacgacgacgacaatgacagaaccaatcggcgtgagagtattagtcctcagcctgccgactccgcctgcagctcacctgcgccaagtaccggtaaagtggaagccgcacttaacgagaatacgtgccgtgcagaacgtgagcttaggtctattcccgaggattccgagttgaacacagtaactctgccacgaaaggcaaggatgaaggatcagttcggcaactctatcattaacacgcccttaaagagaagaaaagtgttctcccaggaaccccctgacgcattggccctttcatgccaatcttcattcgactcagtgattttgaactgtagaagtatcagagtgggcacattattcagactgctgatcgaaccagtcatagtaattattaagattttcttcattactcacaaaaagccagaccacgaccctgtcgaaatcatcctcaatacttcagatctgaccaaatgtgagtggtgcaacgttcggaagctgcctgtcgtttttttgcagtag

SEQ ID NO: 242771 - DNA, 1107 bp, synthetic construct
  misc_feature 1..1107: note = Description of Artificial Sequence: Synthetic coding sequence
  source 1..1107: mol_type = other DNA
atgaaggatcaatttggcaatagcatcataaatacccctttaaagcggagaaaggttttctcgcaagagccccctgacgccctggccctgtcctgccagtcatcctttgatagtgtgattctcaattgcagatcaataagagtcggcacactcttccggttgttaatagaaccagtcatcttttgtctcgattttatcaagattcagcttgatgaaccagatcatgaccctgttgagatcatactaaacacctctgatttaaccaaatgtgaatggtgcaacgtgagaaagttacccgttgtgtttctgcaggctatcccagccgtataccagaaattgtcaatccagcttcagatgaataaagaagataaagtttggaatgactgcaaaggggtaaataagctgacaaaccttgaagaacagtacattatcttgattttccagaatggtctggaccctcctgctaatatggtatttgaaagcatcattaatgagatcggcatcaaaaataacatctctaatttctttgccaaaataccattcgaggaggctaacgggagactcgtggcctgtacccgcacctatgaggagtcaattaagggtagctgcgggcagaaagagaacaaaattaagaccgtgagcttcgaaagtaagatccagctgagatcaaaacaagaattccagtttttcgacgaagaagaagagacaggagagaatcacacaatctttatagggcctgtggagaaactgatcgtgtatcccccaccacccgctaaaggaggcatctccgtgaccaatgaggacctccactgtcttaacgagggtgaattcctgaacgatgtgatcatcgatttctacctgaagtacctcgtactcgagaagcttaaaaaagaggacgctgaccgcattcacatatttagttcattcttctataagagactgaatcagagggaacggcgaaaccacgaaactacaaacctgagtatccagcaaaagcgtcacggcagagtgaagacctggactaggcacgtggacattttcgaaaaagacttcatattcgtgccactaaacgaggcatggttgaaacagaaccagaccaaactctag

SEQ ID NO: 242772 - DNA, 2955 bp, synthetic construct
  misc_feature 1..2955: note = Description of Artificial Sequence: Synthetic coding sequence
  source 1..2955: mol_type = other DNA
atggataagcgcaaattaggacggaggccatccagttcagagattattacggaaggcaagcggaaaaagagcagctctgacttgtcagaaattaggaagatgctgaatgcaaagccagaggatgtccacgtgcaatccccactatccaaatttagaagttctgaacggtggactctgcccttacagtgggaacgaagtcttcggaataaagtaatttctctggaccataagaataaaaagcatatccggggttgccccgtcacctcgaagtcttcacctgagcggatcccccgagtgattctcactaatgtgctgggaaccgagctgggtaggaaatatatccgcaccccccctgtcacggaaggctcactgtcagataccgataatctccaaagcgagcagctctccagcagtagtgatggtagtcttgagtcttatcagaatctaaacccacataagtcatgctatctcagtgagcggggatctcaacggtctaagactgttgacgacaattctgcaaagcaaacagcccacaataaagaaaagagacgcaaggacgatggaatctctctgctgatctcagacacgcagcccgaagatcttaactcaggtagtcgcggatgcgatcacttggagcaggaatcaaggaacaaggatgttaagtacagcgactctaaagtggagcttacactgatctcgaggaaaacgaaaagaaggctgcggaacaacttaccggattcccagtactgtacctcattagacaagagcaccgagcagactaaaaagcaggaagatgattctactatcagtaccgagttcgaaaaaccgtccgaaaattatcaccaggatcctaagctgccagaagaaataacgaccaagcccactaagtccgattttaccaaactgagctcactcaattcacaggagttaacactcagtaacgccactaagagcgcctcagccggatcaaccacagagaccgtcgaaaactccaacagtatcgatattgtggggatttctagcctggtggagaaagacgagaatgaactaaatactatagaaaaaccgatcctgcggggtcacaatgaagggaaccagtccctgatttctgccgagcccatcgtagtgtcatcggacgaagaaggcccagtggagcataaatctagcgaaatcctaaaattgcagtccaagcaggacagagagacgacaaacgagaacgagagcactagcgaatcagccttactggagcttcccctgatcacctgcgaaagcgtgcagatgtcttccgagctgtgtccttataaccctgttatggaaaacatctcatcgattatgccaagcaatgagatggaccttcagctggacttcatattcacctccgtgtacatagggaagattaagggtgcaagtaaaggctgtgtgaccattacaaagaagtatattaagatccctttccaggtttccttaaacgagatctcactgctcgtggacacgacccacttgaaaagattcgggctgtggaaatctaaagatgacaatcacagcaagcgctcccacgccatcctctttttctgggtctcatctgattatttacaagagattcagacacaacttgagcatagtgtgcttagtcagcagagcaaaagcagcgaattcatctttttggaattacacaatcccgtcagccaacgtgaagaactaaaactcaaggatatcatgacagaaatatctatcatctcaggagaactggagctcagttaccccctcagctgggtgcaggcttttccacttttccagaacctcagtagcaaggagtccagcttcatccattattactgtgtcagcacttgttctttccccgcaggggttgcagtggccgaggagatgaaactgaagtccgtgagccagcccagcaacacggacgctgccaaacccacgtacacttttctgcaaaagcagtcgtccgggtgttactcactctcaattacgtctaatcctgatgaggagtggcgggaagtacgccacactggcctcgttcaaaaattgattgtgtaccccccacctcccactaaagggggtctcggcgtgaccaacgaagatttagaatgtctcgaggagggagagtttctcaatgatgtaattattgatttctatctcaaatacttgatcctggaaaaggcctctgatgagctcgtagaacgcagtcacatcttctccagcttcttttataagtgtctcacccggaaggaaaacaatttgaccgaggacaatccaaatcttagcatggcccagcgacgtcataaaagggtgaggacttggacccgtcatattaacatattcaacaaggactacatttttgtgccagtcaatgagtcatctcactggtatctagcagtgatctgttttccatggttagaggaggcagtgtatgaggatttcccccagactgtgagccaacagagtcaagctcaacagagccaaaatgacaataagaccatagataacgaccttaggaccaccagcacactctctctgtctgctgaggattcccagagcacagaaagtaacatgagcgttcccaaaaaaatgtgtaagagaccctgcatcctgattctggattctctaaaagctgctagtgttcagaataccgtgcagaacttgcgtgaatacctcgaagtggaatgggaagtgaaacttaaaactcaccgccagtttagcaaaaccaatatggtggatctctgcccaaaagtgccaaagcaggacaactctagcgactgtggcgtgtatctcttgcagtatgtggaaagtttttttaaagatccaatcgttaatttcgagctacctattcacttagagaaatggtttcccagacacgttattaaaaccaagcgcgaggacatccgcgagttaatacttaagctgcacctccagcaacagaagggctcgtcctcttag

SEQ ID NO: 242773 - DNA, 3054 bp, synthetic construct
  misc_feature 1..3054: note = Description of Artificial Sequence: Synthetic coding sequence
  source 1..3054: mol_type = other DNA
atgctcaatgctaagcctgaggacgttcacgtgcagtcacccctgagtaagttcaggtcaagtgagcgatggaccttgccgctgcagtgggaacgctcactgcggaacaaggtgatcagcctggatcacaagaacaaaaaacatatccgtggttgccccgtgacaagtaaaagcagtcccgaaaggcagctcaaggtgatgctgactaatgtcctgtggaccgacctggggaggaagtttaggaaaaccctaccacggaatgatgcaaatttgtgtgatgctaacaaggtccagtcagatagtctgcccagtacgagcgtagatagtctggagacatgtcaaaaactggaacctctgcgtcagtctctgaacctctccgagagaattcctagggttatcctgactaatgtgctgggcaccgagctgggtcgtaaatacatcagaacaccaccagtgacagaggggagtttgagtgacacagataacctccagagtgagcagttgtcctcctcatctgatgggtcactcgaatcctatcagaatttaaaccctcacaaatcttgctacctgtcagagcggggtagccagcggagtaagacggtcgacgacaacagcgcgaagcagaccgcacacaacaaggagaagcggcgtaaggatgacggcatttcacttctgatttccgatacgcagccggaagacctgaactctgggtcacgtggttgcgatcatcttgagcaggagtcaagaaataaggacgttaagtactcagatagcaaggtggagctgaccctgattagccgcaaaactaagaggcgactgagaaataatctacctgactcccagtattgtacctctctagacaaatcaaccgaacagacgaagaagcaggaggacgattctacaatctcaactgagttcgagaaacctagcgaaaattaccatcaggaccctaagctgccggaagaaatcaccactaaacctaccaagtcagactttaccaagctctcctccctcaactctcaggagctcaccctttctaatgctacaaaaagcgcttctgccggatccaccactgagacagtcgagaactccaacagtatcgatatcgtgggaatctcgtctctggtcgaaaaagatgagaacgagttgaacacaatcgagaagccgattttgcgaggccataacgaaggcaatcagtccctcatctctgcggagcctatagtggtgtcttcagatgaggagggtcctgtagagcacaagagttcagaaattctgaagcttcagtctaagcaggacagagaaaccacaaacgaaaacgagtctacttccgaaagtgccctgttagagctgcctctcatcacatgtgaatcagtgcagatgagcagcgagctgtgtccctataatccggtgatggagaacattagtagtatcatgccaagcaacgaaatggaccttcagctggactttatcttcacctccgtttacatcggtaagatcaagggagcgtctaaaggatgcgttacaatcaccaaaaagtacatcaagatccccttccaagtcagcctgaatgagattagtcttctggtggataccactcatctcaagcgcttcgggctatggaaatcaaaagatgataaccacagcaagcggagccatgccatactctttttctgggtgtcttcagattaccttcaagaaatccagacgcagttggagcactctgtgttgtcccaacagtcaaagagttctgagtttatttttctcgaactgcacaacccagtgagtcagcgagaggagctgaaactgaaagacatcatgaccgagatctcgatcatcagcggcgaactggagcttagttatcccttatcatgggtccaggcttttcccttatttcaaaacttgtcttctaaagagtcttcctttattcactactattgcgtttcaacctgctccttccccgcaggcgtggctgtggcagaggagatgaaactaaagtctgtgtctcaaccatccaatacagacgcagccaaacccacgtatacattcctccagaagcagtccagtgggtgttattccttgtctatcacgtccaaccctgacgaggagtggagagaggtccgtcataccgggctcgtgcagaaattaatcgtataccctccgccaccaactaaagggggattgggcgtgactaatgaggacttggagtgtcttgaagagggcgaatttctcaacgacgtgatcattgacttttacctgaagtatctgatcttagaaaaggccagtgacgaactggtcgagaggagccacattttctcttctttcttctacaaatgcctcactcggaaggagaacaatctgactgaagacaaccccaatttgtctatggcgcagagaagacacaaaagggtgagaacgtggacacgccatattaacattttcaataaggattacatattcgtgccagtaaacgaatcctctcattggtacctggctgtcatttgttttccctggctggaggaggccgtctatgaggactttcctcagactgtgtcccagcagtcccaagctcagcagtcacagaatgataataaaaccattgataatgacctacgaactacaagcaccctgagcctttcagcggaggacagccagagcaccgagagcaacatgagtgtgccgaagaaaatgtgcaaacggccttgcatcttaattctcgatagcctgaaggcggctagcgtgcagaacacggttcagaatttgagagaatatctggaggttgagtgggaagtgaagttgaaaacccatcggcaatttagtaagacaaatatggtcgacctttgtccgaaggtgccaaaacaggacaattctagcgattgcggtgtgtacctgctacagtatgtggaatcattcttcaaggacccaatcgtgaactttgagctgccaattcatctggagaaatggttcccccgtcacgttataaagactaagagagaggatatccgggaattgatactgaagctccacttgcaacagcaaaagggatctagcagctag

SEQ ID NO: 242774 - DNA, 2661 bp, synthetic construct
  misc_feature 1..2661: note = Description of Artificial Sequence: Synthetic coding sequence
  source 1..2661: mol_type = other DNA
atgctgaatgcaaagcctgaggatgtgcacgtgcagagtcctttgagcaagttcaggtcatccgagcgctggacgctgcccctgcaatgggagcgatccctgcgtaacaaggtgattagtttggaccataaaaacaaaaagcacatccgcggatgccccgttacttcaaaaagctcccccgagcgaggatcccagaggtccaaaaccgtcgacgacaatagtgctaaacagactgcacacaacaaggagaagcgaaggaaggacgatgggatttctctcctaatctcagacacgcaacccgaggacttgaacagtggatcaagaggatgtgaccatttggaacaggagagccggaacaaggatgtcaaatacagcgacagtaaagtcgaactgacactgatttctcggaaaaccaagcggagactgcggaacaatctgccagactctcagtattgcacatccctagacaagtctaccgaacagacgaagaagcaggaagatgattcaaccattagtaccgaatttgaaaagccaagcgaaaattaccaccaagaccccaagctgcccgaagagattaccacaaagcctactaagtcagactttacaaaactttcaagcctgaactctcaggagcttactctgtcaaacgcgaccaagtctgcaagcgcaggctctaccacagagaccgtggaaaactctaacagtattgacatcgtggggatctcgtccctggtagagaaagacgagaatgagctgaataccatcgaaaaaccaatcctccgcggacataacgagggcaaccagtctctgatttccgccgagcccatcgttgtaagctctgacgaggaaggcccagtggagcacaaatcaagcgagattctgaagctccagtcgaagcaggaccgcgagacaacaaatgagaacgagagcacaagtgagtctgcactgctcgagctgcccctgataacctgtgaatccgtccagatgtcctcggagctttgcccttacaatcccgtgatggagaatatcagctccatcatgcccagcaatgagatggatctgcagctggattttatttttacctcagtgtacatcggcaaaattaagggcgcatccaagggctgtgtcacgataaccaagaagtatattaagatacctttccaggtgtctctaaatgagatctctctactggtggacactactcatctgaaaagattcggactgtggaagtccaaggacgacaatcatagcaagagatctcatgcaattcttttcttttgggtcagttccgattacctccaggagatccagacccaactagaacacagcgttctatctcagcagagcaaaagctcagaattcatttttctggagctgcacaatcccgtgtctcaacgcgaggagctcaaactaaaggacataatgaccgaaattagtattatttccggtgagctggagttgtcttatcccctcagttgggttcaggcatttccactgtttcagaacctcagttctaaggaaagttcttttattcactattattgcgtgtcaacctgttccttcccagccggtgtagccgtggctgaggagatgaagctgaagtcggtgagtcagccctccaatacagatgcagccaagccaacatatacctttcttcagaaacagtcttcaggatgctactctctttcgatcacttccaatcctgatgaggaatggcgcgaagtgcgacatacaggactcgtccagaagctgatcgtgtacccaccccctccgaccaagggcggactgggggtgactaacgaagatctagagtgcctcgaagagggcgaatttttgaacgatgttatcattgatttctatctgaaatacctcattttggaaaaagccagcgatgagctggtcgagagatcccacatcttctcttcatttttttacaagtgtctaactaggaaagaaaacaacctgaccgaggacaatccaaacctcagcatggcccagcggagacacaaacgggtgcgtacctggaccagacatatcaatatctttaataaagattatatcttcgtgcccgtcaatgagtcctcccactggtacctggctgtcatttgctttccatggcttgaagaggccgtgtacgaggactttcctcagactgtgtcgcagcagtcacaggcacagcaatcccaaaacgacaataaaactatcgacaacgacctgagaaccacgtccacgctctctctcagcgccgaggatagtcagtccacagagtcgaacatgtctgtgccaaagaaaatgtgcaagcggccttgtatcctgatactggactctctgaaagctgctagcgtgcagaacaccgttcagaatctccgtgaatacctcgaagtcgaatgggaggtgaaacttaaaacacaccggcaattttcaaagaccaacatggtagatctttgcccaaaggtgccgaagcaggacaacagcagtgattgtggcgtttatttactgcagtacgttgaaagcttttttaaggaccccatcgttaatttcgagctgcctattcatctggagaagtggttcccccgtcatgttatcaagacgaaaagggaggacatccgggaactgattctgaaactacacctgcagcagcagaagggcagctctagttag

SEQ ID NO: 242775 - DNA, 717 bp, synthetic construct
  misc_feature 1..717: note = Description of Artificial Sequence: Synthetic coding sequence
  source 1..717: mol_type = other DNA
atgaaaaaatttctgtacattaaaagtgtatttcacacgctgcgcatggcgcagcgcagacacaagcgtgtccgcacatggacccggcatataaacatctttaacaaggactatattttcgtgccagtcaacgaaagctctcactggtacctggcagtgatctgctttccctggttagaggaagcagtgtacgaggatttccctcagacagtgagccagcaatcccaggcccagcagtctcaaaacgacaacaaaaccattgacaacgacttgcggaccacatcaaccctctccctgtctgccgaggatagccagtcaacagaatccaatatgtctgtaccaaagaagatgtgcaagagaccatgtatccttattctggattctctaaaagcagccagcgtgcaaaacaccgtgcagaacttacgcgaatatctagaagtggagtgggaagtgaagctgaaaacacaccgccagttctctaagaccaacatggtagacctgtgtcccaaagttccaaagcaggacaattccagcgactgcggagtttatctgctgcagtacgtggaaagtttcttcaaagacccaatcgtaaacttcgaactgcctatccatctggaaaagtggtttccccgacatgtgatcaagactaaacgggaagatataagagaacttatcctcaaattacatctgcagcaacaaaaagggagcagtagctag

SEQ ID NO: 242776 - DNA, 2958 bp, synthetic construct
  misc_feature 1..2958: note = Description of Artificial Sequence: Synthetic coding sequence
  source 1..2958: mol_type = other DNA
atggataaacggaaactcggtagaaggccatcttcctcagaaatcatcacagaagggaagcggaagaagagtagctcagacctcagcgagatcaggaagatgttaaacgctaagccggaggacgtgcacgtccagtctccgctgtccaagtttaggtctagtgagcgatggaccctccccctccaatgggagagaagtctcagaaacaaggtaattagtctcgaccataaaaataaaaagcacattcgtggctgtccagtgacctcaaaaagctcccccgaacgtcagcttaaggttatgcttacgaacgtactctggacagacttggggagaaagtttaggaagacgctccctcgcaacgatgctaacctgtgtgatgccaataaggtccagagcgatagtcttcccagcaccagcgtcgactcgctggagacctgtcaaaaattagaacccctccgccagtccttgaaccttagtgaacgaggctcccagagaagcaaaactgtcgacgacaattccgcaaaacagaccgcccacaacaaggaaaaaaggcggaaagatgacggaatctccctattaatatcagacactcagccagaagatcttaactctgggtcaaggggatgtgatcacttggaacaggagagtcgtaataaggatgtgaaatactcagacagcaaggtagaactcaccctcatttcccgtaaaacgaaaagacgcctgagaaacaatctgccagactcccagtactgtacatctttggataaaagcacagaacagactaagaaacaggaggacgactcaaccattagtactgaattcgagaagcccagtgagaattaccatcaagaccccaagcttcctgaggagattacaacaaagcctaccaagtctgattttactaaactctctagtctgaattcacaggagctcaccctgtccaacgcgactaaaagcgcttccgcgggaagcaccaccgagacagtcgagaatagcaatagtattgacatcgtcgggatttcatccctggtggaaaaagacgagaatgagttgaacaccatcgagaagccaatactccgtggtcataatgagggcaaccaatctttgatatctgctgaaccgattgtggtctctagtgatgaggagggtcctgtggagcataaatctagcgaaatcctgaaactgcagtccaagcaagatcgcgagactaccaatgaaaatgaatctacttcggagagtgctctactggagctaccacttattacatgcgagtctgtgcagatgtcctctgagctgtgtccctacaaccccgtgatggaaaatattagttctattatgcctagtaacgaaatggatctgcagctggactttatcttcacaagcgtctatattggaaaaattaaaggagctagtaaaggttgcgtcaccatcactaaaaaatacattaagattcccttccaggtttccttgaacgaaatctccctcctggtcgatacaacccacctgaagcggttcggcctgtggaaatctaaggacgataaccacagcaaacgatcccacgccattctcttcttttgggtatcaagcgattacctgcaagagatccagacgcagctcgagcattccgttttatcccagcagagcaaatcatccgaattcatcttccttgaacttcacaaccctgtgtcacagcgggaagaactaaagctgaaagacatcatgacagaaatttcgattatttccggagaactggagttgagctaccctctgagttgggttcaggccttccccctcttccagaacttgagcagcaaagaaagctcctttattcactattactgcgttagtacgtgtagcttccccgcaggtgttgccgtggctgaggagatgaagctgaagtcagtctctcagccctccaacacggatgccgcaaagccaacctatacgtttctgcaaaagcagtcctccgggtgttacagcctatctataacgtccaatccggacgaggaatggagggaggtcagacacacaggcctagtgcagaagctcatagtctacccacctcctccaaccaagggaggcctgggggtcactaacgaagatctggagtgtctggaggagggagagtttctgaatgacgtcatcatcgacttctatttgaaatatctcatactcgagaaggcttcagatgaattggtggagcgcagtcacatctttagctcgtttttctacaagtgtctgaccagaaaagaaaacaatttgacagaggacaatcccaatttatccatggcccagagacgccacaagcgggtccggacatggacacgccacatcaacattttcaacaaggactatatatttgttcccgtcaacgaatcaagtcactggtacttggcagtcatatgcttcccgtggctcgaagaggccgtgtatgaggattttccacagaccgtttcacagcagagtcaggctcagcagagccagaacgacaataagactatcgacaacgacttgcgcaccacatctaccctgagcttaagcgccgaggactcacagtccacggaatctaacatgtctgtccctaagaaaatgtgcaaaagaccatgcatactaatcctcgatagtttgaaggccgcttccgtgcagaacactgtgcagaacctgagagagtatctggaagttgagtgggaagtgaaattgaagacccatcggcagtttagtaagaccaacatggtcgatctgtgtcctaaggttcctaagcaagataacagctctgactgtggagtttatttgctccagtatgtggaaagtttctttaaggatccaattgtcaacttcgaactgccgatccatctcgaaaaatggtttcctcgtcacgtgatcaagaccaagcgagaagatataagggaactcatattgaagttgcatttacagcaacagaaaggatctagcagctag

SEQ ID NO: 242777 - DNA, 3153 bp, synthetic construct
  misc_feature 1..3153: note = Description of Artificial Sequence: Synthetic coding sequence
  source 1..3153: mol_type = other DNA
atggacaagcgaaagctcggacgcagacctagcagctctgagattatcacagagggcaaacggaaaaagagcagtagtgatctgtccgagattcgtaagatgttgaacgcaaagcccgaggatgtgcacgtgcagtcacctctgtccaaatttagaagttctgagcgctggactctgcctctccagtgggagaggtctctgagaaacaaagtgattagtttagatcataaaaataagaaacacatccggggttgccctgtgacgtctaaatctagccctgagagacagttgaaagtgatgcttaccaatgttctatggacagacctcggacggaagttccggaaaaccttaccacgcaatgatgctaacttgtgcgatgccaataaggtgcaaagcgactccctgcccagcacttctgtcgactccctcgagacttgtcagaaattggagcccctgaggcagagtctgaatcttagtgagcgcatccccagggtgatactaaccaacgtgttgggcacagaattaggcaggaagtatatcagaacccccccagttactgagggttctctttccgatacagacaacttgcaatcagagcaacttagcagctccagcgacggcagcctcgagagctatcagaatctgaaccctcataagagctgctacttatcagagcgagggtcacaaaggtctaagaccgtggatgacaatagtgccaagcaaacagcgcacaataaggagaaacggaggaaagacgatggaatttccctactgatttctgacacccaacccgaggacttgaattccggctcccggggatgtgatcatttggagcaggagtcacggaataaggatgtgaagtactctgattccaaggtggagctgacactgatcagtaggaaaaccaagcggaggctgaggaataatctgccggatagtcagtattgtactagtctcgataagtccaccgagcagacgaagaagcaggaagacgattctacaattagcaccgagttcgagaagccatcagagaactaccaccaagaccccaaactgcccgaagagataactactaaacccactaaatccgacttcacaaagctcagcagcttgaatagccaggagctgacactttccaacgccaccaagtctgctagcgcaggatctacgaccgaaacagtggagaacagtaacagcatagatatcgtcgggatttctagtctggttgagaaggacgagaacgaactcaacaccatcgaaaagccgatcttgagggggcataatgagggtaatcagagccttatcagtgcagagcctatagtggtgtcgtccgatgaggagggtcctgtagagcacaagtcttcggagattctgaaactgcagtccaagcaggaccgagagaccaccaacgagaacgagagcacctcagagagtgccctcctcgaacttccactgattacatgtgaaagcgttcagatgtctagcgaattgtgcccttacaaccccgtgatggagaacatttctagcatcatgccgagcaacgaaatggatctgcagcttgacttcattttcacttccgtttacatcggcaagatcaagggagcctctaaggggtgcgttaccatcaccaaaaagtatataaaaatcccctttcaggtgtctctcaatgagatcagcctcttggtggacacaacacatctgaagcgcttcggtctatggaaatctaaggacgataatcattccaagaggtcacacgctattctgtttttttgggtctcctccgactacctccaagagattcagacacaactcgagcattcagtactctctcagcagtccaagagttcagaatttattttcctggaattacacaacccagtatcacaacgggaagagttgaagctgaaagatatcatgacagagataagcatcatcagtggcgaacttgaactttcttaccctttaagttgggtgcaagcctttccgctgtttcaaaatttgtcatccaaggagagttcatttattcactactactgtgtatcaacatgcagctttcctgccggagtggccgttgccgaagaaatgaaactgaaatcggtttcccagccctcgaatactgatgctgcgaaacccacctacactttcctgcagaagcaaagctctgggtgctactcactttctattacctccaatcctgacgaagagtggagagaggtgcgccatactgggttggtccagaagcttattgtgtaccctcctccccctactaagggaggacttggcgtcactaacgaagatctcgaatgtctcgaggagggcgaatttcttaacgacgtgattattgatttttacctcaagtacttgatactggaaaaagcctctgacgaactggtggagaggagtcatatctttagtagctttttttacaaatgcttgacccgcaaggagaacaatcttacggaagataatccaaacctgtccatggcacagaggcggcataaaagggtgcgaacatggacgcggcatatcaacattttcaacaaggactatatatttgtcccagtgaacgaaagctcccattggtacttagcagtcatatgtttcccctggttggaagaagctgtctatgaagacttcccgcagactgtgagccagcaaagccaagcccagcaatcccagaacgataacaaaacaattgataacgacctgcggacaacaagtaccttaagtctcagtgcagaggattctcagtccactgagtctaacatgtcagtgccaaagaagatgtgcaagcgcccatgcatcctcatactcgactcgctgaaagctgctagtgtacagaacacagtgcagaacttgagggagtatctggaagtcgaatgggaggtcaagctgaaaacccaccgccaatttagtaagaccaatatggtggatttgtgcccaaaggttccgaagcaagacaactctagcgactgcggcgtctaccttcttcagtacgtcgagagcttttttaaagaccctatcgttaatttcgaactgccgattcaccttgagaagtggttccctcggcacgttatcaagacaaagcgggaggatatacgcgaactgatattaaaactgcacttgcagcagcagaagggaagttctagttag

SEQ ID NO: 242778 - DNA, 1770 bp, synthetic construct
  misc_feature 1..1770: note = Description of Artificial Sequence: Synthetic coding sequence
  source 1..1770: mol_type = other DNA
atgtaccgatggctggtgagaattctcgggactattttccgattctgtgacaggtccgtgccacctgcaagagctcttttgaagcgaaggcggagcgattcgactctcttctcaaccgttgacactgatgaaatcccagctaagaggcccaggctcgactgtttcatacatcaggtcaagaatagtctctacaacgccgcatcgctgtttgggtttccctttcagctgactaccaagccaatggttacttccgcctgtaacggcacccgaaatgtcgccccttcaggcgaggtgttctcaaactctagttcttgcgagctcactggctcagggtcttggaataacatgctaaaattgggcaacaaatcccccaatggaatcagtgactatccgaagattagagtgaccgtgacccgtgaccaacctcgccgagtcctcccatcttttgggttcactctcaattccgagggatgcaaccggaggcccggtggccgtcgacactccaagggcaaccctgagagctctctgatgtggaagcctcaggagcaagcggtgaccgaaatgatcagtgaagaaagcggtaagggactgcggagaccccattgtactgtggaggaaggggtgcagaaggaagagcgcgagaagtatcggaagctgcttgagaggctgaaggaatcaggccacggaaactccgtgtgcccagtaacctccaactaccacagctcccaaaggtctcaaatggacacgcttaagactaaagggtggggggaagagcaaaaccacggagtgaagacaactcagtttgttccaaagcagtatagactagtggagacacgaggaccactctgttccttgcgctcagaaaagcgctgcagcaaaggcaagattaccgacaccgaaaccatggtgggcataaggtttgaaaacgagtctcgcaggggataccaactggagccagatttatcagaggaggtctcagcgagactcaggctgggctcagggagcaacggcctgttaagaagaaaagtctcgattatcgagactaaagaaaagaattgttccggcaaggaacgcgacagacgcacagacgatctgttggaactgaccgaggacatggagaaagagatatccaatgcactaggacatggacctcaagacgagattcttagtagcgcttttaagctgaggatcacacggggagatatccagactctgaagaattaccactggctcaatgacgaggtgataaatttttacatgaatctactggtggaacggaataaaaagcaaggataccctgccctgcacgttttcagcacatttttctacccaaaactgaagagcggaggatatcaggcagtgaagaggtggactaagggcgtgaatctgtttgaacaggaaattatcctggtgcccatacaccgtaaagtgcactggtcactcgtcgtcatcgatctcagaaagaaatgtcttaaatacctggacagtatgggccaaaaaggacataggatatgcgagattttacttcagtatttgcaggacgagtccaagacgaaaaggaactcagatctgaacctcctggagtggacgcaccatagcatgaagccacatgaaatcccccagcagctgaatggctcagattgtggcatgtttacctgtaaatacgccgactatatctcacgggacaagcccattacttttacgcagcatcagatgcctttgtttaggaagaaaatggtgtgggaaatcctgcaccagcaactgttatag

SEQ ID NO: 242779 - DNA, 1242 bp, synthetic construct
  misc_feature 1..1242: note = Description of Artificial Sequence: Synthetic coding sequence
  source 1..1242: mol_type = other DNA
atgtggaagcctcaagaacaggcagtgacggaaatgatctccgaggagtccggtaagggcctgcggagaccacactgtaccgtcgaagaaggggtgcagaaggaagagcgggagaaatatcgcaagctcctggagcggctgaaggagtctgggcatggtaatagcgtgtgcccagtcacgagcaactaccactcttcccagcgcagccaaatggacacattgaaaacgaaggggtggggggaagaacagaaccacggggttaaaacaacccagttcgtgccgaaacagtaccggttggttgagacaaggggccctctgtgcagcctgaggtccgagaagaggtgctccaaggggaaaattacggataccgagacaatggtgggcattcgatttgagaacgagtctcgcagaggataccaactggaaccagatcttagcgaagaggttagcgctcggctccgtctgggctcggggagcaacggcctactgagacggaaggtgagcataatcgaaaccaaagagaagaattgcagcggaaaggaacgagaccggaggaccgacgacctgctcgagctgaccgaggacatggaaaaggagatcagcaacgctctggggcacggtccacaagatgaaatcctgtcctctgcttttaagctacgaattactagaggagacatccaaaccctaaaaaactatcactggctgaatgatgaggttatcaatttttacatgaatctcttagtcgagcgcaataagaaacaggggtacccagctttacacgttttctccacatttttttatcctaagttaaaatcaggcggttaccaggccgtaaagcgctggacaaagggagtcaacctttttgaacaggagatcattctggttccaatccatcggaaggtccattggagcctggtggtaatcgacctgaggaagaaatgccttaaatatctggattcaatggggcagaaggggcacagaatctgcgagatcttgctgcaataccttcaagacgagtccaagaccaagcgcaattcagacctaaacctgctggagtggactcaccactccatgaaacctcacgagatccctcaacagctgaacggtagtgactgtggcatgttcacctgcaagtacgcagactatatttctagagataagcctattactttcacccagcaccaaatgccactgttccgcaagaagatggtgtgggagattctacaccagcaactgctgtag

SEQ ID NO: 242780 - DNA, 1383 bp, synthetic construct
  misc_feature 1..1383: note = Description of Artificial Sequence: Synthetic coding sequence
  source 1..1383: mol_type = other DNA
atgtatagatggctcgtcagaattttaggcacaatcttcagattctgcgacagatccgttcctccggcacgcgctctccttaaaagaagaagatctgacagcactctcttttcaaccgtagataccgacgaaatccccgcaaaaagaccaaggctggactgttttattcaccaggtgaagaatagcctatacaacgcggcatcactcttcggattcccctttcaactcacaactaaacctatggtcacatctgcatgcaatgggacaagaaatgtggcaccttctggtgaggtgaacggtaatagtgtgtgccctgtcacatcgaactatcacagctctcaaagaagtcagatggatacactgaaaacaaaggggtggggagaggaacagaatcacggggttaagacaacccaattcgtacccaagcagtatagattagtagaaacccggggacctctgtgcagcctgaggtcagaaaagagatgttccaagggaaagataaccgataccgaaaccatggtcggcattcgctttgagaatgagagtcggagagggtatcagctggagccagatcttagcgaggaggtatccgcgagactccgcctcggttcaggctcgaacggcttattgcgaagaaaggtatcaattattgaaaccaaggaaaaaaattgctctggtaaggagagagacagacgcaccgatgacctactggaacttactgaggatatggaaaaagagatttctaatgccctgggacacgggcctcaggacgagatattgagctcagccttcaagttgcggataactcgtggagatatccagacgcttaagaactatcactggcttaatgatgaggtaattaatttttacatgaatctgctggtcgagaggaataaaaaacaagggtatccagcattgcacgttttttcaacctttttctatcctaagcttaagtcaggaggctaccaggccgtaaagcgatggacaaagggggtgaacttgttcgagcaggaaatcatcctggtacctatccacaggaaggttcactggtctcttgttgtgattgatttgcgtaagaaatgcctaaagtatcttgattcgatgggacagaagggtcataggatatgtgaaatcctcctccagtacctacaggatgaatccaaaactaaaaggaactccgatttaaacctcctcgaatggacgcaccactctatgaagcctcacgaaatcccccaacagctgaacggctccgattgtggtatgtttacctgtaagtacgccgattacatcagccgtgacaagccaataacatttactcagcatcagatgcccctatttagaaagaagatggtctgggagattttgcaccaacagctgctttag

SEQ ID NO: 242781 - DNA, 1740 bp, synthetic construct
  misc_feature 1..1740: note = Description of Artificial Sequence: Synthetic coding sequence
  source 1..1740: mol_type = other DNA
atggactctcatccttgtctctactgtggtcctcaggactccgagggaacaaactggcagacctccccctcgaccctgtttagcactgtggatacagacgaaattcctgctaagaggcctagactagattgcttcatccaccaagttaagaattccctctataacgctgccagcctttttggtttccctttccagttgaccaccaaacccatggtcaccagtgcctgcaacggtactagaaatgtcgcaccatcaggagaggtgttttcaaactcctcctcatgcgagttgactggatctgggtcctggaacaacatgcttaagttgggaaacaaatctcctaatggcatatctgactaccccaagattcgggtgactgtgacccgggaccagcctaggagagtgctcccgtctttcggtttcaccctaaattcggaaggttgcaacagacgcccagggggtcgaaggcattccaaaggaaatcctgaaagctctctcatgtggaagccccaggagcaggctgttactgagatgatatcggaggaatctggaaaggggctgaggcgacctcattgtacagtggaagagggagtgcagaaggaagaacgcgaaaaatacaggaagctcctggaaagacttaaagagtcaggccatggaaattcggtgtgccccgtgacgtccaactaccactcctcccagcggagtcaaatggataccctgaagactaaagggtggggtgaggaacagaatcatggggtgaagactactcaatttgtgcccaaacagtaccgcctggtcgaaacccggggtcctttatgctcccttcgctccgaaaagaggtgcagcaagggcaaaatcaccgatacagagaccatggttggtattaggtttgaaaacgagtctcgccgtgggtatcagttggaacccgacctgagcgaggaggtatccgcccgtctcagactgggcagtggctccaatgggctccttcggcgtaaggtgtctatcatcgaaactaaagagaagaattgctcaggcaaagagagagatcgcaggaccgatgatctgttagaactgactgaggacatggagaaagagatttcaaacgcattaggtcacgggcctcaggacgagattttatccagcgctttcaagcttcgcattacacggggtgacatccagaccctgaaaaactaccattggctcaatgatgaggtgatcaacttctatatgaatctgctggtagagcggaacaagaaacagggctacccagcactgcatgtgttttccacctttttttatcctaaactgaaatcgggcggttatcaggcagtgaagcgttggaccaaaggagttaacctgttcgagcaggaaatcattcttgtgcccatccacagaaaggtgcactggagtcttgtggtcatcgacttacgcaagaagtgtctgaaatacctcgatagtatgggccagaaggggcaccgaatctgcgaaatcttgcttcagtacttacaggatgaatcaaaaaccaaacgcaattcagatcttaacctgctggagtggacacaccacagcatgaagccacatgagatcccccaacaactaaatggctcagactgcgggatgttcacctgtaagtatgcagactacatctctagagacaagccaattacctttactcagcatcagatgcctctgttccggaagaagatggtgtgggagatcctgcatcagcaactgttgtag

SEQ ID NO: 242782 - DNA, 1722 bp, synthetic construct
  misc_feature 1..1722: note = Description of Artificial Sequence: Synthetic coding sequence
  source 1..1722: mol_type = other DNA
atgaaggaaaccattcagggcacgggtagctgggggcctgaaccacccggaccaggaatccctcctgcttactctagccccaggcgggaacgccttaggtggccacccccacctaagcccaggctaaagtccggcggaggatttggtccagaccccggtagcgggacgactgtgcccgcacggagattacctgttccccgtccatcttttgatgcatctgccagcgaggaggaggaggaagaagaagaggaagaagatgaagatgaggaagaggaggtcgctgcctggcggttgccccctaggtggtcccagcttggaacctctcagcgaccacggccaagcaggcccacccaccgaaaaacttgcagccagcgccgacggagagcgatgcgcgctttccggatgctgctgtacagtaagtcaacatctctgacctttcattggaagctttggggaaggcacagggggaggagaagaggcttggcccaccccaaaaaccatctctcaccacaacagggcggagcaactccacaagtgccttctccctgctgtagattcgacagtcccaggggcccacccccaccaagattggggctgctaggtgccttgatggccgaagatggagtgagggggtctccacctgttcccagcggccctcctatggaggaagatggcctgcgatggacaccaaaaagccctctcgatcccgacagcggcctattgtcctgtacactgccaaacggatttggtggacagtcagggcctgaaggagaacggtcccttgccccaccggacgctagcatactaattagcaacgtgtgctcaatcggcgaccatgtggctcaggagctgttccaaggtagtgatttaggtatggctgaggaggcagagaggcccggagagaaagccggacaacatagccctctccgggaagagcatgtgacgtgtgtgcaatccatcctggacgagttccttcaaacttacggaagcctgatacccctgagtacagatgaggtggtggaaaagctcgaggatatctttcagcaagaatttagtacgccatcaagaaaaggactcgtgcttcagctcatccaatcttaccaaaggatgcctggaaacgcaatggtccgcggatttagagtcgcgtacaaacggcacgtgcttaccatggatgacctggggaccctgtacggacagaactggcttaacgaccaagtgatgaacatgtacggagatttggtgatggataccgtgccggagaaggtgcatttttttaattcattcttttacgacaaactgcgcacaggctatgacggcgttaagaggtggactaagaatgttgacatctttaacaaggagctgctccttattcctattcatctcgaggtgcattggagtcttatcagcgtcgatgttcgcagaaggacaatcacgtacttcgacagccagagaacgctgaaccgccgttgccccaaacacatagccaagtatctccaagctgaagcggtgaagaaagatcggctggattttcatcaaggttggaaaggctactttaaaatgaacgtggctagacagaacaatgacagcgactgcggcgcatttgttttacagtattgcaaacaccttgctctgtctcagccatttagctttacgcagcaggatatgccaaaacttagaagacagatctataaggagctctgccattgtaagctgaccgtgtag

SEQ ID NO: 242783 - DNA, 1725 bp, synthetic construct
  misc_feature 1..1725: note = Description of Artificial Sequence: Synthetic coding sequence
  source 1..1725: mol_type = other DNA
atgaaggaaacgattcagggcaccggttcctgggggccagaaccacctgggccagggattccaccggcttactccagcccccgtagggagaggctccgatggccccctccacctaaacccagactgaagtccggcggaggatttggcccagatccaggatccggcacgaccgttcccgctaggaggttacctgtgcccaggccaagctttgatgccagcgcctcagaagaggaggaagaagaagaagaggaggaggacgaagatgaggaggaggaggtggccgcatggaggttgccacctaggtggtctcaactcggcaccagccagaggcctaggccttcaagaccaactcataggaagacatgttcacagagacggcgacgggctatgagggctttccgcatgctgctgtacagtaaaagcacctccctgacatttcattggaaattgtggggtcgtcacagggggcgacgaagagggttggctcatcctaagaaccatttgtcccctcagcaagggggtgcaactccccaagtaccatcaccctgctgccggttcgattctcctcgtggacccccacctccacgcttagggctacttggagccctcatggccgaggacggagtaaggggcagccctccagtgcccagcggtccgcctatggaagaggacggtttgaggtggacacccaagtcgcccctcgatccagacagtggccttctctcttgcaccctacccaacggatttggtggccagtcaggacctgagggcgaaagaagcctggctcctcctgacgcctctattctcatatcaaatgtttgcagcattggcgatcacgtcgctcaggagctgtttcaggggtccgatctaggcatggccgaggaagcagagcggcctggggagaaggctggccagcattctcccttgcgtgaagaacacgtgacatgcgttcagagtatcctggatgagttcctgcagacctatggtagtctcattccgctgagtactgatgaagttgtagaaaagctagaggacatcttccagcaagagttcagtacgccttcgaggaaaggtctggtcctgcaactgattcagagttaccagagaatgcccggtaatgccatggtccgaggtttccgcgttgcctataaacggcacgtcctcaccatggatgacctcgggaccctgtacggtcagaattggctgaatgatcaagtgatgaatatgtatggagatctcgtgatggacacggtgcccgagaaggtacattttttcaacagctttttctatgacaagctccgtacaaaagggtatgacggagtcaagagatggacaaaaaatgtggacatctttaataaagaacttctgctaataccaattcatctagaggtgcactggtctctaatctctgtggatgtcagacgacggaccattacttatttcgactcccagcgaacgcttaatcgtcggtgtcccaagcatattgccaaatacctacaggccgaagccgtgaagaaagaccggctggatttccatcaaggatggaagggctattttaaaatgaacgtggctaggcagaacaacgattctgactgtggggctttcgtcttgcagtactgcaaacatctcgcgctttctcagcccttcagctttacacagcaggatatgcctaagctccgcaggcagatttataaggagctgtgtcattgtaaactcaccgtgtag

SEQ ID NO: 242784 - DNA, 3741 bp, synthetic construct
  misc_feature 1..3741: note = Description of Artificial Sequence: Synthetic coding sequence
  source 1..3741: mol_type = other DNA
atgatggaaaccgaaagattggtcctgcccccaccagacccactggacttacccctgagagccgtagagttaggatgtaccggacattgggagctgctaaacctaccaggcgctcccgaatcaagtctcccacacggcttacctccttgcgcaccggacctgcagcaagaggccgagcagttattcctcagttccccggcatggctgcctctgcacggcgtagaacacagcgctcgaaagtggcaaagaaaaacggacccctggtcgctgctagccgttctgggcgcacccgtccctagtgacctgcaagcacagcgccacccaacaaccggccagattctggggtataaggaagtgctactcgaaaataccaacctgtccgccacgacttcgttgtctctgagacggcctcctggtcccgctagtcaaagcttgtgggggaaccccacgcagtatcctttttggccaggcggtatggacgagcctacaattacagacctcaataccagagaggaagctgaggaagagatagattttgaaaaagatttgctgaccatccctccgggattcaaaaaaggtatggattttgcacccaaagattgccctacacccgcacccggacttttgagcctgtcatgtatgctcgagccactcgacctgggaggaggggatgaagacgagaacgaggcagtgggacagcccggtggacccagaggggacactgtgtcggcatccccatgttcagcccctctcgcacgagcttcctcactcgaagatctggttctgaaggaggccagcaccgcggtttcaacccctgaagccccagagcccccttcacaagagcagtgggccataccagtggacgccacaagtcctgtgggtgatttctatcgactcattccacagccagcgttccagtgggcgttcgagcccgatgtgttccaaaaacaggccatcctccatctcgaacgccatgactccgtatttgtggctgcccatacctctgcgggtaagaccgttgtcgcagagtatgccattgctctcgcccagaagcatatgacccggactatctatacttctcctatcaaggccttgtcaaatcagaaatttcgggacttcaggaatacattcggcgatgtgggtctgctgacaggcgatgtgcagctgcatcctgaagcctcctgccttatcatgacaacagaaatccttaggagtatgctttattccggtagcgacgtgattcgtgacctggagtgggtcattttcgatgaggtacactacataaacgacgtggagaggggcgtggtgtgggaagaggtgttaatcatgctgccagatcatgtcagtattatactcttgtctgccaccgtgccaaacgcattggaattcgccgactggatcggtcggttaaagagacgccagatttatgtgatttctactgtgaccagacccgtgcccctcgagcattatttgtttacggggaacagctctaaaacacaaggcgagctgttcctcctgctcgatagccgaggagcttttcataccaagggatactacgccgctgtggaggccaagaaggaacgaatgtcaaagcatgcgcagactttcggagccaaacaacctactcaccaggggggacctgcacaggatcgcggagtgtatttgagcctactggctagtctgcgaacacgcgctcaattacctgtggtggtgttcaccttctcccggggtcggtgcgatgagcaggcttctgggctaacatcactcgatctcaccacaagtagcgaaaaatccgagatacacttgttcctccagcgatgcctggcacggctaagggggtcagatcgccagttgccacaggtgttgcacatgagcgagctgctcaatcgtggcctcggggttcatcactctgggatcctgccgatactgaaggagatagtcgaaatgctgttttctaggggcctggtaaaagtgttgtttgcaacggagacatttgccatgggagtgaacatgcctgcaagaactgtggtctttgactcaatgcgcaaacacgatggtagcacttttcgagacctcctccctggtgagtacgtgcagatggcgggtagggccggtcggaggggcctggatccaactggaacagtgattctcctctgcaagggacgcgttcctgagatggcagacctacatcgcatgatgatgggaaagccatcccagctgcagagccagttccgcctgacatataccatgatcttaaatttacttagggtagacgcccttcgtgttgaggatatgatgaaacgatcatttagtgagtttccatctaggaaagacagtaaagctcatgagcaagctttggcagaactcaccaagcgcctcggggcactagaagagccggatatgacagggcagttggtggatcttcccgagtactattcctggggcgaagaactcactgaaactcagcacatgattcaaagaaggattatggagagcgttaacggactcaagagtttgtccgcgggacgggttgtggttgtgaaaaaccaggagcaccataatgcgctgggagtgatcttgcaggtcagttctaactctactagcagagttttcacgaccttagtactgtgcgataagcctctcagtcaggacccccaggataggggcccagcgactgcggaggttccatatccagatgatctggtgggcttcaagctcttcctgcccgagggcccatgtgatcacactgtggtcaaactacaacctggcgacatggcagccatcacgacaaaggtgctgcgagtgaacggggagaagatactggaagacttttcgaaacgacagcaaccaaagttcaagaaagatccccctctggccgcagtgaccaccgccgtccaggagctgctgcgacttgcccaggctcatcctgctggcccacctacgctggatccggtcaacgacttgcagctgaaagacatgtctgtagtggagggaggtttacgggcaagaaaactcgaggagctcattcagggagctcaatgcgtgcactctcctcggttcccagcacagtacctgaagttgagggagaggatgcagattcagaaggagatggaaagactgcgtttcctcctgagtgaccaaagtctgctactgctgcccgagtaccatcaaagagtggaggtgcttcgtacattgggatatgtggatgaggcgggtaccgtgaaactggcaggacgtgtcgcttgcgccatgtcttctcacgagctgctattgactgaactcatgttcgataacgcgctgagcaccttgcgcccagaggaaatagcggctttattatcggggcttgtgtgccagagcccaggcgacgcaggagatcagttgcccaatacccttaagcagggaatcgagagagtccgtgcagtggccaagagaattggcgaggtgcaggtggcttgtgggctgaaccagactgttgaagagttcgtaggagagctgaacttcgggctcgtggaggtcgtttacgagtgggccaggggcatgcctttctcagagctggcgggtctatctggaactcctgaggggctcgttgtgcgctgcattcagagactggccgaaatgtgtagatctctgaggggtgcggctaggctcgtgggcgagccagttctcggagcgaaaatggaaacagctgccacactgttaaggagagatatagtgtttgccgcttccctttacacccagtag

SEQ ID NO: 242785 - DNA, 3741 bp, synthetic construct
  misc_feature 1..3741: note = Description of Artificial Sequence: Synthetic coding sequence
  source 1..3741: mol_type = other DNA
atgatggagaccgagagactcgtgctacccccaccagatccgttagatttgccacttagggccgtggaattgggatgtacgggacattgggagcttctaaatttgccaggggctcctgaatctagtcttccgcatgggctaccgccatgcgccccagatctccagcaagaggcagagcagctgtttctcagcagtcccgcatggcttccactccatggagtcgagcattccgctcgcaaatggcaacgtaaaactgacccctggagccttctggcagtgttgggcgctcctgtgccatcagatctccaggctcagcgccatccaacaacgggacagatcctgggttacaaagaggtactgcttgagaataccaacctgagtgccacaacctctctgagtctcagacgcccaccgggaccagctagccagagcctctgggggaatcctacacagtacccattctggcctgggggaatggatgagccgacaattacagatctaaacacgagggaggaggccgaggaggaaattgattttgagaaggatttgctgaccatccctccgggattcaaaaaaggcatggacttcgctccgaaagattgtcccactcctgccccagggcttctgagtctgagctgcctactggagccccttgaccttgggggaggagatgaagatgagaacgaagccgttggccagcctggcggaccccgaggagacaccgtctctgcatcaccctgttccgctccactcgcgagagcctcgtcacttgaggatcttgtgcttaaggaagctagcacggcggtgtcaacacccgaagcccctgaacctccctctcaggagcaatgggctatccctgtggacgcaacaagcccagtcggcgatttttaccgtttaatcccacaaccggctttccagtgggccttcgagccggatgttttccagaaacaggcaatcctgcacctagagcgacatgactccgtgtttgtggccgctcacaccagtgcaggtaagactgttgtcgctgaatacgcaattgcacttgcccagaaacacatgacccggactatttatacatctcccattaaggcactctccaaccagaagtttagggacttccgaaataccttcggggatgtgggcctgttgacgggggacgtgcagctgcaccctgaggcctcatgccttattatgactactgagattcttagatcaatgctttacagcgggtcagatgtcattcgcgacttggaatgggtgatatttgatgaagtgcactatatcaacgacgttgagaggggtgttgtatgggaggaagtcttaattatgctcccagatcacgttagtatcatcttgctttccgccacagttccgaatgccctggagttcgcagattggatagggagattgaagcgtcgccagatctatgtaatttcaaccgtaacgaggccagtgccattggaacactacctgttcacaggcaattcatcgaagacacagggcgaactgtttcttctcctcgactctcgcggagctttccacaccaagggctactatgcagcagttgaagcaaaaaaggagcgcatgtccaaacacgcacagacttttggcgcaaagcagccaacacatcagggcggaccagcgcaggatcggggagtgtacctgtccctgctagcatcattgcgtacaagggcgcagctgcctgttgtggtcttcacattcagccggggacgctgcgatgagcaggccagtggactcacgagcctggacctgacaacctcctccgagaagtccgagatacacctctttctgcagcgctgtttagccagactcaggggaagcgaccggcagctcccacaagttttacacatgagcgaacttttgaacagaggactgggggttcaccattcgggcattcttccaatcctgaaagagatcgtcgagatgctgttcagtcgcggactcgtcaaagtcctcttcgcaacggagacattcgccatgggggtcaacatgccagcaagaaccgttgtatttgactccatgaggaagcatgatggcagtaccttcagagatctgctgccaggtgaatacgttcagatggccggtcgtgctggtcgcagaggcctagacccgacgggcacggttatccttctgtgcaaagggagggtccccgagatggccgatctacaccgcatgatgatggggaaacccagccagcttcagtcacaattccggctcacatacactatgattctgaatctgctcagagtagatgctcttcgtgtggaggacatgatgaaacgcagctttagcgagttcccatctagaaaagactctaaagctcacgagcaggccctggccgagttgactaagaggctgggcgctttggaggagccggacatgacggggcagcttgttgacctcccagaatactactcttggggggaggaactcacggagacccagcatatgattcagaggcgcatcatggaaagtgtgaatggattaaagtcactcagcgcaggaagagttgtagtcgtcaaaaaccaggagcatcacaatgcgctgggggtgattttgcaagtgtcttctaacagcacgtcaagggttttcactacgctagtgctgtgcgacaagccacttagccaggacccccaggaccggggaccagccactgccgaggtaccctaccccgacgacctggtgggattcaagttgttcctgcctgaaggcccatgtgaccatactgtggtcaaactccagcccggtgatatggctgccattaccaccaaggtgctccgtgtgaacggcgagaagattttggaggactttagcaaaagacagcaaccaaaattcaagaaagaccctccgctggccgctgtcaccacggccgtgcaggagctgttgcgactcgcccaggcacacccggctggccctccgactctggatccggtaaatgatcttcagcttaaggatatgtcggtcgttgagggaggtctccgggctcggaagctcgaagagctcatacaaggcgctcagtgtgtccactctcccaggttcccagcccagtacctgaagttgcgggagcggatgcaaatacagaaagaaatggaaagactgaggttcctcctgagcgaccagtccctgttattactacctgagtatcaccaaagggtggaggtcttaaggaccctgggatatgtcgatgaagcaggaaccgtgaagttggcagggcgagttgcatgtgctatgtctagccatgagctgctattgaccgagctgatgtttgacaatgccctgagcacgctgcggccagaagagatcgcagcccttttgtctggacttgtgtgtcaatcaccaggcgacgccggagatcagcttcccaacactttgaaacagggcatcgagcgagtgcgcgctgtggccaaacggatcggtgaggtacaggtcgcgtgtggacttaatcagaccgtagaagagttcgtgggcgagctgaacttcggcctggttgaggtagtttacgaatgggccagagggatgccatttagcgaattggccggtctaagcggcactcccgaaggcctcgtcgttaggtgtatacagagacttgcagaaatgtgcagaagtctgagaggcgctgcaagattagtaggggaacctgttctaggtgcgaagatggagaccgcagcgacactgttgagacgggacatcgtatttgcggcttcactgtacacccagtag

SEQ ID NO: 242786 - DNA, 3741 bp, synthetic construct
  misc_feature 1..3741: note = Description of Artificial Sequence: Synthetic coding sequence
  source 1..3741: mol_type = other DNA
atgatggaaaccgagcgcctcgtcctgccgcctccagatcctctggatttgcctcttagggcagtggagctgggttgtacaggacattgggagctgctgaatctgcccggtgccccagaatcctccctgccacacggactgccaccctgtgcccctgatctacagcaagaagccgaacaattgttcctatcaagtcccgcatggttaccacttcacggtgtcgaacattcagcacgaaaatggcagcgcaaaacagacccgtggtcactattagctgtgcttggagcacccgtgccgtctgacttgcaggcccagagacatccaactaccgggcagatcttaggatacaaggaagtgttgcttgaaaatacaaatctttcagcaacgaccagcctgtcactaagacgccctccgggtcccgcatcacaatctttatggggtaatcctacccaatatccattctggcccggaggcatggatgagcctaccattaccgacctgaatacccgcgaggaggctgaagaggaaattgatttcgaaaaggacctcctgacgataccaccaggtttcaagaagggaatggatttcgctccaaaggattgtcctactccagcgcctggcttgttatcactgtcttgtcttctcgagccattagacctcgggggaggtgacgaggatgagaatgaggccgtcggacaacccggagggcctaggggggatacagtgagcgcatccccttgtagtgcaccgcttgcaagagcatcaagcttggaagatttagtcctgaaggaagcttcgactgcagtctctacccccgaagcacccgagcccccttctcaggagcagtgggccatcccggtggacgcaacatcccccgtcggtgacttctatcgcctgatcccacagccggcattccagtgggcatttgagccggacgtttttcaaaagcaggctatcctgcatcttgagcgacacgactctgtgttcgtggccgcacacacttctgccggaaagactgtagtggcggagtatgccatcgcgcttgcccaaaagcatatgacgaggaccatttatacctcccctattaaagcactctccaatcagaagtttagagacttccgtaataccttcggagacgttggattactgacgggagacgtccagcttcaccctgaggcaagctgcctcattatgactacagaaattctcaggagtatgctttatagtgggagtgacgtgatccgtgatttggagtgggtcatctttgacgaggtgcactatattaacgacgtggagaggggcgtggtctgggaggaagtgctgatcatgctgcccgatcatgtctctatcatcctgctaagcgccacagtccctaacgccctcgagttcgccgattggattggacggctgaagcggagacagatctacgtgataagtactgtaacaagacccgtgcccttagagcactacctctttacaggaaattcatcaaagacacaaggagaactcttcctcctgctggacagtcggggagccttccataccaaggggtattacgcagctgttgaggctaagaaggaacgcatgtcaaagcatgctcagaccttcggggcaaagcagcccacgcaccagggaggtccagcacaggatagaggtgtgtatctgagcctattagcgagtctcaggacgcgggctcaactgccagtggtggtgtttaccttttctcggggtcgatgcgatgaacaagcaagcggcttaacatccctggacctgactacaagcagcgaaaagtctgaaattcatctgttcctgcagagatgtctcgccaggctgagggggtctgacaggcagctacctcaggttctccacatgagtgagcttctaaatcgtggcctgggagtgcatcatagcggcatcctgccaatccttaaggagatcgtggaaatgctgttctcaagggggcttgtgaaggttctgtttgccactgaaacgttcgccatgggtgtcaacatgcccgctcggaccgtggtgtttgattctatgcggaagcacgacgggtctaccttcagagacctgctgccaggtgagtatgtacagatggccggtagggctggaagaagaggtcttgaccctacagggactgtaatccttctctgcaagggcagagtgcccgagatggcggacctgcaccggatgatgatggggaaaccttcccagctccagagtcagttccgattaacttacactatgattctgaacctattgcgtgtcgacgctttgagggtcgaagacatgatgaaacgcagtttcagtgaatttcccagtcggaaggacagcaaggctcatgagcaggccctcgctgaactgactaagaggctgggcgcactcgaggagccagacatgacggggcagttagtggatcttcccgaatattattcatggggtgaagagttgaccgagacacagcacatgatccaaaggaggattatggagagtgtgaatggcctgaaatctctatctgcgggaagagtggtggtggttaagaaccaggaacatcataacgctttaggagtgattttacaggtctcctctaactctacttcgcgcgtttttacaaccctagttctgtgtgataaacccctgagtcaggacccacaagaccgcggaccagccacagcggaagtgccataccccgacgacctcgtgggatttaagttgttccttcctgagggcccatgcgatcacaccgtggtgaagttgcagcctggcgatatggccgctattacaactaaggtgctgcgtgttaacggcgagaagattctggaggactttagcaagaggcagcagcctaagtttaagaaggacccgcctctggctgccgtgacgacggccgtccaggaactgctgaggttagctcaggcccaccccgcaggccctcctacgttagatccggtgaacgatctgcagctgaaagatatgagcgtagttgaagggggtctccgcgcaaggaagctcgaggaacttatccagggcgctcaatgcgtacatagtccacgatttcccgctcagtacctgaagttgcgggagcggatgcaaattcaaaaggagatggaacggctccggtttctcctatcggatcaatctcttttgttgctccccgagtaccatcagcgtgtggaggtcctaagaacattagggtatgttgacgaggccggaaccgtgaagttggccggtcgggttgcctgcgccatgagttctcacgaactgctgttaaccgagctgatgtttgacaacgcccttagcaccctcaggccagaggagattgctgcgctgctctcagggctcgtgtgccagagccctggcgacgccggagaccagcttcccaacacactcaagcaagggatcgaacgagtacgcgctgtggccaagcggatcggggaggttcaggtggcttgtggactgaaccagactgtggaggaattcgttggggagcttaattttggcctggtggaagtggtgtacgaatgggcgagggggatgcctttcagtgagctggcaggcttatctgggactcccgagggactggttgtgaggtgtattcagagactcgccgagatgtgccgctccctaagaggcgctgcccgactcgtgggtgaacccgtcctcggcgcaaagatggaaaccgcagcaactctgcttagaagggacatcgtgtttgctgcctcattatatacccagtag

SEQ ID NO: 242787 - DNA, 3741 bp, synthetic construct
  misc_feature 1..3741: note = Description of Artificial Sequence: Synthetic coding sequence
  source 1..3741: mol_type = other DNA
atgatggaaacggagcggttagttcttccacctccagaccccctggatctgccgctgcgagccgtggagttaggatgcacgggtcactgggaactgctgaatttacctggcgcacccgagtcatcgctgccacacgggttgcctccatgcgcccctgacctccagcaggaagctgagcaactgtttctgagctcaccggcttggctgccactacacggcgttgagcactctgctagaaaatggcagcgcaagacggatccttggagtctactggccgttctgggggcacccgtcccctcggacctgcaagctcaacgccatcctacaacaggtcagatcttaggctataaggaggtgttgttggaaaacactaacctttccgctacaacatcactgagcttgcggcgaccccctggcccagcttctcagtccctgtggggcaatcctacacaatatccgttttggccaggcggaatggacgagcctactatcaccgatctgaacaccagagaagaagccgaggaagaaatcgatttcgagaaggacctgctcactataccaccaggcttcaagaaaggcatggactttgcaccaaaagactgtccaacaccagctccaggactgttgtctctaagctgtttgctggagccactggatttgggcggtggtgatgaggacgaaaacgaggctgtgggccaacccggtggacctcggggagacaccgtctcagcgtccccctgctctgcacctctggcaagggccagttcacttgaagatctggtcttaaaggaagctagtaccgccgtgtcaaccccagaagctcccgagcccccttcacaggagcaatgggccatacccgttgatgccacctcgcccgtgggagacttctacaggcttatcccacagcccgctttccagtgggcgttcgaaccggatgtgttccagaaacaggccattctgcaccttgagaggcacgattctgtcttcgttgctgcccacaccagcgccggaaaaaccgtggtggccgaatacgctattgctctggcccagaagcacatgactcgcaccatttatactagcccgatcaaggctttgagcaatcaaaagttcagagatttcagaaatacttttggcgacgtgggactactgacaggagacgtccagttgcatccagaggcctcctgcctcataatgaccaccgagattctacgatcaatgttgtattccggctccgacgtgattcgtgaccttgagtgggtgatttttgacgaagtccactatattaacgacgtcgagcggggtgttgtatgggaggaggttctaatcatgcttcctgaccacgtgtccatcatactgcttagtgcaacagtgcccaatgcacttgaatttgcggattggattggtagactgaagcggcgacagatttatgtgatttccaccgtcacccggcctgtccctctagaacattacttattcacagggaatagctcaaagacccagggagagctatttttactgctggattccagaggggcttttcatactaagggatattacgctgcagtggaggccaagaaggagagaatgtcaaagcatgctcagacttttggagctaagcaaccgacccatcagggcggacccgctcaggaccgcggtgtgtacctgagtcttttagcctctctgaggaccagagctcagctacctgtggtggtctttaccttctcccggggtagatgtgatgaacaggcatcgggcctgacgtctctcgatctgacgacttcttccgaaaagagcgagatacacttgttcctgcagcgctgtctggccaggctacggggaagtgacagacaacttccacaggttcttcacatgagcgaattgctcaaccggggtctgggcgtacatcacagtggcattctgcccattctaaaggagatcgtcgagatgttgttcagccggggattggtcaaggtcctgttcgccactgaaacattcgcaatgggtgtaaacatgcctgcacgtaccgtggtatttgactccatgaggaaacacgacgggagtactttcagggatctgctgccgggagagtacgtgcaaatggctggcagagctgggcgaagaggcttggacccaaccggcactgttatcctcctgtgtaagggaagggtacccgagatggccgatttacacagaatgatgatgggcaagcccagccagttgcagagtcagttccgtctcacctatactatgatcctgaatctcttgagggtcgacgcacttcgggtggaggatatgatgaaacgtagtttcagcgagtttccatcaaggaaggatagtaaggcacatgaacaggcgttggctgagctgaccaagcggctcggtgccctcgaggagcctgacatgacgggccagctggtcgaccttccggaatactactcatggggggaagagctgaccgagacacagcacatgatacagaggaggataatggagtctgtgaacggtctgaagtcactttctgcgggtagggttgtcgtcgtgaaaaatcaggagcatcacaatgctttaggcgtcatcttacaggtttcttccaacagtactagccgcgtattcacgacactggtgctgtgcgataagccactgtcccaagatccccaggaccgcggacccgctactgcagaggtcccgtacccagatgatctggtggggttcaagttgttcctcccggagggcccttgcgatcacaccgtcgtcaagttgcagccaggcgacatggcggcaattaccacaaaagtcttgcgggtcaacggcgaaaaaatactggaagacttttcaaagcggcagcaacccaagtttaaaaaggatccgccactggccgcagtgacaaccgccgtccaggagttgctgcggctggcccaggcccacccggcaggaccccctactctggatcccgttaatgatcttcagctgaaggacatgagtgtcgtggaaggcggactgcgagccaggaaattggaagagctgattcagggggctcaatgcgtgcacagccccaggtttccagcccagtacctcaaactgagggagaggatgcagatccagaaagaaatggagcgcttgcgattcctgctgtctgaccagtcattactgctgcttcccgaataccaccagcgggtagaggtgctcaggactctgggatacgtagatgaggcaggaactgtaaagctggccggtagagttgcctgtgccatgtccagccacgagctgctcctgactgagttaatgtttgacaatgccctgtctaccctccgaccagaagagattgccgctcttctgagcggactcgtgtgtcagagcccgggagatgcgggagaccaactgcctaatacgctgaaacaaggcatcgagcgcgtacgggcagtcgctaaaagaatcggagaagtacaggtcgcctgtggtctcaaccagaccgtggaagaattcgtcggggagctcaacttcggcctggtggaggttgtgtatgagtgggccaggggcatgcccttttccgaacttgcagggctaagtggtacccctgagggcctagtggttcgctgcatacagcggctggctgagatgtgcaggagcctccgcggagctgctcggctggtaggggaacctgtgttgggcgcaaagatggagactgctgccactctgcttcgacgggacatcgtcttcgcggctagtttgtacactcaatag

SEQ ID NO: 242788 - DNA, 3741 bp, synthetic construct
  misc_feature 1..3741: note = Description of Artificial Sequence: Synthetic coding sequence
  source 1..3741: mol_type = other DNA
atgatggaaactgaaagactggtgctgccaccacctgacccattggacctcccacttcgcgctgtggagctgggttgtacagggcactgggaactcctgaatctgcctggcgctccagaatcatcattgcctcacggcctacccccttgcgccccagatctccagcaggaagctgagcagctgtttcttagctcaccagcctggctgccccttcacggagtggaacacagtgctaggaagtggcagcggaagaccgacccatggagcctccttgccgtgttaggagccccagtgcctagcgacctgcaggctcagcgccacccgaccacagggcagatcttgggctataaggaagtcctgcttgaaaataccaacctatccgcaaccacctccctctccctccggagacctccgggacctgcctctcagtcactttgggggaatccaacccagtaccccttctggccaggtggcatggatgagccaactattacagatctgaacacaagagaagaagcagaggaggaaattgactttgaaaaagacctgcttacgattcccccagggttcaagaaaggtatggatttcgcgccaaaggattgccccacgcccgcaccaggattgctgtccttgtcttgccttcttgagccactggacctcggcggaggcgacgaggatgaaaacgaagccgtcgggcagccagggggtcctcgcggtgataccgtttcagctagtccatgctctgccccacttgccagggcctcttccctggaggacctggtactgaaggaagcatccacagccgtctctacaccagaagcgccagagcctccctcacaggaacagtgggcaatccccgtcgacgccaccagccccgtgggcgatttttatagattgatcccgcagccagcttttcaatgggccttcgagcccgatgtatttcagaagcaggccattctccatcttgagcgccacgactccgtttttgtagcagctcatacatccgcaggcaagactgttgtggcggagtatgcaatagccctcgcacaaaagcacatgacacggactatctacacttctcccatcaaggccctctccaatcaaaaatttcgcgacttcagaaatacctttggcgacgttggactgcttactggggatgtccagctccaccccgaggctagttgccttattatgaccacagagatccttagaagcatgctgtatagtggctcggacgtcatcagagatttagagtgggtgattttcgatgaagtgcattacatcaacgatgttgagaggggcgttgtctgggaggaggtgctgataatgctcccagaccacgtgtcaatcatccttctatcagcgacggtgccaaatgcgctggaattcgccgactggattgggagactgaaacgtcgccagatatacgtgattagcacagtgacccggcctgtccctctagagcattatctgttcacaggtaattcttcgaagacccaaggggaactgttcctgctgctggactcaagaggcgctttccacactaagggctattacgctgccgtggaggccaagaaggagcgcatgtccaaacatgcgcagacatttggtgccaagcagcccacgcaccaggggggaccagcgcaggatagaggcgtatacctctcactgctcgccagcctaaggacccgggctcaactgccggtagttgtgttcaccttctcacggggtagatgcgatgagcaggcctccggcctcacctccctcgatctcactacttcctccgagaaatctgagatccatttattcttgcagcggtgcctagcccgactccgcggttccgacaggcagttgccacaagtcttacatatgagcgaacttcttaataggggcctgggtgtacatcactccggcatccttcccatactgaaagaaatcgtggagatgctcttctcccgagggctcgtgaaggtcctctttgccactgagaccttcgctatgggggtaaacatgcccgctcggactgtggtgttcgactcaatgagaaaacacgatggcagtacattccgggatctgctgcctggcgaatatgtgcaaatggctggcagagccggacgcagaggccttgatcctactgggactgtgatcctgttatgcaaagggcgagtcccagagatggccgacctgcatcgaatgatgatgggcaagcccagtcaactacagtcccagtttcggcttacctataccatgattctcaatctgctcagagtcgatgctctgcgagtggaagatatgatgaagagaagcttttcagagtttccgagtaggaaagattcaaaagcgcacgagcaggcgctggccgagttaactaaaaggcttggcgcactggaggagcccgacatgacaggccagcttgtcgacttgcccgagtattactcctggggagaggagttgaccgagacccaacatatgatccagcggcgtatcatggagtctgttaacggactcaaaagcctgtcagctggccgtgttgtggtcgtaaaaaaccaggaacaccacaacgccctcggggttatcctgcaagtttctagcaacagcacaagtagagtgttcacaacattggtcctttgcgataaacccctgtcacaggatccacaggataggggcccagccacagcggaggttccctaccctgacgacctggtggggttcaagctgttccttccggaaggcccatgcgaccatacagtggtgaagctgcagcccggtgacatggccgctattacaaccaaggtgcttagagtcaatggggagaagatcctggaggacttctcgaaacgacagcagcctaagttcaagaaggaccctcccctggccgctgtgacgacagctgtgcaggaactgctgcgactggcccaggcccatcctgccggaccccctacactggaccctgtgaacgatctgcagctgaaagacatgtcggtcgtggagggaggcctgcgcgcacgtaagctggaggaactgatacagggagcccagtgcgtacacagccctcgcttccctgcccagtatctaaaacttagagaacgcatgcagattcagaaggagatggagagactgagatttttgctgtctgatcagagtctactcctattacctgaatatcaccagcgtgtcgaggtactgcgtactcttgggtacgtcgacgaagccggaacagttaaacttgccggacgagttgcctgtgcaatgtcctcccatgaattgcttcttaccgagctgatgttcgataacgctttgtctactctgagaccggaggagatcgccgcactgttgtccgggttggtgtgccaaagcccaggtgacgcaggggaccagttacccaatactttgaaacaggggattgagcgggtgcgagctgtggcgaaaagaatcggggaagtccaagtcgcttgcggattaaaccagacagtggaagagtttgttggcgagctaaacttcggattggtggaggtagtgtatgagtgggcacggggtatgccatttagcgaattggcaggcttgtcaggcacaccggagggactggtagtgcgatgtatccaaagattggcagaaatgtgcagaagtctgcgcggagcggctagactggtgggtgagcccgtgcttggagccaagatggaaacagctgctacactgctacgtcgggacattgtgtttgcagccagtttatatacccaatag

SEQ ID NO: 242789 - DNA, 3267 bp, synthetic construct
  misc_feature 1..3267: note = Description of Artificial Sequence: Synthetic coding sequence
  source 1..3267: mol_type = other DNA
atggatgaacccacaattacggacctgaatacccgtgaagaggcagaggaagagatcgatttcgaaaaagatctcctgacgatacctcccggattcaaaaagggtatggacttcgcccctaaggattgccccacacccgctccaggcctcttgagcctcagttgcatgctggagccgctggacctcgggggaggggatgaggatgaaaatgaggccgtgggacagcccggaggcccacgtggcgacaccgtgagcgcctccccttgcagcgcgccactggcacgagcctcaagcctggaagatctcgtgctgaaagaggcttcaacagcagtgagtaccccggaagcgcctgaaccgccatcacaagagcaatgggctattcctgtggacgcaacctctcctgtaggggatttttacaggctgattcctcaacccgcattccagtgggccttcgagcccgacgtgttccaaaagcaggctatcttgcatctagagcgacacgactcagtctttgtagctgcccacacaagcgccggaaagaccgtggtcgccgagtacgctattgcactcgcccaaaaacacatgaccaggacaatctacactagcccgatcaaggcattaagcaaccaaaaattccgggatttccgcaacacgttcggtgatgtcgggctcttgactggggacgttcagttgcaccctgaagccagttgccttatcatgaccacagaaatactgcgctcaatgttatatagtgggagcgatgtgatccgtgatctagaatgggtcatcttcgacgaagtacattacataaatgatgttgaaaggggtgttgtttgggaggaagtgctgattatgctccccgaccacgtctccatcatcttactgagcgcgacagtgccaaacgccctagagttcgccgactggatcggcagattgaaaagacgccaaatatacgtgatctccactgtcacgcgtcccgttccgctcgagcactacctgttcaccggtaactcctctaagacccaaggagagctgtttctgctgctggactcaaggggggcattccatacgaagggctattatgctgcagtcgaagccaaaaaagagagaatgagcaaacacgcccaaacgttcggagcgaagcagcctacacatcagggaggccctgcgcaggaccgcggagtctatctctcacttcttgccagcctaaggactcgagcccaactccccgtggtcgttttcacgttctcaagaggcagatgcgacgagcaagcctctggcctcacatccctcgatttgaccacttcaagcgagaagtcggagatccatctgttcctgcagaggtgcttagccaggctccgcggttccgatcgccagctgccccaggtactacacatgtctgaactcctgaataggggcctcggcgtacaccatagtgggattctccccatcctcaaagaaattgtcgagatgctcttctctcgaggactcgtcaaggtgctgttcgctacggaaaccttcgcaatgggggtaaacatgccagctcgcactgtggtcttcgactcgatgaggaagcacgacggttccacctttcgtgacctgcttccgggagagtatgtccagatggctggaagagctggacggagaggccttgaccccacagggacagttatattattgtgtaaaggccgtgttcctgaaatggccgaccttcatcgcatgatgatgggaaaaccttcccagctgcagtcccaattccgtttaacctacaccatgatcctgaacttactgagggtagacgcgctgcgtgtggaagatatgatgaaacggagtttttcagagtttccttcaaggaaggactccaaagctcacgagcaggccctcgccgaactgactaagaggctgggcgcactcgaagaaccggacatgactggacagctggtggatctgccagaatactactcctggggcgaggaattgaccgaaacccagcacatgatccagcggaggattatggaatccgtgaatggacttaaaagtttgtccgccggtagagtggtggtggttaaaaaccaggagcatcacaatgcactgggggtgatcctgcaggtgtccagtaactccacttcgcgcgtgtttacgactttagtcctatgtgataaacccctctctcaggatccccaggataggggacccgcaacggcagaagtcccgtatcctgacgaccttgtagggtttaaattgttcctgcccgagggcccttgcgaccacacagtcgtgaagctgcaacctggcgatatggcggcaattaccacaaaagttttgcgggtgaacggggaaaaaatcctagaagatttcagcaaaagacagcaaccaaaattcaagaaggaccctcccctggcagctgtcaccaccgctgtgcaggagctgctcaggttggcccaggctcacccagccggtccaccaaccctggaccccgtgaacgatctccagttaaaagacatgagtgtggtggaagggggtttgagggcacgaaagctggaggaactgattcaaggcgctcagtgtgtgcattcaccaaggttcccagcccaatatttgaaattacgcgaacgtatgcaaatacaaaaagagatggagcgcctgcgattcttactaagcgatcagtctctgctgcttctgcctgagtaccatcagagagtagaggtccttcgaactctgggctacgttgacgaagccggtaccgtgaaactggcaggacgggttgcgtgcgcgatgtcctcccatgaactgttgttaaccgaacttatgttcgacaatgctcttagcaccctgcgtcccgaagaaatcgcagctctccttagcgggctagtctgccagtcgcccggtgatgccggagatcagctaccaaataccctcaaacagggtattgagcgagtccgcgctgttgccaagcggataggcgaagtgcaagttgcgtgcggcctgaaccaaacggtggaggaattcgtcggcgaattgaactttggactagtagaagttgtctatgaatgggctagaggaatgcctttcagcgagctggccggactatccgggacacccgagggtcttgtggttagatgcatacagagacttgccgagatgtgcagatctctgaggggcgctgccagactggtaggcgaacctgttctgggtgcgaagatggagacagccgcaactctgctccgccgagacatcgtttttgctgcaagtctctatacccaatag

SEQ ID NO: 242790 - DNA, 3741 bp, synthetic construct
  misc_feature 1..3741: note = Description of Artificial Sequence: Synthetic coding sequence
  source 1..3741: mol_type = other DNA
atgatggagacagagcgtttggtccttccaccacctgaccccctcgacctgcccttgcgcgctgttgaactgggctgcacaggacattgggaattgctgaatctgcccggagcccctgaatcctccctgccacacggcctccccccttgcgccccagatctgcagcaggaggccgagcagctctttctctcttctcccgcttggctgccactgcacggggtcgaacattccgccaggaagtggcaacgcaaaaccgacccttggagtctgctcgcagtgctgggcgctcctgtgcccagcgacttacaggcgcagcggcaccccacaactggccagattctaggctacaaggaggtgctcctcgagaacaccaatctatccgcaaccaccagcctgtctctgaggcggccacctgggcctgcttcacaatccttatggggaaaccccacccagtatcccttctggcccggtgggatggacgagccaacaataactgacctgaacacgcgggaagaggcagaggaagagatcgacttcgagaaggaccttttgacaattccaccaggcttcaagaaaggcatggacttcgcgccaaaggattgtccaactcccgcacccggactgcttagtttgagctgcatgcttgagccactggacctcggaggtggggatgaggacgaaaatgaagcagtcggacagcctggcggacctcggggagatacagtgtctgcctcaccgtgctctgcgccacttgctcgcgcatcctccctggaggacttagtgctgaaagaggcttctacggcggtctctaccccggaggctccagagccaccttctcaagagcagtgggctatccctgtcgatgccacatcccctgtgggggacttctatcgtttgattccccagccggcttttcagtgggctttcgagcctgacgtcttccagaagcaagcgattctacacttggaacggcacgattccgtgtttgtcgcggcacatacctcggctgggaagacagttgtggcagagtacgccatagcacttgcccaaaagcacatgacccgcacaatttatacttccccaatcaaggccctgtccaatcagaaattccgtgactttagaaacacatttggcgatgtgggactcttgaccggcgatgtacagctgcacccggaggcgagctgcctgatcatgacaacggagatccttcggagtatgctctactccggcagcgacgtgattcgcgacctagaatgggtgatcttcgatgaggtgcactacatcaacgacgtggagcgcggagtagtgtgggaggaagtgctgatcatgctccctgatcacgttagcatcatcctgctgtcggctaccgtacccaatgcgctagaattcgctgattggatcggtcgtctcaagcgcagacaaatttacgtcatctcaaccgttactcgtccagtgccccttgagcactacctttttacgggcaactcatccaagacccagggcgaactcttcctcttgcttgacagccgaggcgcttttcacaccaaaggctattacgccgcagttgaggccaaaaaggagcggatgtctaagcatgcccaaacgtttggagcgaagcagccaacccaccagggtggccctgctcaggatcggggagtttatctctctcttttggccagcctgcgtaccagggcacagctgcccgtggtggtattcaccttctccagggggaggtgtgacgagcaagcctcagggttgacgagcttggatctcaccacttcatctgagaaatccgagatccatttgttcctccagcgatgccttgctcggttgagggggtctgacagacagttgcctcaggtcctgcacatgagcgagttactaaaccggggtctaggtgtccaccactccggcattcttcctatcctgaaggagatcgttgagatgctgttttctcgcggactcgtgaaagtcttgttcgcgacggaaacattcgccatgggcgttaatatgcctgcgagaactgtggtcttcgacagcatgaggaagcacgatggatccacattccgagaccttcttcctggtgagtatgtgcagatggccggtagagcaggccgtaggggcctcgatcccactgggacagtcattctgctctgcaaaggtcgagtgccagaaatggccgatctccaccgaatgatgatgggcaagccctcccagctgcagagccaatttcgcctgacatacacaatgatcctgaatctcctgcgggtggatgccctgcgtgtggaggatatgatgaaaaggagcttcagtgaattcccttcgcgtaaggattctaaggctcatgagcaggcgctggccgaactgacaaagcgacttggtgcactggaagaacccgacatgactggtcaattggtcgatttaccggaatactacagttggggggaggagctgactgagacacagcatatgattcagcgtcgcatcatggagtcagttaatggcctgaaaagcttgtccgccggaagggtcgttgttgtgaagaaccaggagcatcacaacgcattgggtgtgatcctgcaggtctccagcaatagcacctcgcgcgtcttcactacactggtactgtgtgacaaacccctgagccaggacccccaggacaggggacctgctaccgccgaggtcccctatcctgacgacctcgtggggtttaaactgttccttcccgagggtccgtgtgatcatacagtagtaaaactgcagccaggggatatggcggctatcacaacgaaagtcctgagagtgaacggagagaagatccttgaggacttctctaagcgccagcagcctaagtttaagaaagatccacctctcgccgcagtgacaacagctgtgcaggaactgctacgtctcgctcaggctcatccagcaggtcccccaactctcgacccagtaaatgatctccagctgaaggatatgagtgtcgtcgaaggcggactgcgggctcgcaagctagaagaactgatccagggagctcagtgcgtgcattctccacgcttcccggcacagtatctcaagctgagagagagaatgcagattcaaaaagaaatggagcgactgaggttcctgctctccgaccagagtttgctactactgcctgaataccaccagcgggtagaggtgttaaggactttggggtacgtggacgaggctggtaccgttaagttagcagggagggtagcctgcgccatgagctcccatgagctgctgctgacggaactcatgttcgataacgccttgagtacgctcaggccagaggaaatagctgctctcctgagcgggctcgtctgtcagtcgcccggagatgcaggcgatcagctccccaacacactcaaacagggtatcgagcgagtccgggcagtcgcaaagcgtattggcgaggtgcaggtggcctgcggattgaatcagactgtggaggagttcgttggggagctcaattttggcctggtagaggtagtttacgaatgggctcgagggatgcccttctcagaattggccggactgagtgggacaccagaggggctggtcgtgcggtgtatccagcggctagcagagatgtgccgttctctgagaggcgcagccagactcgtgggcgagcccgtgctgggagccaaaatggagacagccgctactctgctgcggagggacatcgtttttgctgcctcgctatatacgcagtag

SEQ ID NO: 242791 - DNA, 3162 bp, synthetic construct
  misc_feature 1..3162: note = Description of Artificial Sequence: Synthetic coding sequence
  source 1..3162: mol_type = other DNA
atggacttcgctccaaaggattgtcctacccctgccccaggcctcctttccctgtcttgcatgctcgaaccccttgaccttggcggtggtgatgaggatgagaatgaagctgtgggacaacccggaggcccaagaggggacactgtctctgcttccccttgcagtgctccccttgcgagggcaagtagcctggaagacctggttctcaaagaggcctccactgctgtctctacaccggaggctcctgaaccaccatcgcaagaacagtgggccatcccggtagacgccacctctcctgtgggggatttctatcggttaatcccgcagccggcattccagtgggcctttgagcccgatgttttccagaagcaggccatcctccacctagagaggcacgattccgtgtttgtggccgcacacacctctgctggcaaaaccgtcgtcgctgaatatgcaatagccttagcacaaaaacatatgacgcgcacgatctacaccagccccattaaagcactcagcaaccagaagttccgggacttcagaaatacgttcggggatgtcggcctgctgactggggacgtgcagcttcacccagaagctagctgtctgatcatgactaccgagatactgagaagcatgctgtattcaggaagcgatgtgatccgtgatctggagtgggtgatatttgatgaagtgcactatatcaatgatgtagagaggggtgttgtgtgggaggaggtgcttatcatgttgccggatcacgtctcaatcatcttactgagcgcgacagtacctaatgcgttggagtttgctgactggatcggcaggctaaaaagaagacagatatacgtaattagcacagttactcggcctgtgcctctggagcactacctgtttaccggcaactcctccaaaacacagggggagctttttctcttgctggattctagaggggcttttcacacgaaggggtattacgctgcagttgaagcaaagaaagagagaatgtctaagcacgcccaaacattcggagctaaacaacccacacaccaggggggacctgctcaagaccggggagtatacctgagccttttagctagcctccgtacgagggcacagctgccagtagtcgtcttcacatttagccggggaaggtgcgacgagcaggcttcgggattaactagtctggatctcacaaccagcagcgaaaaaagtgaaatccatctgtttctgcagcgctgcttggccagactgaggggcagcgacagacaacttccacaggtattgcatatgagcgaattgctcaaccggggtctgggcgtgcatcactctggcattctcccaattttgaaggagatcgtggagatgctgttcagtcgtgggttggtgaaggtgctttttgcaactgaaaccttcgccatgggagtgaatatgcctgccagaactgtcgtgttcgattccatgaggaaacacgacgggagtacattcagggacttgttgcctggtgaatacgtccagatggcgggtagggccggtcgacgaggtctggatccaacgggtactgtgatcctgttatgcaaaggaagggttcctgaaatggcagacctgcaccggatgatgatggggaagccttcacaattacagtcacaattcagactgacgtataccatgatcctaaacctgctcagagtggatgccctgcgcgttgaagacatgatgaaacgctcctttagcgaattcccatcacggaaggacagcaaagcccacgagcaggcgctggcggagctgactaaacgtttgggtgccttggaggaaccagacatgacaggccagctggtagacctgcctgagtactacagctggggagaggaactcacagagacacagcatatgatccagcgaagaattatggagtcagtgaacggcttgaaatccctgagcgccggtcgcgtggtcgtagtcaagaatcaagaacaccacaacgcactgggggttattctgcaagtgtctagtaactccaccagcagagtgtttaccaccttggtgctgtgtgataagcctctgagccaggatcctcaagacagagggcctgccacagccgaggtgccatatccagacgatctcgtggggtttaagctatttctgcccgagggcccttgcgaccacactgtcgtcaagcttcagcccggtgatatggccgctattaccacgaaggtcctcagggtcaatggcgagaagattcttgaggacttctccaaacgccagcagcctaaattcaagaaggatccacctctggctgctgtgactacagcagtgcaggagctgctacgcctcgcccaggcccatcccgcagggccacctacactggatcccgtcaacgatctgcagctcaaggatatgtctgtcgtagagggtggacttagggcccgaaaactggaggagttaatccagggcgcacaatgcgtgcacagtccacggtttcccgctcagtaccttaaacttcgtgaaaggatgcagatccagaaagaaatggagcgcctgagattcttgctgtcagatcagtcattgctcttgttgccggagtatcatcaaagagtggaggtgctcaggactctgggatatgttgatgaagcaggcaccgtcaagctggcgggacgcgtggcatgtgccatgtcctctcacgaacttctgctcacagagctgatgtttgacaacgccctttccacattaaggcccgaggagatcgcagctctgctatctggccttgtgtgtcagtcccccggtgatgctggggaccagttacccaataccttaaagcaggggattgagagagtaagagccgtggcgaaaaggattggggaggtgcaggtcgcttgcgggctgaatcagaccgtggaggagtttgtaggcgagctgaactttggacttgtggaagtcgtctatgaatgggcccgagggatgcccttctcagagctcgcaggtctatcaggcaccccggaggggctcgtggtacggtgtatccaacgactcgcagaaatgtgccgctctctgcgaggtgcggctcgcctggttggtgagcctgttctgggtgcaaaaatggaaacagccgcaactttattacggagggacattgtgttcgccgcttccctttatactcagtag

SEQ ID NO: 242792 - DNA, 3162 bp, synthetic construct
  misc_feature 1..3162: note = Description of Artificial Sequence: Synthetic coding sequence
  source 1..3162: mol_type = other DNA
atggattttgcacccaaagactgtcctaccccggctcctggcctcctatcactgtcttgtatgctcgaaccgctcgacctgggtgggggagacgaggacgaaaatgaggcggtaggccagccagggggaccaaggggagacactgtctccgcgagcccctgcagcgcacccttagccagagcctcatccctggaagacctcgtgttgaaggaagctagtaccgccgtatcaacccccgaggcaccagagcctccctctcaggaacagtgggccatccccgttgatgccacatcaccggtgggcgacttttaccgtctgatcccccagcctgcctttcagtgggctttcgagcctgacgttttccaaaagcaggcaattctgcacttagagagacatgactccgtgtttgtcgctgctcatacttccgctggcaagaccgtggtggctgaatacgcgatcgctctggctcaaaaacatatgacccggacgatctatacaagtccaatcaaagcacttagcaatcagaaattccgagattttcgcaacacatttggagatgtgggcctgcttactggcgacgtgcagctgcacccagaggcctcctgcctgataatgactactgaaattctacgctctatgctctacagcggatcagatgtgattagagacctggagtgggtcatcttcgacgaagtgcactatatcaacgacgtggaaaggggagtcgtgtgggaagaagtgctgattatgctgccggatcacgtaagcattatcctactgagcgccactgtcccaaatgccctcgagtttgccgattggattggcagattgaaacggagacagatctatgtgatctcaaccgtgactagacctgtccccctcgagcactatctgttcactgggaacagttctaaaacccagggagagctgttcctcttgcttgactcccggggtgcttttcatacaaaagggtactatgccgctgtagaagccaaaaaagagcgcatgtctaagcatgctcagacctttggggcaaagcagcccactcaccagggaggtcccgcacaggataggggagtgtacctgagcctgctcgcctcactaagaacacgcgctcaactgcccgtagtcgtatttactttctccagaggacggtgtgatgagcaggcttcaggtctcacctcattggatctgaccaccagctctgaaaagagtgaaattcacctcttcttacagaggtgtctggctcggctgcggggatcggacagacagctccctcaggttttgcatatgtccgagctgctgaatcgcggattgggggttcaccatagcggaatcctgccaattttaaaagagattgttgagatgcttttttcacggggactggttaaagttctttttgctactgaaaccttcgcgatgggggttaatatgcccgctaggactgttgtatttgactccatgcggaagcacgacggttcaacttttagggacctactacctggggagtacgtgcagatggcaggcagggcgggacgcagagggttagaccctacaggaactgtgattctgctctgcaaaggcagggtgcctgaaatggcggatttacatagaatgatgatgggcaagccatctcagttgcagagccagttcagactaacttatacaatgatcctgaatctgttaagagtcgatgccttacgtgtcgaggatatgatgaagcgttccttcagtgaatttccttctaggaaagatagtaaggcacatgaacaggccctggctgagctgaccaagcggctgggagcccttgaagagccagacatgactggtcagctcgtggacttgcctgagtactattcttggggcgaggaactcactgagacccaacacatgattcagcgtcgcattatggagtctgttaacggactgaaaagcttgagcgccggacgagtggtggtcgtgaaaaaccaagagcaccacaacgcgctcggcgtcatattacaggtgtctagtaactctacttccagggttttcaccaccctggtcttatgtgataagccacttagccaagatcctcaagacagggggcctgccacagcagaagtcccttaccctgatgaccttgtgggtttcaagctcttcctgcctgaagggccatgtgaccacaccgtggtgaaactgcagcctggagacatggccgctattacgacaaaagtgctacgggtcaacggcgaaaaaattctagaagactttagtaaaagacagcagcctaagttcaaaaaagacccccctctcgctgcagtgaccactgccgtgcaggaactgctccgcctcgcccaagcccatcccgctggccctccgaccctggatccagtcaacgatctgcagcttaaggacatgtctgtggtcgaggggggactccgggcacgtaaattagaagaactgatacagggcgctcaatgcgtacacagccctaggtttcctgcccagtacctaaaactgcgcgagcggatgcagatccaaaaggagatggagcgcctccgctttttactgtccgaccagtccctactgttgctgcccgaataccatcagagggtggaggtcctgcgcactttaggatacgtggatgaggccggaacagtcaagcttgctggtagagtggcatgtgcaatgtcctctcatgaactgcttctgaccgagctaatgttcgataacgccctctcaacgctccgacctgaggagatcgccgctctgctcagcggactcgtctgtcagtcccccggagatgccggagaccagctgcctaataccctcaaacagggcattgaaagagtgcgagctgtcgcaaagaggattggtgaagttcaagtggcctgtggactcaaccagacggtggaagagttcgtcggcgaattgaatttcggcctcgtggaggtggtgtacgagtgggccaggggcatgccatttagcgagctcgctggacttagcggaacaccggaggggttagtggtcaggtgtattcagaggctggcagagatgtgcaggagcttacgcggtgcggcacgcttggtcggtgaacccgttctgggcgctaagatggagactgccgcaacccttctgaggagggacattgtcttcgctgcaagtctttacacccagtag

SEQ ID NO: 242793 - DNA, 693 bp, synthetic construct
  misc_feature 1..693: note = Description of Artificial Sequence: Synthetic coding sequence
  source 1..693: mol_type = other DNA
atgatggagactgagaggctggtgctccctcctcctgaccctttggatctgcctctgagggccgtggagctggggtgcaccgggcactgggagttgctgaacctgcccggagctcctgagtcttcgcttccacatggcttgcccccttgcgccccagacttgcagcaggaggccgaacaattatttctgtctagtcctgcatggctgcccctgcacggcgttgaacattccgcaagaaagtggcaaaggaagacagatccctggtcactgctggccgtccttggtgctccagtgccctccgacctgcaggcacagagacacccgaccacagggcagatccttggctacaaggaggtgctgttagagaacactaacctatctgccactacttccctcagcctgaggaggcctccaggaccagcatctcaaagcctatggggaaaccccacacagtaccccttttggcctggtggcatggatgagcccactatcacggacctgaacacccgtgaagaggctgaggaggaaattgactttgagaaagatttgctgactataccacccggtttcaaaaagggaatggatttcgctcccaagggttctgtccatagttgtatacatcctcggggacctagggcttctatttctggagccgtaggccatccgtgcggtagacacctgccctgctggtag

SEQ ID NO: 242794 - DNA, 3267 bp, synthetic construct
  misc_feature 1..3267: note = Description of Artificial Sequence: Synthetic coding sequence
  source 1..3267: mol_type = other DNA
atggatgaacccactattaccgatctgaacactagggaagaagctgaagaagaaatcgatttcgagaaggatctgctgaccatccctccaggcttcaagaaaggcatggattttgcccctaaagattgcccaacacccgctcccggactgctctcactgtcctgcctgctcgaacctctggatctcggtgggggtgatgaggatgagaacgaggccgtaggacagcctgggggaccaaggggggatactgtaagtgcatctccatgttcggcacctctcgctagagccagttcactggaagatttggtgctcaaagaagcctctacagccgtgagtactccagaggccccagaacctcctagccaggaacagtgggctattccagtggatgcaacaagcccagtgggtgacttctatcgtcttatcccccagccggctttccagtgggcattcgagcctgacgtcttccaaaagcaagcaatcctgcaccttgagcggcacgacagcgtgtttgtggccgcacacacatccgctgggaagacagtcgtcgccgaatacgctattgccctggcccagaagcacatgactagaacgatctacactagcccaatcaaggcattgtccaatcaaaaattccgggatttccggaacacttttggggacgtcggtcttcttacgggggatgttcagctgcaccccgaggcgagctgcctcataatgacgacagaaatcctaaggtccatgttgtacagtggctcggacgttatacgggatctggagtgggtaatcttcgacgaagtgcactacataaatgatgtggagaggggcgttgtgtgggaagaagtcttgatcatgctcccagatcacgtgagcatcatattactgtccgccacagtgcctaacgcactggaatttgcagattggattggcagactgaagaggcggcagatttacgtgatatccaccgtgacccggcctgtaccactggagcactatttatttacagggaatagtagcaaaacacagggtgagcttttcttgctgctggattctcgcggtgcgttccatactaagggatattacgccgcagttgaggcaaaaaaagagagaatgtcaaagcatgctcaaacattcggagcaaaacaacctacacatcaaggcggtcctgcacaggaccgtggggtgtacttatcactcctggcgagcctccgcacgcgggctcagttgcctgtagtggttttcacattttctcggggaagatgcgacgagcaggctagcggccttacttccctggatctgacaacctcctcagaaaaatccgagatacacctttttctacagcgctgcttagccaggctgaggggttcagacaggcagctaccgcaggtgctgcacatgtccgaattactcaatcgaggtctaggcgtgcaccactcaggcatactgcccattctgaaagaaatcgtcgagatgcttttcagcaggggcctggtcaaagtgctgtttgccactgagacctttgccatgggagtcaacatgccagcaaggactgtggtattcgactcgatgaggaagcacgatggatctacctttcgagatctactgcctggcgagtatgtgcagatggccggtcgcgctgggcgacgcggattggatcccacagggaccgtcatattgctctgtaaagggcgtgttccagaaatggcagacttgcaccggatgatgatgggtaagccatcccagcttcagtcacagttccggttgacctacacaatgattcttaatctgctaagagtggacgctctccgcgtcgaagatatgatgaagcgctccttctctgaatttccaagcaggaaggatagcaaagcccatgagcaggctctcgccgagcttaccaagcgactcggagctttggaagaaccagatatgactggccagctcgtcgacttgccagaatattacagttggggggaggagttgactgaaacccagcatatgatccagcggcgaatcatggagtccgttaacggccttaaatccctctccgccggtcgagtagttgtggttaaaaaccaggagcaccataatgcactgggagtcatactgcaagtgtccagcaacagtacttctcgtgttttcaccacccttgtactttgcgacaaacctttatcccaagacccgcaggacaggggtccagcaaccgctgaagtgccgtatcccgacgacctcgtgggatttaagctgttcttgcccgagggcccttgtgatcacactgttgtgaaactccagccaggagatatggcagctattactaccaaagttctccgtgtcaatggcgagaaaatcctggaggatttttcaaaacgccaacagccgaagttcaagaaagatcccccattggctgccgtgactactgcagtccaagagttgttgaggctggcacaagcccacccagctggtccgcctactttagacccagtgaacgacctgcagctcaaggacatgtctgtggttgagggcggtcttagggcaaggaagttagaggagctaatacagggggctcagtgcgttcactccccccgttttcctgcccaatatcttaagttacgcgagcgcatgcaaattcagaaagagatggagagactacggtttctgctatctgatcaatcactattactgttacccgaataccatcaacgcgtggaggttctcaggacactgggctacgtggacgaagcagggacagtcaagctggccggacgggtggcttgtgcgatgagctcacacgagttactgctcacagaattaatgtttgacaatgccttgtccacgcttagacccgaagagatagctgcgctgctgagcggcctggtgtgtcagtcccccggagatgcaggggatcaacttcccaatacactgaagcagggcatagagagggtcagagctgtggcaaagagaatcggagaagtgcaggtagcatgtggcctcaaccagacggtggaggaatttgttggggagctgaactttggcctggtcgaggttgtgtatgagtgggccaggggtatgccattcagcgagctggccggtctgtcgggaacccccgagggtttagtagttagatgtattcagcggttagccgagatgtgtaggtcattaagaggcgcagcgcgactggtcggagaacccgtattgggggcaaaaatggagacagccgcaacactcctgaggcgcgacattgtgttcgccgcatccctgtatacccagtag

SEQ ID NO: 242795 - DNA, 3162 bp, synthetic construct
  misc_feature 1..3162: note = Description of Artificial Sequence: Synthetic coding sequence
  source 1..3162: mol_type = other DNA
atggattttgctcccaaggactgtcctacgccggctccaggcctgctctccctgagttgtctcctggaacccctggacttgggtgggggagatgaggacgagaacgaggctgttgggcagcccggaggcccacggggtgatactgtcagcgcgagtccctgctctgctccactcgccagggcgtcctccctcgaggacctggtactcaaggaagcgtccactgcagtctcgacccctgaggcacctgaaccaccttctcaggaacagtgggccattcccgtggacgccacatcccccgtaggggacttctaccgccttattccgcagccagccttccagtgggcctttgaacctgacgtgttccagaagcaggctatactccatctagaaagacatgacagcgtatttgtcgcagctcacacatctgccggtaaaactgtggtcgctgaatacgccatagctctcgctcagaagcatatgacacggacaatctatacgagtccaatcaaggctttgagtaaccaaaagttccgggactttaggaatacttttggagatgtgggcctcctgacaggcgatgtgcagctccaccccgaagcctcctgcctcataatgacaactgagattctgcggagcatgctctatagtggaagcgatgtcatccgagacctggaatgggtcattttcgatgaggtgcactacatcaacgacgtagaacgtggagtagtctgggaagaagtcctgataatgctgccagaccatgtctccatcatccttctgagtgccaccgttcctaatgcgctggagtttgcagactggatcggtcgtctgaagcggcgtcaaatctacgtcatcagcaccgtgaccaggcccgttcctctggaacactacctgttcaccgggaactctagcaagacgcagggggagcttttcctgctgttagacagcagaggagcatttcacacaaaaggttactacgccgctgtcgaggccaagaaagagagaatgtctaaacatgctcaaacgttcggagctaaacagcctactcaccagggtggcccagcacaggatcgaggcgtttacctgagccttctggcctcattaaggacccgtgctcagctgccagtggtggtattcaccttctcgagggggagatgcgatgaacaggcgtcaggactgaccagcctcgacctcacaacttcttcagagaaaagcgagatacacttatttttgcagaggtgcctcgctagactgagaggttcagaccgccagctgcctcaagtgcttcacatgagcgaactcctgaacagaggactgggagtccaccactccggcattctccctatcctgaaggaaatagtcgagatgctgttcagtcgcggactcgtgaaagtgttgttcgcaacggaaaccttcgccatgggcgttaacatgccagcccgtaccgtagtgtttgatagcatgagaaaacatgatgggtctacctttcgcgatctgctgcccggtgagtacgtgcagatggcaggcagggcgggaaggcggggacttgatcccaccggtactgtcattttgttatgtaaaggacgggtaccagaaatggccgatctccatcgtatgatgatgggaaaaccttcccagctgcagagccagtttagactgacatatactatgatccttaacctcctgagggttgatgccctgagagtagaagatatgatgaagcgaagtttctcggagttcccgtcccgaaaggatagtaaggcccatgagcaagcacttgcagagttaaccaagaggcttggtgcactggaagaacctgacatgacgggacagctcgtggacttgcctgagtattattcatggggagaagagctcaccgaaacccaacatatgatacagaggcgcatcatggagtccgttaacggcctcaagagtctgagtgccggaagagttgtcgtcgtgaagaatcaggaacaccataacgctcttggagtgatccttcaggtgagctccaattccacgagtagggtctttacaacactggtcctgtgcgataagccactctcccaagatcctcaggacaggggcccagctaccgctgaggtcccatacccggacgacctcgtgggcttcaaactttttctgcctgagggaccgtgcgaccacacagtagtcaagctccagccgggagacatggcggctatcactactaaggtgctcagagtgaacggcgaaaagatcttagaggatttctctaaacggcagcagcccaagttcaagaaagaccccccactggctgccgtcacaaccgcggtgcaggagctgctgagactggcacaggctcaccccgctggtcccccaaccctggaccctgtgaatgacctacagcttaaagatatgtccgtggttgaggggggattgcgagctaggaagttggaggaattaatccagggggcacagtgcgttcatagccccagattcccggcacagtacctgaaactcagggagcgcatgcagatccagaaagaaatggaacgattgaggtttctgctgagcgaccaatcacttctgttgctgccagaatatcaccaaagggtggaagtgctgcgcaccctggggtatgtggatgaagccggaaccgtcaaacttgcaggcagggtggcctgcgccatgagttcacacgagctgctgctcacagagctcatgttcgacaatgcccttagtacgctgcggccagaagaaatagctgcactgctctccggcttggtctgtcagtcgcctggagacgcgggtgaccagctgcccaacacactaaaacagggcatagagcgcgtacgcgcagtggcaaaaaggatcggcgaggttcaggtggcatgtggtctgaatcagactgtggaagagtttgtgggagagctgaactttggtctcgtggaagttgtgtatgagtgggccaggggtatgcctttcagcgagcttgcaggactctctggtacccccgagggcctggtggtgcgttgtatccagagactggccgaaatgtgccgctctctgcgcggagccgctcggctcgtcggagagccagtgttgggggctaagatggagacagcagcgaccctgctaagaagagatatcgtctttgcagcgagcctgtacacacaatag

SEQ ID NO: 242796 - DNA, 2643 bp, synthetic construct
  misc_feature 1..2643: note = Description of Artificial Sequence: Synthetic coding sequence
  source 1..2643: mol_type = other DNA
atgatggagactgaacgcttagtcctgcctccccctgatcccttagacctgccccttcgggcagtggaattaggctgcacaggtcattgggaactgttgaatctgccaggtgccccagagtcctcacttccccatgggttgccgccatgcgcccctgacctccagcaggaggctgaacagctgtttctgtcttcaccagcttggctgcctctgcacggcgttgaacattcagctcgaaagtggcaaaggaaaactgacccctggtcactgctggccgtgctgggggctccagttccgtccgatttacaagctcagagacatcctaccacgggccaaattttggggtacaaagaggtgctacttgagcactatctgttcacagggaatagttcaaaaacacagggtgagctctttttactgctggactctcgcggagcttttcacacaaaaggctactatgctgcggtggaggctaagaaggagcgcatgtctaagcacgcccaaacctttggagcaaagcaacctacacaccaaggtggaccagcacaggaccgaggagtctacctaagcctgctggccagtctcagaaccagagctcaactcccagtggtcgtatttacattttcccgcggaaggtgtgatgaacaggcatccgggctaaccagcttggatctcacaaccagtagcgaaaagtctgagatccacctgttcttacagcgctgcctcgctaggctccgaggcagcgacagacagttgccacaggttctccatatgtctgaattgctgaataggggtttgggagttcaccattcgggaatcctcccaatcttgaaggagattgtcgagatgctgttttctaggggcctggtgaaagtgctattcgccacggagacgtttgctatgggagtcaacatgcctgctaggacagtcgtattcgattccatgcggaaacatgacgggtctacctttagagacttgctgcccggagagtacgtccagatggccggacgggctggacggcgaggattagatccaaccggcacggtaattctcctctgtaaaggacgagtgcccgagatggccgatctgcacagaatgatgatgggcaagccgagccaattgcagagtcagttcagattaacttatacaatgattcttaatttactccgcgtggacgcactacgggtagaggacatgatgaagcgttcctttagcgagtttccctcgaggaaggactctaaggctcacgagcaggccctggccgaactcacaaagcgcttgggcgcactggaagaaccagatatgacagggcaactggtggatctgcccgagtactattcatggggcgaagagttaacagagacacaacacatgatccagaggcgaattatggagagcgtgaacgggctaaaaagcctgtcggctggacgcgtagtcgtggtgaaaaatcaagagcatcataatgcgttgggcgtcattctgcaggtttcatctaactcaacaagcagggtcttcactaccctcgtgctgtgcgacaaacctctgagccaggatccccaagatcgcggacctgctacggccgaagtgccatatcccgatgatctggtggggtttaagctgtttcttcctgaaggcccttgtgaccacaccgtggttaagctacagccaggagacatggcagccattacaacaaaagtcttacgggtcaatggggagaagattttggaggatttctccaaacgacagcagccaaagttcaagaaggaccctccactagccgcagtgaccaccgcagtacaggagcttctaagacttgcacaggcacacccagctggcccacccactctagatcctgttaacgatcttcagctgaaggatatgtctgttgtggagggcggtcttagggccagaaagctggaggagctcattcagggggctcagtgcgtacactccccacgcttccccgctcaatacctgaagctgagggagagaatgcagatccaaaaggaaatggaacgcctacgctttctgttgagtgatcagtccctgctccttttgccagaatatcaccagcgcgtggaggtccttcgaaccctcggctacgtggatgaggcgggaactgtgaagctcgccggtagagtggcttgcgctatgtcttctcacgaattactgctgactgagcttatgttcgataatgctctgtccacactccggccagaagagatcgctgcactgctctctgggctagtttgtcagtcccccggagatgctggtgaccagctgccaaacactttgaagcaaggcattgagcgagtgagagcggtggcaaagcggattggggaggtgcaggtggcttgcgggctcaatcagacagtcgaagaattcgtgggcgaattaaatttcgggcttgttgaagtcgtttatgagtgggccagagggatgccattctctgaattggccggtttgtctgggaccccagagggattggtggtgcgttgtatccagcgcctggcagagatgtgtcggagtctcagaggggctgcaaggttggtgggtgagcctgtgctcggcgcaaaaatggaaacggccgctacgttgttacgccgtgatatcgtgtttgcagcaagcttatatacccagtag

SEQ ID NO: 242797 - DNA, 3267 bp, synthetic construct
  misc_feature 1..3267: note = Description of Artificial Sequence: Synthetic coding sequence
  source 1..3267: mol_type = other DNA
atggatgagcctacaatcaccgatctcaacactagggaagaggccgaagaagagatcgattttgaaaaagatctcctgaccatcccccctgggttcaagaagggtatggatttcgcccctaaagactgcccaacccctgccccaggtctactctcactgtcttgtttgttggagcctttggacttggggggtggcgacgaggatgagaacgaggccgtcgggcagccgggtggacccagaggagacacagttagtgccagcccctgttccgccccattggcccgagcatcgtcactcgaggacctcgtgttgaaggaagcctcaacagctgttagcaccccagaagcccctgaacccccaagccaggagcagtgggctatccccgttgatgcaacctctccagtgggcgacttttatcgacttattcctcagcccgcattccagtgggcttttgagcccgacgtcttccagaaacaggctatcctccacctggaacgacatgactcggttttcgtggccgctcacacctctgcgggtaagaccgtggttgctgaatatgctatcgctcttgctcagaagcacatgacccgcaccatatacactagcccgatcaaggctctgagcaatcagaagttcagagattttcgaaacactttcggcgacgttggcctcctcacaggagatgtgcaactgcaccctgaggcgagctgcctgattatgaccaccgaaatactcaggagtatgctctactcagggtcagatgttatccgcgacttggaatgggtgattttcgacgaggttcattacattaacgatgtggagagaggagttgtgtgggaggaggttcttattatgctgcccgaccacgtctcaataatcctgctgagcgccacagttccaaatgctttggaattcgcggactggattggaaggcttaagcgcaggcagatctacgtcatttcaactgtgactagaccagtgcccctggaacattatctttttacgggtaatagctccaagacccaaggggagttattcctgctgctggacagcaggggcgcattccatactaaaggatactacgccgcagtggaggctaagaaagagcggatgagcaaacacgcccagactttcggagcgaagcagccgacacatcaaggcggtccagcccaggacagaggtgtgtatttgagcctgctcgcgtccctcaggacgagagcccagttacctgttgtcgtgttcaccttctcgcgaggtaggtgcgatgagcaagcttctgggctgacatctctcgacctgactacatccagtgaaaaatctgagattcacttatttctgcaacggtgcctggcaagactccgcggatctgaccgtcagcttccgcaagtgctccacatgagcgaactactgaaccggggactgggggttcatcacagtggcatcctgcctattttgaaggagattgtcgagatgcttttctcccgcggattggtgaaggtgcttttcgccactgagacattcgcaatgggcgtcaacatgcctgcacgcactgtggtcttcgatagtatgaggaagcatgacggaagtacatttcgcgatttactacccggtgagtacgtgcagatggccggtcgcgctggaaggcgaggcctggatcccacaggtactgtcatacttttgtgcaagggccgagtgcccgaaatggccgatctgcaccggatgatgatgggaaaacctagccagctgcagagccagtttaggctgacttacacgatgatactgaatttgctgcgggtggatgcgttgagagtcgaggatatgatgaaacgttcttttagcgagttcccctccaggaaagacagcaaagctcatgaacaggcactggccgagttgaccaagcgactgggggctttagaggaaccagacatgaccgggcagctggtggatttgccagagtactactcctggggagaggaactgaccgagacccagcatatgatacagcggcgaatcatggaatccgtaaatggcctaaagtccctgagtgcgggtcgggtcgtggttgtcaagaatcaggagcatcacaacgctctgggcgtcatcctgcaggtttctagcaactcgacctcaagggtgttcacaacactcgtactctgtgataagcccctctctcaggatccccaagataggggcccagccaccgccgaggtgccatatcccgacgacctcgtcggtttcaaactgttccttcctgaaggaccttgcgatcataccgtcgttaagctgcaaccgggagacatggccgctatcactacgaaggttttaagagtgaacggcgagaagatactggaggacttttccaagcgacaacaacctaaattcaaaaaagatccaccgttagccgcagtgactacagctgtgcaagagttactgagactggcccaggcccaccccgctggcccacctaccctggaccctgtgaatgaccttcaactgaaggacatgtctgtcgtggaaggcggtcttcgagcccgaaaacttgaggagttgatacaaggtgctcagtgcgttcactccccgagattcccagctcaatatctgaagttgagagaacggatgcagatccaaaaagagatggagagactcaggtttctcctcagcgaccagagtttattgctgctcccagaataccaccaacgtgtagaagtactcagaacactgggctacgtggacgaggccggaaccgttaagctggcgggtagagtagcctgtgcaatgtcttctcatgagcttttgctgactgagctgatgtttgataacgcactatccacgttgcggccagaagagatcgccgctttgttgtccggtctggtgtgtcagagcccgggagacgccggagatcagctgccaaacaccctgaaacaaggaatcgagcgggtgagggccgtagcgaaacggatcggagaggttcaagtggcttgtgggctgaaccagactgttgaggagtttgtgggcgagctcaattttgggttggtggaagttgtgtacgagtgggctagaggtatgcccttctccgaactggctggcctttcgggaaccccagaaggtttggtggtcaggtgtatacagaggctagctgagatgtgcaggtctttaaggggggcagcacgattggttggagagcccgtcttgggagcaaagatggaaacagcggctaccctgctgaggagagatatcgtcttcgctgcgagcttatatacacagtag

SEQ ID NO: 242798 - DNA, 2643 bp, synthetic construct
  misc_feature 1..2643: note = Description of Artificial Sequence: Synthetic coding sequence
  source 1..2643: mol_type = other DNA
atgatggaaaccgaacgccttgtattaccaccccctgacccattagacctgcccctgagagccgttgagttaggctgcactgggcactgggagctcttgaacctgcctggagctcctgaatcttctttgccacatgggctgcctccatgtgcgcctgacctccagcaggaagccgagcagctctttctaagcagccctgcatggctccctctacacggtgttgagcactccgcaaggaagtggcaaagaaaaacagacccctggtctctgctagccgtactgggagcccctgtgcctagcgacctccaggctcagcgacatccgacaacgggccagatcctgggttataaggaagtgttgttggagcactacctctttaccggtaactccagtaagactcaaggtgaattgttcctcctgctggatagccgaggtgcctttcataccaagggttactatgctgcggtggaggcgaaaaaagaacgcatgagtaaacacgcgcagacatttggcgctaagcagcctacacatcagggtggtcccgctcaggatcgaggagtgtatctctccttattggccagcctgcggactagggcgcagttgccagtcgtggtctttacgttttcccgaggtcggtgtgacgaacaggcttcagggcttactagtctggacttaacaacaagcagcgagaagtcggaaattcatcttttcttgcagcggtgcttagcccgactccgcggatctgaccgccagctccctcaagttctgcacatgtcagaacttcttaatagaggcctcggggtgcatcacagcggcatccttcccattttgaaggagattgtcgagatgcttttttcaagagggttggtgaaggtcctcttcgctacggagaccttcgcaatgggcgtaaatatgcccgcacgaaccgtggtgtttgattccatgagaaagcacgacggttccacctttcgcgacctgcttcccggtgagtatgtccagatggccggtagggcagggaggagaggtcttgatcctactggcaccgtgatcttgttgtgtaagggcagggtgcctgaaatggccgatctgcaccgaatgatgatgggcaaacccagccagctgcagagccaattcagactcacttacacaatgattctgaatctactcagggtggatgccttgagagtggaggatatgatgaagaggtccttctctgaattcccatcaaggaaagacagcaaggcacatgagcaggcccttgcagagctcacaaagcggttgggagccctggaggagcctgacatgacaggtcagttggtggacctccccgaatattattcatggggcgaggaactgactgagactcagcatatgatacagcggaggattatggagagcgtaaatggtctcaagtctctttcagcgggacgcgttgttgtggtgaagaatcaggagcaccacaacgctttgggggtgatccttcaggtgtccagcaattccacatctcgcgtatttactactctggtgctctgcgacaagccacttagccaagatccccaggacagggggccagccactgcagaagtaccttacccagacgatctggtgggatttaagttgttcttgcccgagggtccctgcgaccacacagttgttaagttacagcccggagacatggcggctataaccacgaaggtgttacgagtaaacggggagaagatcctggaggacttcagtaaacgccagcagccgaaatttaagaaggacccacctcttgctgctgtcacaacggccgtccaggaactcctgcgcttagcacaagcccaccccgcaggtcctccaacgttagacccagtgaatgacctccagttgaaagatatgtcagtcgtggagggcggtctgagggctagaaagctagaggagctcatccagggagcccagtgtgtccactcccctaggttcccagcacagtatctgaagctccgagaacggatgcaaatccagaaggagatggagagattacgtttcttgctgtccgaccagagccttttactccttccagagtaccatcagcgtgtagaggtattacgtaccctgggctatgttgacgaagcaggaactgtcaagttagcaggacgtgtggcctgcgccatgagctcgcatgaactcctgctcactgaactgatgttcgataacgccctgtcgactctccgcccagaagaaatcgccgctctgttgtctgggctagtgtgtcaatcacctggagatgcgggagatcagctccccaataccctcaaacagggtatcgagcgggtccgtgccgtcgcaaagcgcatcggtgaggtgcaagtggcgtgtggcttgaatcagacagttgaagagttcgtaggggagttgaatttcggcttggtcgaggttgtttatgaatgggccaggggtatgccattcagcgagttagccggattgtccggcacccctgaaggactggtggtgaggtgtattcagcggctcgccgaaatgtgccgcagcctccgaggtgctgctcgtcttgtgggcgagcctgtgctcggagccaagatggagaccgcagcaaccctgctgcgcagagacatcgtgttcgctgcctcactctacactcagtag

SEQ ID NO: 242799 - DNA, 2643 bp, synthetic construct
  misc_feature 1..2643: note = Description of Artificial Sequence: Synthetic coding sequence
  source 1..2643: mol_type = other DNA
atgatggagactgagaggctggtcctccctcccccagatccattggatctcccactgcgagcagtggagttgggatgtaccgggcattgggagctgctgaacctccctggggctcccgaaagttcactgcctcacggtttgcctccttgcgcgcctgacctgcagcaggaggcagagcagctatttctcagctcacctgcatggctacctcttcatggcgtggagcactccgctcggaagtggcagagaaagaccgatccgtggtcactcctggccgtccttggagcaccggttccttcggacctgcaagcacagcgtcacccaaccacagggcagatcctcggatataaagaagtcctcttggagcattacctctttaccgggaacagctccaagacccaaggagagctctttctgcttctggattcgagaggagcttttcacactaaaggatattacgctgccgtggaggctaagaaggagcgtatgagtaaacatgcccagaccttcggcgctaagcagcctacccaccaggggggacctgcacaggacagaggcgtgtacctctctcttctcgcaagcctcagaacacgggcacagctgcctgtggtcgttttcacctttagcagggggcgttgtgatgaacaggcctccggtctaacgtcccttgacttaactaccagtagcgagaagtcagaaatccacctgtttttacagaggtgcctcgcacgcctgcggggtagcgacaggcagctcccccaagttttgcacatgtccgagctgctgaacagaggacttggggttcaccactcaggtatcctgcccatcctgaaagagatcgtggaaatgctgttttccagagggctcgtgaaagtactgtttgccactgagacttttgccatgggcgttaacatgcccgctcggactgtcgtcttcgattcgatgaggaagcacgacggatctaccttccgcgatctgcttccgggagagtatgtgcagatggcaggaagagccggaaggagaggactcgaccctaccggaaccgtgatcctcctgtgcaaaggcagggtccccgaaatggctgaccttcaccgcatgatgatggggaagccctcgcaattgcagtcgcagttccgcctaacgtacactatgatactgaacctgctcagagtggacgcccttcgcgtcgaagatatgatgaaacgctccttctctgagtttcctagccgtaaagactcaaaagcccacgagcaagcacttgctgagctgaccaaacgccttggagcactggaggagccagacatgacagggcagctggtcgacctgcccgaatactattcatggggcgaggagctgactgagacccagcacatgatccaacgtcgaatcatggaatcagtgaatggcctgaaaagcctctccgccggtcgcgtcgtggtggtcaaaaatcaagagcaccataacgccctgggggtgatcttgcaggtgagtagtaacagcacctcgcgtgtttttacaacactggtgctgtgtgacaagcctttgtcccaggacccacaggatagaggacccgcaaccgccgaggtcccctacccagacgacctcgttggatttaaactgttcctccctgagggcccttgtgaccacacagtggtgaaactccagccaggggatatggccgctataacaaccaaagtgctcagagtcaacggcgaaaagattttggaggacttcagcaaacgacagcaacctaaattcaagaaggatcccccattggccgctgttacaacagccgtccaggagctattgcggctcgcccaggcacacccagccggacctcctacactggaccctgtcaacgacctccagctcaaagacatgagtgtggtggaagggggtctccgggctcgcaagcttgaagagttaattcagggcgcacaatgcgtgcattctccgagattccccgcacaatatctcaaactgagggaaagaatgcagatccagaaagaaatggagaggctccggttcctcttaagtgaccaaagtctcctgctcttgccggaatatcaccagcgggtggaagtactcagaaccctcgggtacgttgacgaagctggcacagtgaagcttgccggtagggtagcgtgcgccatgtccagccatgaacttctcctgaccgaattgatgttcgacaacgcactctctacactgagacctgaagaaatcgcggctcttctttctggtctcgtgtgtcagtcccccggtgacgcaggcgatcagctcccaaatacattgaagcaaggaattgagcgagttagggccgtcgctaagcggattggcgaggttcaggtggcgtgcgggctgaatcagaccgtggaagaattcgttggggaactcaacttcggtctcgtggaggtggtgtatgaatgggcccgaggcatgcccttttctgaattagccggactgagtggcacacctgaagggctggtggtgagatgcattcagagactcgccgaaatgtgccggtctctgcgaggggctgctcggctggtaggagaaccagttctcggagccaaaatggagactgcggctaccctactgcgacgggatatcgtgtttgctgcctctctgtatacacagtag

SEQ ID NO: 242800 - DNA, 693 bp, synthetic construct
  misc_feature 1..693: note = Description of Artificial Sequence: Synthetic coding sequence
  source 1..693: mol_type = other DNA
atgatggagaccgagagactggtgttgcctccgccagatccactggacctgccactgagagcggtggaactggggtgtacaggtcactgggaactactgaatttgccaggagctccagagtccagcctgccacacgggctgccgccatgcgcacctgatctgcagcaagaggctgagcagcttttcctgagctcacccgcttggctacctctccatggggtagaacacagtgcccgaaaatggcagcggaaaacagatccttggtctctgctggcagtactgggggctcctgtacccagtgatctccaggcccagaggcacccaaccaccgggcagatattagggtataaggaggttctcctggaaaacaccaatctgagcgccacgacctcgctcagtctccgtcggccaccgggaccagctagccagtcgctttggggcaatcctacgcaatacccattctggcccggtggtatggacgaaccaaccatcaccgacctgaacacacgcgaagaggccgaagaggaaattgattttgagaaggacttattgacaattcctcctggctttaagaaggggatggactttgcacctaagggcagtgttcattcttgcatccatccgcgaggtcctcgagccagcatcagcggagcagttggacatccgtgtggcagacacctcccttgttggtag

SEQ ID NO: 242801 - DNA, 2643 bp, synthetic construct
  misc_feature 1..2643: note = Description of Artificial Sequence: Synthetic coding sequence
  source 1..2643: mol_type = other DNA
atgatggagactgaaaggctggtattgcccccacctgatcctcttgacctgcctttgagggcagtcgaactgggttgtaccggtcactgggagcttctaaacctgcctggcgctcccgagagcagcctcccacatggtttgccgccttgtgcccctgacctgcagcaggaggcagaacagttgtttctgagctcacctgcatggctccctctccacggagtggagcactccgctaggaaatggcaaagaaagacagacccctggtccttgctggcggtactcggggcacccgtcccctccgacttgcaggcccagaggcatcccaccaccggacaaattctcggttacaaagaagtcctgctggagcattacctgtttactggcaactctagtaaaacccagggagagctgtttctcttactggacagtcggggagccttccatacgaaggggtactacgctgcagtcgaggcaaagaaagagcggatgtcaaaacatgcccaaacttttggggcaaaacaacctacccaccagggcggtccagcccaggacaggggcgtctacctatcccttttggcaagtcttagaaccagggcccagctgcccgtggttgtgtttaccttctctcggggacgctgcgacgaacaggcctccggcctgacctctctggatcttacaacatcgtctgaaaagtcagaaattcatcttttcctccaacggtgtctcgcaagactcagaggaagcgaccgccagttgcctcaggtgctccacatgagtgagctgttgaatagagggctaggggtgcatcactctggtatcctaccgattctcaaggagatcgtggagatgttattctctcggggtctcgtaaaagtgctttttgcaaccgaaacgttcgccatgggcgtgaacatgcctgctaggacagtggtctttgatagtatgcgcaaacacgatggatccacattccgcgatctgcttcctggtgagtatgttcaaatggctgggagggctggacgacggggtctggacccgacgggaacagttattcttctctgcaaagggcgtgtgcctgaaatggccgacctccacaggatgatgatgggaaagccttcccagttacagtctcaattccggttgacatatactatgatacttaatctgctgcgcgtggatgccctgcgtgtggaggatatgatgaagagatcattttcagaattcccatctaggaaggacagtaaggcgcacgaacaggccctggccgagcttactaagcgattgggggcacttgaggagccggacatgacaggccagctggttgatttgccggaatactattcttggggagaggagttgaccgagacacaacacatgatacagaggagaatcatggaatcagtcaacggcttgaagagcctgagcgctgggagagtcgtggtagtcaagaatcaagagcatcacaacgcgctgggagtgatcctccaagtaagttcaaacagcacatctagggtcttcacgacattagtgctgtgtgataagcccctttcccaggacccacaggaccgcggacctgccactgctgaagtcccttaccctgacgatttggtggggtttaaactcttcctgccagaaggaccctgcgatcacaccgttgtgaaattgcagccaggagacatggctgccatcactactaaagtgctgcgagttaacggcgagaagatacttgaggacttttccaaacggcagcagccaaagtttaaaaaggaccctcccctggccgctgtcacaacagcagtccaggagcttctcagattggcacaagcgcacccggcagggccacccaccctagaccccgtgaacgacttgcagttgaaagacatgtccgttgtcgagggtgggttaagagcgcgtaaactggaggagctgattcagggggctcagtgcgtacacagtccaaggtttccagcgcagtacctcaagctgcgagaacgtatgcagatccaaaaggagatggagagactacggtttctgttgagcgatcaaagcctgcttttgctgcctgagtatcaccagcgagttgaggtcttgcgaactctcgggtacgtcgacgaggccggtacggtaaaactggcaggacgcgtagcttgcgcaatgagctctcatgaactgttgttgactgagttaatgttcgataatgcattgtccacgttacggcctgaagaaattgctgccttgctcagtggtttggtatgtcagtctcccggagatgcgggagaccagctacccaacacactgaagcagggcatagaaagggtgcgtgccgtggctaagcggattggagaagtgcaggtagcctgcggattgaatcagacagtagaggaattcgtcggagaattaaattttgggctcgtagaagtggtgtatgagtgggctcgtggtatgcctttttcagagctggctggcctgtctggcacgcccgagggattggtggttaggtgcatccagagactggctgagatgtgtaggtcgctcagaggggctgccagactggtgggagagcccgtgctaggagcgaagatggaaaccgccgcaacacttctgcgacgggatatcgtattcgcggcatccctgtatactcagtag

SEQ ID NO: 242802 - DNA, 3267 bp, synthetic construct
  misc_feature 1..3267: note = Description of Artificial Sequence: Synthetic coding sequence
  source 1..3267: mol_type = other DNA
atggatgagcccacaattacagacttgaatactagggaagaggccgaggaggagatcgactttgaaaaagacctgttgacgatccctccagggtttaagaagggcatggattttgctccgaaggactgtccgacccccgcaccgggactgctgtcgctgtcatgcctgctcgagccactcgatctgggtggtggcgatgaggacgaaaacgaagctgtcggccagccagggggaccccgaggtgacacagtctccgcctctccttgtagtgctcctctggccagggcaagcagcctcgaagacctggttctcaaggaagctagcacagcggtctccaccccagaagctcctgagcctcctagccaggagcagtgggccatcccagtggatgctacatcccccgttggagacttctaccgactgatcccacagccagcattccagtgggctttcgaacctgacgtcttccaaaagcaagcaatcctccatctggagcggcacgactcagttttcgtggctgcccatacctccgccggtaagaccgtggtggccgaatatgcaatagccctcgcccagaagcatatgactaggaccatctatacctcccccattaaggctctgagtaaccagaagtttcgggatttccgaaatacttttggggacgtagggttgctaaccggcgatgtccagctacatcctgaagcctcttgtctgattatgacgaccgagatcctacgtagcatgttgtattccggctcagacgtaattcgggatcttgaatgggtcatattcgatgaggtgcactatattaacgatgtggagcgtggagtcgtgtgggaagaggttctcatcatgctgcccgaccatgtcagtattatcttactgtcagcgaccgtgccaaatgccttggagtttgcggactggattggcagactaaaaaggcggcaaatctacgtgatttcgaccgtaaccaggcctgtgcctttagaacactatctgtttaccggaaactcatcgaaaacccaaggagagttatttctgctgttggatagccgcggagcatttcacacgaagggctattatgcagctgtggaggcaaaaaaagagagaatgtctaaacacgcccagacctttggcgctaagcagcccacacaccagggcggacccgcacaggacagaggggtctacctgtcactgctcgcttcactacgtaccagggcccagctgccggtagtggtgttcacttttagtagaggtagatgcgacgaacaggcctctgggctcacctctctggacttgactacaagctccgagaaatccgagatccacctgttcctccagcgctgcctggcacgcctgcgcggttctgatagacagctgccacaggtactccacatgtctgaactcttgaaccgcggactgggagttcaccactcagggattcttcctatcctcaaagaaattgttgaaatgctctttagcagaggcctggtcaaagtcctgttcgctacagagacttttgcgatgggggtcaacatgccagcccgaacggtggtatttgatagcatgagaaaacatgacggatctaccttccgggatttgctccccggtgagtacgttcagatggccggacgggctggcagaaggggcttggatccaacaggtactgtgatacttctctgtaagggaagggtaccagagatggccgaccttcacagaatgatgatgggcaagccatcccagttgcaatctcagttccgcctcacctacactatgattctcaatctgttaagggtggacgcactcagagtggaggacatgatgaaacgctctttctccgaattccctagcagaaaggactcaaaggcacacgaacaggccctggcagagcttacgaagcgcctgggcgctctggaagaacctgacatgaccgggcagctggtcgatctgccagagtactactcgtggggggaagaactgactgagacccaacacatgatccagcgcaggattatggagagcgtcaacggactcaaatccctgtcggcagggagggtggtagtggttaaaaatcaagaacaccataacgctctcggcgtcattctgcaagtttcttcaaattccacaagccgtgtttttacaacacttgtgctatgcgacaagcctctgtcacaggacccacaagaccgcggacctgcgacagccgaggtgccttaccctgacgatctggtgggattcaaactcttcttgcccgagggaccatgtgaccacactgtcgtgaaactgcagcccggagatatggccgcaattacaacaaaggttttgcgggtcaacggagaaaagatactggaggatttctccaagcgacagcaaccaaagttcaaaaaggacccgccactggccgctgtgaccacagctgtccaggagctactcagactggcacaggctcatcctgctggacctcccacattagacccagtgaacgatcttcagcttaaggacatgtccgttgtcgaggggggactgagggcaaggaagctcgaagagctgattcaaggcgctcagtgcgttcattcacccaggttccccgcacagtatctaaaactgcgcgagcggatgcaaatacagaaagagatggagcgccttcggtttcttctgtctgatcagagtctactgttactgcctgaataccaccagagagtcgaagttcttagaaccctgggttacgtggacgaggcagggacagtaaaacttgctggacgcgtggcctgcgccatgagttcccatgagttgcttctgacagaactgatgttcgacaatgccttgagtacactgagaccagaggaaatcgcggctttactgtcaggactagtgtgccagtctccaggcgacgccggagatcaactgcctaatacactgaagcaagggattgaacgtgttagggcggtcgcaaaaagaatcggggaggtccaagtcgcttgtggcttgaatcagacagtggaggaattcgtgggcgagctgaacttcggcctggtcgaggtggtttacgagtgggctcgtggcatgccgttctcagaactggcaggcctgagcggcactccggaagggctggtagtcagatgtatccagcgtctggccgaaatgtgtcggtccctgaggggcgcagccaggctagttggagagcccgtgttaggagcaaagatggagacggccgctacactcctaaggagggacattgtgtttgccgcttccctctacacccagtag

SEQ ID NO: 242803 - DNA, 3267 bp, synthetic construct
  misc_feature 1..3267: note = Description of Artificial Sequence: Synthetic coding sequence
  source 1..3267: mol_type = other DNA
atggacgaaccaaccatcactgacctcaatacccgggaggaggctgaggaagagattgactttgaaaaagatctgctgacaatcccccctggattcaagaaggggatggattttgcaccaaaagactgccccacccccgctccagggctactgtccctcagttgtttacttgaacctttggatcttggaggtggcgatgaagatgaaaatgaagccgtcggccagcccggagggccaaggggcgataccgtgtcagcttctccttgctccgcacccctggccagggccagttccctcgaggacctcgtgctgaaagaggccagtactgcagtgagcacgcccgaggcgcctgaacccccttcccaggaacaatgggcaataccagtggacgcaacctcgcctgtcggagacttttaccgattaataccccagcccgcattccagtgggccttcgaacctgacgtctttcagaaacaagctatcctgcacctggaaagacacgattcagtgtttgtggctgctcacacctctgctggcaagacagtcgtcgctgaatacgccatcgccctggcccagaagcatatgacccgcaccatctacacatcaccaattaaagctctgagtaatcaaaagtttcgggactttagaaacacctttggagacgtaggtttgctgacaggggacgtgcaactgcaccccgaagcctcctgtctgattatgaccaccgaaatactacgctctatgctgtatagtggttctgacgtgatacgggacctcgagtgggttatcttcgacgaagtgcattacatcaacgatgtggagcgcggtgtcgtgtgggaggaggtactgattatgctccctgatcacgtgagcattatacttctcagcgccaccgtacccaatgcgctggaattcgcagattggatcgggcgtctgaaacggaggcagatctacgtgatctcgaccgtcacccgccctgtcccactcgaacattacctgtttacggggaattcatccaaaacccaaggggagctctttttgcttttggactctagaggcgctttccataccaagggctactatgctgccgtagaggccaagaaggagcgcatgagcaagcacgcgcagacattcggcgcaaaacaaccaacgcaccaagggggtcccgcacaggacagaggagtgtatctttcactattagcttctctccgtacccgcgcacagctgcctgtcgtggtgttcacattctcaagaggacggtgtgacgaacaagcatccggcctgacttctctggatctgacaacctcctcagaaaagtcagagatccatctgttcctgcagagatgtctggcgaggcttcgaggaagcgaccgccagctgccacaggtactacatatgtccgagctgctcaatcgcggactgggcgttcatcattctggcattctgccaatcctaaaagagatcgtcgaaatgctcttctcccggggactcgtgaaggttctctttgcgaccgaaacatttgcaatgggggtgaatatgcccgctcgaacagtggttttcgactctatgcgaaagcatgatggcagtaccttcagagacctgctccctggtgaatacgtgcagatggccggaagagctggacgccgtggcctggatcccaccggcacagttattttactgtgtaagggtcgggttccagaaatggccgacctccacagaatgatgatggggaagccaagccagttacagtcccaattcagactgacatacacgatgattctcaacctcctccgagtggacgccctcagagtggaggacatgatgaagcggtcattcagtgaattcccgtcaaggaaggacagcaaggcgcacgaacaggcgcttgctgagctcaccaaaaggcttggtgcacttgaggaacccgacatgactgggcagctggttgacttgcccgaatactatagttggggagaggagctcacagagacccaacacatgatccaacgcaggattatggagtcagtcaacggcctgaaatccctgtccgccggacgggttgtcgtcgtcaaaaatcaagagcaccacaacgcattgggcgtgatactgcaggtcagcagcaattcgacatcccgagtgtttacaaccctcgtgctgtgtgataaaccactttctcaggacccacaggatcgaggccctgccactgccgaagttccataccctgacgacttggttggctttaagctttttttgcctgagggcccatgcgatcatacagtggtcaagctgcagcctggcgacatggccgcaattaccaccaaggtcctcagggtgaatggcgagaagatactcgaagatttttcaaagcggcagcagccaaagttcaaaaaggacccccctctagctgccgtgacgactgctgtgcaggagctgcttcggctagcccaggctcaccccgcagggccacccaccctcgaccctgtgaacgatctgcagctgaaagacatgagtgttgtggagggtggactgagagcgcgaaagctggaggaattaatccaaggagcccagtgcgtgcactctccacgctttccagcccagtatctcaagctgcgcgagcggatgcagatacaaaaagagatggaaaggttgcgatttttgctttcagatcagagtctgttactgctgcctgagtaccatcagcgcgtcgaggttctccgtacgctgggatatgtcgatgaggccggaacagtcaaactggctggtagggtagcatgcgccatgtctagccatgaattgctactgaccgaacttatgttcgacaacgccttatcgactctccggccagaggagatcgccgctttgttaagtggtttagtctgtcagtcccctggcgatgctggcgatcaactgccaaatacactgaagcaggggattgagcgggtccgggctgtcgccaaacggatcggagaagtgcaggttgcctgtggactcaaccagacagtcgaggaattcgttggcgagctcaactttggactggtagaggttgtttacgaatgggccagagggatgccattcagcgagctggccggactgtccgggactccggaaggcctggtagtgcgttgtatccagcgattagccgagatgtgccggtccctaagaggcgctgccaggctggtaggcgagcctgtgctgggcgctaagatggagacagcggctaccctactgaggagggatatagtgttcgccgcatctctctacacccaatag

SEQ ID NO: 242804 - DNA, 693 bp, synthetic construct
  misc_feature 1..693: note = Description of Artificial Sequence: Synthetic coding sequence
  source 1..693: mol_type = other DNA
atgatggagacagagcgccttgtgctgccccctcccgacccactcgatttacccctcagagccgtggagctgggctgtactggacattgggaacttctcaatcttcctggagcgccagaaagctcattgcctcatgggcttcctccatgcgctcccgatctgcagcaagaagcagagcaactgttcctgagcagccctgcctggctcccactgcatggcgtggaacacagcgccaggaagtggcagcgcaaaactgacccttggtctctcctggctgtgctgggcgcacctgttccatctgacctgcaggcacagaggcatcccactacagggcagatactcgggtacaaggaggttctgctcgagaacactaatttaagcgctacgacctccctctctctgcgacggccacctggtcccgcatctcaaagtctgtggggaaacccaacacagtacccattctggccagggggaatggacgagcctacaataaccgatcttaatacaagggaggaggcagaggaggagattgactttgaaaaagacctgctcacaatccctccgggatttaagaagggcatggactttgcgccaaagggaagcgtgcactcttgcatccacccgcgaggacctagagcctccatcagcggagcagttgggcatccctgtggacgtcacttaccctgctggtag

SEQ ID NO: 242805 - DNA, 3267 bp, synthetic construct
  misc_feature 1..3267: note = Description of Artificial Sequence: Synthetic coding sequence
  source 1..3267: mol_type = other DNA
atggacgaacctacaatcacagacttgaacacacgggaggaagctgaggaagagatcgatttcgagaaagacctcctgaccattccacctggattcaaaaagggaatggactttgcacctaaagactgtcctactcccgctcccggactgctatctctttcgtgcatgctcgagcccttggatctcggtggaggggatgaagacgagaacgaggctgtgggccagccgggaggcccaaggggagataccgtgtctgcatccccatgcagcgcccctctggccagggcctcatccctggaagacctcgttctgaaagaggcatccaccgctgtgtcaacacctgaagcaccagagcccccatctcaggaacaatgggccatcccggtagacgcaacgtcaccagtgggtgatttctacaggctcattccacagcccgctttccaatgggcttttgagccagacgtcttccagaaacaggccatcctgcacttggaacggcacgactccgtcttcgtggctgctcatacttccgccggaaagactgttgtagccgagtatgctattgccctcgcccaaaagcatatgacccggaccatctacaccagtcctattaaggcactgtccaaccagaaatttcgcgactttcggaacaccttcggggacgtgggccttcttactggggacgtgcagcttcaccccgaggcatcttgcctgattatgactaccgagattttgaggtctatgttgtattccggatcagacgtaatccgcgacctggagtgggtgatcttcgacgaggtgcattatataaatgatgtggaacggggagtagtgtgggaagaagtactgattatgctccctgatcacgtgtccataatcctgctatcagccacagtgccaaatgccttggaattcgccgattggattggcagactcaagcgcagacaaatatatgtgatttccacggtgacccgaccggtgccgctcgaacactacctctttacaggcaactcttctaagactcagggggaactctttctgctgctcgactctagaggggctttccatacaaaagggtactacgccgcagtggaagcaaaaaaagaacgtatgtcaaagcatgctcagactttcggagcaaagcagcctacgcaccagggtggaccggcacaggacagaggagtctatttgagcctgttagctagcctgcgcacacgggctcagctccccgtcgtcgtgttcacctttagccggggacggtgcgatgaacaggccagcgggctcacgtccctagatttgaccacctcatcagagaagagtgagattcatctgtttctacaaagatgtctggcaaggctgcggggatccgatcgtcaactcccacaggtactgcacatgagtgagctcctcaaccggggtctgggtgttcaccacagcggcatcctacccatcctgaaagagatagtggagatgctgttcagtaggggattagtgaaagttctctttgctactgaaacgtttgcgatgggtgtcaatatgcccgctcgaacggttgtgttcgatagtatgcgcaagcacgacggatctacattccgagacctactgcctggtgaatacgtgcagatggccggaagagccggacgtcggggtcttgaccctaccgggaccgtaatcttgttgtgtaaaggccgtgttcccgagatggccgacctacatcgcatgatgatgggcaaaccgtcccagctacagagccagttccgcctgacttacaccatgatcttaaacctgctccgggttgacgcactgcgggtggaagatatgatgaagcgatctttctcagaatttccctctcggaaagattctaaagcccatgaacaggccctggccgaactgaccaaacgattgggggcactcgaagagccagatatgacaggacagcttgttgatctgccagagtactactcttggggggaagaactaacggaaacacagcacatgatccaaagacggattatggagtctgtaaatggccttaagtccttgtccgcaggtagagtcgtcgtagtgaagaatcaagaacatcataacgcgctgggagttatactccaagtctccagtaattccacctctcgagtgttcacaaccttagtattgtgcgacaaaccgctgagtcaggatccgcaggatcgcggacccgctacggctgaggttccatatcccgatgatttggtcgggttcaaactgtttctcccagagggtccatgtgaccacacagtcgtcaaactgcagcccggtgacatggccgcaattactacaaaagttcttcgcgttaacggagaaaaaatccttgaggacttcagtaaaagacaacagccaaaattcaaaaaggaccccccactggccgctgtgaccacagccgtgcaggagctactgagattagcccaggcccaccccgcaggaccccctactctggatcctgtcaacgatttgcagctaaaggatatgtcggtggtcgagggcggtctacgcgctagaaagctggaggagttgatccagggtgctcaatgcgtccatagccccagatttccggcacaatatctgaaactgcgcgaacggatgcagatccagaaagaaatggagagacttcggtttctcctttcagaccagtcattactccttctcccagaataccatcagagagtggaggtgctgcggacgttaggatacgtggacgaagccggaaccgtcaagctcgcagggagggtggcttgtgccatgtcctcacatgagcttttgctgactgagctcatgtttgacaatgccctgagcacattacgtccagaagagattgctgcccttctgtccggcctcgtgtgtcagtctcccggtgacgccggagaccagctgcccaatactttaaaacaaggtatagagcgtgtccgggctgttgcaaaacgaataggagaggttcaagttgcatgcgggttgaaccaaacggtcgaggagttcgttggcgaactgaatttcggattagtggaagtggtatatgagtgggcccgagggatgcctttctcggaattggccggtctctcagggacaccagagggcctggttgttcgctgcattcaacgactagccgagatgtgtcgatcactccggggagccgcacgcctggtgggggagcccgtgctgggagctaagatggaaactgccgcaaccctcttaaggagggatatcgtatttgcagcctctctctatacccagtag

SEQ ID NO: 242806 - DNA, 693 bp, synthetic construct
  misc_feature 1..693: note = Description of Artificial Sequence: Synthetic coding sequence
  source 1..693: mol_type = other DNA
atgatggagacggagcgcttagtgcttccaccaccggatcccctggacctgccacttagagctgtggagctcggttgcaccggccactgggagctgcttaacttacccggtgcaccagaaagcagtttaccacacggtctgccaccctgtgccccagacttacagcaggaggcagagcagctgtttctgagttctccggcttggctccccctgcatggcgtagaacattcagcccgtaagtggcaacgcaaaacggatccctggagcttgctcgccgttctgggggcacccgtaccatctgaccttcaggcccagcggcatcctacgaccggccagatcctcgggtacaaggaagtgttactagagaacacaaacctgtctgccacaacctctttatccctacggaggccaccgggacccgcttcgcaatcactgtgggggaatccaacgcaataccccttctggcccggaggcatggatgagccgactatcacagacctgaacacacgggaagaggccgaagaggagatcgatttcgagaaagaccttttgacaattccccctggctttaaaaaggggatggattttgccccaaagggatcggttcatagctgcattcacccaagaggccctagagcctccatctctggagccgtcggacatccttgcgggaggcatctcccatgctggtag

SEQ ID NO: 242807 - DNA, 2643 bp, synthetic construct
  misc_feature 1..2643: note = Description of Artificial Sequence: Synthetic coding sequence
  source 1..2643: mol_type = other DNA
atgatggaaaccgaaaggcttgtactccctccaccggatcctctggatcttcctttgcgggcagtcgagctcggttgtacaggccattgggagctcctgaatttacccggtgctccagaatcatcactcccccacggattacccccttgtgcacccgacctgcagcaggaggctgagcagctgtttctgagttcccccgcatggctgccactgcacggcgtcgagcactctgcacggaagtggcagcgaaagaccgatccatggagcctgttggctgtcttaggagcccctgtaccttcggatctgcaagcccagcgtcatccaaccacgggccagatactcgggtacaaagaggtgctgttagagcactacctgttcaccggcaattccagcaagacgcagggcgaactctttctccttttggattctaggggagctttccatacaaaaggttactatgcggctgtcgaagcaaagaaagagcgcatgtccaagcacgcccaaacattcggcgcaaaacagcccacgcatcaggggggtcctgctcaggaccgaggcgtgtatttgagtctgctggcgagcctgagaaccagggcacagttgcctgtggtggtgttcactttttcaagggggaggtgcgacgagcaggcttccggattaacctcccttgacctgaccacatccagtgaaaagagcgaaattcatctttttttgcagcgatgcctcgcgaggctcaggggcagcgaccggcagctgccacaagtcctccacatgtcggagctgctaaacagaggccttggagtgcaccatagcggaatattgcccattctcaaagaaatcgtcgaaatgttgttttctcgaggtctggtgaaagtcctgtttgccaccgaaactttcgccatgggggtgaacatgccagcacgcactgtcgtgttcgacagcatgcggaagcatgatggctctactttcagggatctacttcctggagagtatgtgcagatggctggtcgcgcaggacggagaggactggacccaaccggtacagtgattctcctttgcaagggtcgtgtgccagaaatggcagatttgcatcgaatgatgatgggcaagccctcccagctgcagagccaattccggttaacgtataccatgatactgaacctgctgagggtggacgctctgagagttgaggacatgatgaaacggagcttctcggagttccctagccggaaggactctaaggctcacgagcaagcactggctgagttgaccaagcgccttggtgcactggaggagcccgacatgacggggcaactggtggacctgcccgaatactacagctggggcgaggaactgactgaaacccagcacatgatccagcgcaggatcatggaaagcgtcaatggtctgaagtccctgtccgccggaagagtggtcgtggttaagaaccaggagcaccataatgcactgggtgtgatcctgcaagtgtcctctaactcaacatcacgtgtgttcaccacccttgtcctgtgcgacaaacccctatcccaggatccacaggatcgcggaccggctactgcagaggttccataccctgacgatctggttggattcaaactgttcctccccgagggcccatgtgatcacactgtagtcaaactccagcccggagacatggctgccatcaccactaaggtcttaagagtcaacggggaaaaaattctcgaagatttcagcaaaaggcagcagccaaagttcaaaaaagaccctccactcgctgctgtgactaccgcagtgcaggagctgctacgtttagcgcaggcacacccagccggaccgcctacgttagatcccgtcaatgatctacaactcaaggatatgagtgtggtcgaagggggacttagggctcgaaagcttgaggaactgatccagggcgcacagtgcgtccactcgcctcggtttcctgcgcaatatttgaaactgcgggaaaggatgcagatacagaaggagatggagaggttgcggtttctgttgtccgaccaaagcctgttgctgcttcccgagtatcaccaacgggtcgaagtgctgagaacacttggatatgttgatgaggctggcaccgtgaaactcgccggacgggttgcctgtgctatgagcagccacgaactgctgctcactgaattaatgtttgacaatgctctgtctacgctgaggcccgaggagattgccgcactcctgagcggcttagtgtgccaaagccccggagatgccggtgaccagctccctaatacccttaagcagggcattgagagagtgcgggctgttgcaaagcgaattggggaagttcaggtggcctgtggattgaaccaaacagttgaagagtttgtaggcgagctgaattttggattggtcgaagtcgtctacgagtgggccagaggcatgccattctccgagctggcgggtctttcagggacgccagagggcctggtcgtgcggtgcatacaaaggttggcggaaatgtgccgttcacttaggggcgcagcaaggctggtgggagagcccgtactgggagcaaagatggagacagccgctaccctgctacgcagggatattgtcttcgcggcatctctctatacccaatag

SEQ ID NO: 242808 - DNA, 693 bp, synthetic construct
  misc_feature 1..693: note = Description of Artificial Sequence: Synthetic coding sequence
  source 1..693: mol_type = other DNA
atgatggagactgagcgattggtcctgccgccaccagacccactggatttgcctttaagagccgtcgagctgggatgtacggggcattgggagctcctcaacctgcctggagctcccgaaagttctctcccccacgggctgcctccttgtgccccagatctccagcaggaggctgagcagcttttcttatctagccccgcttggcttcccctccacggggtcgagcactctgcaaggaaatggcaacggaaaacagacccatggagtctgctggctgtccttggggcaccagtgcccagtgacctgcaggcacagcgccaccccaccacaggacaaatccttggatacaaggaggtgcttctggagaatactaatctaagtgctaccacatctctaagccttcggagacccccagggccagcgagtcagagcttgtggggcaaccctacccagtatcccttttggcctggaggaatggacgagcctactatcacggatcttaacacacgcgaagaggccgaggaggagatcgatttcgagaaagacctgctaacaatccccccaggcttcaagaaaggaatggatttcgccccaaaaggctccgttcatagctgcattcaccctagggggccaagggcctcgatttctggcgctgtaggccacccctgtgggagacatctgccttgttggtag

SEQ ID NO: 242809 - DNA, 3162 bp, synthetic construct
  misc_feature 1..3162: note = Description of Artificial Sequence: Synthetic coding sequence
  source 1..3162: mol_type = other DNA
atggactttgcacctaaagactgtcccacgccagctcctggcttgctgtctttgtcatgtctgttagagccactggatctcggaggaggtgacgaagacgaaaacgaagctgtaggccagccgggaggtcctaggggtgacaccgtatccgcgagtccttgtagcgccccattggcaagggcctcaagcctggaggacctggtgctgaaggaggcatccactgcagtttctacgccggaggcacccgagcctcctagccaagagcagtgggcaattcccgttgacgctacctccccagtgggcgacttctatcgcctcatcccacagcccgcttttcagtgggcattcgagcccgatgtgtttcagaagcaggccatcctgcatctggaacggcacgattctgtcttcgtcgcagctcacacttccgcgggaaaaactgtggtggccgaatacgccatcgctctggcccagaagcacatgactcggactatctacaccagtcccatcaaggctctctcaaaccagaaatttcgtgattttcggaacaccttcggcgatgttggactactgacaggggacgttcagctccaccccgaggcttcatgtcttattatgactaccgaaatcctacgcagcatgctctacagcgggagcgatgtgattcgtgacttagagtgggtgatttttgacgaggtgcactatatcaacgatgtcgagcggggagtcgtctgggaagaagttcttattatgctgcctgaccacgtgtcaattatcctgttgagtgccaccgtgcccaatgccctggagttcgcagactggatcgggcgactcaagcggagacagatctatgtcatttccacagtcaccaggcctgttccacttgagcattacctgtttaccgggaattctagcaaaacccagggagaactgtttctgctgcttgatagccggggagcctttcacactaaaggctattatgctgccgtggaagccaaaaaagagaggatgtcaaaacacgctcagacgttcggagctaaacagcccacgcaccaaggcggaccagcacaggaccggggagtgtacctcagtcttctcgcttcccttagaaccagagctcagcttcctgtcgtagtattcacgttctcaaggggcagatgtgacgaacaggcctctggactgacatctcttgaccttacaacctcatcggagaaatccgagatccacctcttcctgcaaagatgcctagcacggcttcggggttccgaccgccagctaccccaggtacttcatatgtctgagttgctaaataggggtctgggcgtgcaccactccggaatacttcccatcctcaaggagattgtcgaaatgttattctcgagaggccttgtcaaggttctcttcgccaccgaaacttttgcaatgggagtcaacatgcccgcacggactgtggtgttcgattccatgcggaaacacgatggctcaacatttcgggatctcctccccggagaatacgtgcaaatggccggaagggcaggtcgcagggggttggaccctaccggtacagtgattttgctgtgtaagggacgggtgcctgaaatggcagacctgcacaggatgatgatgggcaaaccgtcacagctgcagtcccagtttagattgacatacacaatgattttgaaccttctcagggttgatgcccttagggtggaagacatgatgaaaagatccttttctgagttcccatccaggaaagatagcaaggcccacgaacaagctttagccgagctgactaaacgtctgggagccctggaagagcctgatatgaccggacagcttgtggatcttccagagtactattcctggggggaggagctcacagaaacacagcacatgatccagaggagaattatggagagtgtgaatggcttgaaaagcctgagcgctggtcgggtggtcgtcgtcaagaaccaggaacatcacaacgctttgggagtgatcctgcaagtgagttccaatagcacctcacgggtttttactactctggttctgtgcgataaacccttgagccaggacccacaagaccggggacctgccaccgcagaggtgccctacccagacgacctggtaggatttaaattgtttctacccgagggcccttgtgatcacacagtggtgaaactccagcccggagacatggcagctataacaactaaagtattaagagttaatggcgaaaaaatcctggaggatttctccaaacgccagcagccaaaatttaagaaggatccccctctcgctgctgtgactacagcagtgcaggagttgctgagactggcacaggcccaccccgctggcccacccaccctcgatcccgtcaacgacctgcaactcaaagacatgagcgtggtggagggaggcctgagggccagaaagttggaggaactgatccaaggagcccagtgtgtacatagtcctaggtttcctgcccagtacctcaaacttcgggagcgaatgcaaatccagaaggagatggaacggttgaggttcctgctctcggaccaatctctcctgctgctacctgagtatcaccaacgcgtcgaggtactgcgcacacttggctatgtggatgaagccggtacggtcaagctcgcgggtagagtcgcctgtgctatgagcagccacgagttactgctgaccgagttgatgtttgacaacgcactaagcacattgcgcccagaggaaatcgccgctctactatcgggtttggtctgtcagtctcctggtgatgcaggcgaccaattacccaatacactgaaacagggaatagaacgtgtgagagccgttgccaagcgcatcggggaggtacaagtggcatgcggtctcaaccagactgtggaagagttcgtcggggagttgaacttcgggctggtggaggttgtatacgagtgggcccgaggcatgccattttcggagctcgctggactgagcggcacccctgagggattggtcgttaggtgcatccaacgactcgccgagatgtgccggtctcttcgcggagccgcacgcctggtaggcgagcctgtgctgggcgctaagatggagaccgctgctaccctcctgagaagagatattgtttttgctgcctctctgtatacccagtag

SEQ ID NO: 242810 - DNA, 3162 bp, synthetic construct
  misc_feature 1..3162: note = Description of Artificial Sequence: Synthetic coding sequence
  source 1..3162: mol_type = other DNA
atggattttgcaccaaaggactgcccaacccctgctcctggtctgttaagcctgtcctgcttgttagaaccacttgacctggggggaggggatgaggacgagaacgaagcagttggccagcccggaggcccaagaggggacaccgtctccgccagcccgtgctcagctcctcttgctcgcgcaagcagcctcgaggaccttgtattgaaggaggcctccacagccgtttcgacccctgaggcaccagagccgccaagccaagaacagtgggccatcccggtggatgcaacatcccccgtcggcgatttttaccgactgattccgcaaccagcatttcagtgggccttcgaaccggatgtgttccagaagcaagccatcttacacttggagcggcacgactccgtttttgtggcagcccacaccagtgctggaaagacggtggtggcagaatatgcaatcgccctcgcccagaaacacatgactagaaccatctacacctcgcccatcaaggccctgtccaaccagaaatttcgcgacttcagaaatacattcggggatgtgggcctcctgaccggagatgttcagttgcatcccgaagccagctgtctgattatgaccacagagatcctgcgtagcatgctctatagcggatcagatgtcattcgcgatctcgaatgggtcatctttgacgaagtgcactacataaatgatgttgagcgcggtgtcgtctgggaggaggttcttatcatgctgcccgatcatgtgagtataatattgctcagtgctacagtgccaaacgcccttgagttcgccgactggattggcaggctgaagcgtcggcaaatatacgtgatttcaaccgtgaccaggcctgtaccactggagcactacctcttcaccggcaatagcagtaagacacagggtgagctgttcttgcttctggatagtaggggagcattccataccaaaggctactatgccgcagtcgaggcaaagaaggaacggatgtctaaacacgctcagaccttcggggcaaaacagcccacccatcagggcggtcctgctcaagacaggggagtctatttatccctcttagcatccctcagaactcgcgctcagctgcctgtcgttgtttttaccttttcgcgcggtagatgtgatgaacaggcttccgggctaacttcacttgaccttacgactagcagcgagaagtccgaaatacatctattcctgcaaagatgtctggccagacttaggggctctgaccgccaactgccccaagtgcttcatatgtcggaactccttaataggggattaggcgtgcatcatagtggaattttacccatcctcaaagaaatcgtcgagatgctgttttccaggggcttggtcaaggtgctgttcgctactgagacattcgccatgggcgtcaacatgcctgccagaacggtggtgtttgactcgatgcgaaagcacgacggcagtacatttagggacctcctgccaggggagtatgtgcaaatggctggcagggcgggaaggagagggctcgaccccaccgggacagtgatactgttatgcaagggaagagtgccggagatggcagacttacatagaatgatgatgggaaagccaagccagttgcagagccagttccgcctgacgtacacaatgatactcaacttgctgcgcgtagacgctttgagagtcgaggacatgatgaagaggtctttcagcgagtttcccagcaggaaagactccaaggcacacgaacaggcattagccgaacttactaagaggcttggcgcattagaggagccagatatgactggacaactagtagacttgcccgaatactacagttggggagaggagttgacggaaacccagcacatgattcagagaagaattatggaaagtgtgaatggtctgaagagtctctctgcgggaagagttgtggtcgtgaaaaatcaggaacaccataatgccctcggtgttattctgcaggtgagctccaacagtacatcccgggtttttaccaccttggtcctttgcgataagccactttctcaggatccacaggacaggggaccagccaccgctgaggtcccctaccccgacgacctggtggggtttaagttgtttctccctgaaggcccatgcgatcatacggtggtgaagcttcagcctggcgacatggctgctattaccactaaggtccttagagtcaacggcgagaagatactcgaggatttctctaagaggcagcagcctaaattcaagaaagatcccccactggcggcagtcacaacagccgtccaggaactgctgaggttagcacaggctcaccccgctgggcctcccaccctggaccctgtgaacgacttacaacttaaagatatgagcgtggtggaggggggattaagggctaggaaactagaagaactgattcagggagcccaatgcgttcatagccccagattccccgctcagtacctgaagctgagggagcgcatgcagatccagaaagagatggagaggctgcggttcctgctgtccgaccagagtctcctcttacttcccgagtaccaccagagggttgaggtgttaagaaccctcggctacgttgacgaggctgggacagtcaaattagctgggagggttgcttgcgctatgagttcgcacgagttgttgctcaccgaactgatgtttgataacgctttgtctactttgcgccctgaagaaatcgccgcattactgtccggactggtctgtcagagcccaggggatgccggagaccagctgcccaatactcttaaacaggggatcgagagagtgagggccgtagccaaacgtattggtgaagtccaggtcgcctgcggcctgaaccagactgtcgaggaattcgtcggtgaattgaacttcgggttagttgaagtcgtctatgaatgggcacggggaatgccctttagcgagctcgccggtctgagcggcactccagagggtctcgtggtgagatgcattcagagactcgccgaaatgtgccgctctctgcggggtgctgctaggctagtgggtgagcctgttctaggcgcaaagatggaaactgcagcaacacttctgcgcagggatatcgtctttgcagccagcctgtatacacagtag

SEQ ID NO: 242811 - DNA, 3162 bp, synthetic construct
  misc_feature 1..3162: note = Description of Artificial Sequence: Synthetic coding sequence
  source 1..3162: mol_type = other DNA
atggacttcgcacccaaggactgcccaaccccagcccctggactccttagtctgtcatgtctcctggagccactggatctcggcggaggcgatgaagacgaaaacgaggctgttggccaacccggaggcccacgaggcgatactgtttcagccagcccttgctccgctccactggcaagggccagttcactggaggacttagtcctcaaggaggctagcactgcggtcagtacccctgaagctccagagccgccttctcaggagcaatgggctattcccgtggatgccacatccccggtcggcgatttttaccggctgatccctcagccggctttccagtgggcctttgaacccgatgtgtttcaaaagcaggccattctgcaccttgagcgccatgactcagtattcgtagctgcccacacctccgctggcaagaccgttgtggccgaatatgcgatcgcattagctcagaagcatatgacaagaactatttacacatcacccattaaagctctgagtaaccaaaaattcagggactttcgcaacacctttggggacgtggggctgctcaccggggatgttcagctgcatcccgaggctagttgccttatcatgacaaccgagattttgagatccatgctatattccgggtccgacgttattagggatctagagtgggtgatatttgatgaagttcattatataaacgacgtagaaaggggagtcgtgtgggaagaggtcctgatcatgctgcccgatcatgtgagtatcatactgctgtctgctactgtgcctaacgcactggaattcgctgattggatcggtcgccttaagcgaaggcagatatacgtcatttcgacggtcaccagaccagtgcctctggagcactacctgttcaccggcaacagttctaagacccagggcgagttgtttttgctgctggacagcagaggagccttccatactaaggggtactacgcagcggtggaggctaaaaaggagcggatgtcgaagcatgcccagacattcggggcaaagcagcctactcaccaggggggacccgctcaggatcgcggagtgtacttgtcactcttggctagtctgcggactcgtgctcagcttcctgtggtcgtcttcacatttagtcgaggtcgctgtgatgagcaagcaagtggactcacatctttagacctcactactagttctgagaagagtgaaatacatctgttcttgcagcggtgccttgccagattacgcggaagtgatcgtcagctccctcaagtgctccatatgtcagagcttttgaacagaggtcttggagtccaccattccgggattcttcccatcctcaaggagattgtggaaatgctttttagcagaggactggtgaaagttctgttcgccacagaaacatttgctatgggtgtaaatatgccggcaaggaccgtggtgttcgatagtatgagaaagcacgacggatcaacatttcgggacctcctgccaggggaatatgtccagatggcaggtcgggcaggcagacgaggcttagatccaactggcaccgtgatcctgctttgcaaaggcagagtgcccgagatggcagatctgcaccggatgatgatgggcaaaccttcccaactgcagtctcaatttaggctgacatacacgatgatattgaacttattgagagtcgatgccctccgcgtggaggatatgatgaaacgctcatttagcgagtttcctagtcgcaaagactcaaaggcccatgaacaggccctcgcagagctgacaaaacgcctaggcgcactggaagagccagacatgactgggcagctggtcgacttgccggagtattatagttggggagaggagctcactgaaacacagcacatgatccagagacgaatcatggaatctgtgaatggactaaagtccctttctgctggacgggtcgtggtcgtgaagaatcaagaacatcacaacgcactgggtgtgattttacaagtatcatctaattccacctctagggtgtttactacactggtactctgcgacaagccactgagccaggatccccaggaccggggtccagcgactgcggaggtgccttaccccgacgacctggtggggttcaagctctttttgcctgagggaccctgcgatcacaccgtggtaaaactccagcccggagatatggcagccattaccactaaggttctacgggttaatggcgagaagatcttggaggattttagtaaacgccagcagccgaagtttaagaaggatccccctctggcggctgtaaccacggctgtgcaggagttgctgagactggcacaggcacacccagcgggtccacctaccctggaccccgtgaatgacctgcagttaaaggacatgagtgtcgtggagggagggctgcgcgctaggaaactcgaagagctgatacagggggcacagtgtgtacattcaccaaggtttcccgctcagtatctcaaattgcgagagagaatgcagatccagaaagagatggagagattgaggttcctcctgtccgaccagtcactgctgctgctgcccgagtatcatcagcgcgtagaggtcttgcgaacactgggttatgttgatgaggcgggtaccgtgaaactggcaggcagggtggcgtgcgccatgagctctcacgagctgttactcaccgagcttatgtttgacaacgctctcagtaccctaagacctgaagagattgcggcattgcttagtgggctcgtctgtcagtctcccggtgatgcgggagaccaactcccgaatactctcaagcagggtatcgaacgagtgcgggctgtcgctaagcgcatcggagaagtccaagtagcatgtggactcaaccagaccgtggaagagtttgtgggcgaactaaactttggcttggtggaggtggtttacgaatgggcaaggggaatgcctttcagtgagttagcagggctcagcgggacccctgaaggcttagtagtacgctgcatacagagactcgccgagatgtgtaggagccttcggggagccgctcggttggtaggggagccagttctcggcgctaagatggaaaccgccgcaacactgctccgaagagatatcgtttttgctgctagtctctatacccagtag

SEQ ID NO: 242812 - DNA, 465 bp, synthetic construct
  misc_feature 1..465: note = Description of Artificial Sequence: Synthetic coding sequence
  source 1..465: mol_type = other DNA
atggcaaccaaggcagtgtgtgttttgaagggcgatggtccagtccaaggcatcattaacttcgaacaaaaagaatcaaatggcccagttaaagtctgggggagcattaagggcttaacggaggggcttcacgggttccacgtacatgagttcggagataacacagcagggtgtacatccgcgggtccccatttcaaccctctgagtcgtaaacacggaggcccaaaagacgaggagaggcatgttggtgacttagggaatgttacagcagataaggacggtgtggccgatgtcagtatcgaggattcggtgatttctctttctggtgaccactgcatcatcggcagaactctagttgtgcacgagaaagctgacgacctcggcaaaggagggaatgaggaatctactaagactgggaacgcgggttcccgtctggcctgtggcgttatcggcattgctcaatag

SEQ ID NO: 242813 - DNA, 108 bp, synthetic construct
  misc_feature 1..108: note = Description of Artificial Sequence: Synthetic coding sequence
  source 1..108: mol_type = other DNA
atggctacaaaggctgtatgtgtcctcaaaggagacggccctgtccagggcatcattaactttgaacagaaagagagtaacggacccgaaggggtaggtaaacactag

SEQ ID NO: 242814 - DNA, 1074 bp, synthetic construct
  misc_feature 1..1074: note = Description of Artificial Sequence: Synthetic coding sequence
  source 1..1074: mol_type = other DNA
atggattcagtcgagaagaccaccaaccggagcgaacagaagagccgcaaattcttaaaaagcctgatcagaaagcagccccaggaactactgctcgttatcggaactggagtgagtgccgcagttgccccagggatccctgccctgtgttcctggagatcttgtattgaggcagtgattgaggctgcggaacaactggaagtacttcaccccggtgacgtggctgagttccggaggaaagtcacgaaagaccgtgatcttctagtggtcgcccacgatttaatccgcaaaatgagtccaagaactggagatgcgaaacccagctttttccaagattgcctcatggaggtttttgacgacctggagcaacacatccggtcacctgttgtgctacagtcaatcttgagcttgatggataggggtgctatggtgttgacaacgaactacgataatttgttggaggcctttggtagaagacagaacaagccgatggaaagtctggatctgaaggacaagacaaaggtgttggagtgggctagagggcacatgaagtatggagtcctacacatccatggactttacacggatccttgcggggttgtactggatccaagtggttacaaagacgtgacccaggacgctgaggtgatggaggtgctgcagaacctgtacaggacaaaatcattccttttcgtggggtgcggcgagacgctgagggatcagattttccaggcccttttcctttattccgtgcctaacaaagtggacctcgagcattatatgttggtattgaaagaaaacgaagatcacttcttcaagcaccaagcagacatgcttctgcacgggatcaaggtggtgtcttacggcgattgcttcgaccattttcccggttacgtgcaggatctggccacacaaatctgcaagcaacaatccccagacgctgatcgggtggactcaaccactctcttgggcaacgcctgccaggactgcgccaaacgaaagctcgaagaaaacggtatagaagtgtctaaaaagcgtacgcagagtgacaccgatgacgccggaggtagttag

SEQ ID NO: 242815 - DNA, 636 bp, synthetic construct
  misc_feature 1..636: note = Description of Artificial Sequence: Synthetic coding sequence
  source 1..636: mol_type = other DNA
atggacccacggaaggtcaatgaattaagggcttttgtgaaaatgtgcaaacaggatccgtccgtgctacataccgaggaaatgcgtttccttagagagtgggtggagtccatggggggtaaggtcccacctgctacgcagaaggcaaagtcagaagaaaacaccaaggaggagaagcccgactctaagaaggtggaagaggacctgaaagccgatgaaccttccagtgaggaaagtgacctcgaaatcgataaagagggagtgattgagccggacactgacgccccacaggaaatgggtgacgagaacgctgagataaccgaagagatgatggaccaggccaacgacaagaaagtggccgctatcgaggcgctaaacgatggtgagcttcagaaggccattgacctctttacggatgcgattaaactgaaccccaggctggctatactgtacgccaaaagagcatcggtgtttgtcaagctgcagaagccgaacgccgcaattagagattgtgatagagccatagaaatcaacccagactccgcccagccctataagtggaggggaaaggcccacaggctgcttggacactgggaagaggccgcacacgatctggcgttggcatggacccagtag

SEQ ID NO: 242816 - DNA, 489 bp, synthetic construct
  misc_feature 1..489: note = Description of Artificial Sequence: Synthetic coding sequence
  source 1..489: mol_type = other DNA
atgggaggcaaggtcccccctgctacccaaaaggctaagtcagaggagaacactaaggaggagaaaccggattctaaaaaggtggaggaggaccttaaggcagacgaaccaagcagcgaggagtcagacctggaaattgacaaagaaggtgttattgagccggatacagatgctccccaagaaatgggcgatgagaatgcagagataacagaggagatgatggatcaggccaacgataaaaaggtcgctgcgatagaggccctgaacgacggggagctccagaaggccatcgacctcttcaccgatgctattaaactgaatccgagactggccatcctctacgccaagagggcaagcgtattcgttaaattgcagaagcctaatgctgctatccgtgattgtgatagggccatagagataaatccagatagcgcccagccttataagtggagagggaaggcacaccgcctgctggggcactgggaatag

SEQ ID NO: 242817 - DNA, 366 bp, synthetic construct
  misc_feature 1..366: note = Description of Artificial Sequence: Synthetic coding sequence
  source 1..366: mol_type = other DNA
atggatccaaggaaagttaatgagctccgggcttttgtgaaaatgtgcaagcaggatccctctgtactgcacacggaagagatgagatttctacgggagtgggtggagtccatgggcggaaaagtgccaccagctactcaaaaagccaagagcgaagaaaacaccaaggaggagaaaccagacagcaaaaaagtggaagaagatctgaaggccgatgagccgtcttcagaggagtcggaccttgaaattgataaagaaggcgtaattgaaccggatacagatgccccacaggaaatgggagatgagaacgcagagatcaccgaagagatgatggaccaagccaacgacaagagtgggtgttattag

SEQ ID NO: 242818 - DNA, 2568 bp, synthetic construct
  misc_feature 1..2568: note = Description of Artificial Sequence: Synthetic coding sequence
  source 1..2568: mol_type = other DNA
atgggttctgatcgggctcgcaaggggggtggcggtcccaaagacttcggagccggactgaagtacaattctcggcacgagaaagtcaacgggctcgaggagggggttgagttcttaccggtgaacaatgtgaagaaggtggaaaaacatggccctggacgttgggtggtgctggctgctgtcctcattggcctcctgctcgtgttgctagggattggattcctggtttggcatctgcagtatcgggatgtgcgggttcagaaagtctttaacggatacatgcggattacgaatgagaactttgtggatgcttatgagaacagtaatagcactgagttcgtcagtctggcctccaaagttaaagacgctctgaagctgttgtattcgggcgtcccattcttgggaccgtaccacaaggagagcgccgtgaccgctttctcagagggtagtgtgatcgcatactactggagtgagttctctataccacagcatctggttgaggaggcagaaagagtaatggccgaggagagggtggtcatgctccctcctcgcgcacggagtctgaaatcattcgtcgtgacctctgtcgtggctttccccaccgacagcaagacagttcagcggactcaggacaactcttgttcttttggcctgcacgctcgaggggtggaactcatgcgctttaccactcctggctttcccgattccccttatcccgcacacgcacgctgccagtgggctttgcggggagatgccgattctgttttgtccctgactttcaggtctttcgacctcgcctcctgcgacgagcggggaagtgatctggtgaccgtttataacaccctctccccgatggagccccacgcactggtccagctctgcggcacatatcctccctcatataatttgacctttcattcatctcaaaacgtcctgttaataacgctcatcacaaatactgagcggcgtcaccccggatttgaggctacctttttccagttgcctcgcatgtcctcttgcgggggaaggctcagaaaggcccagggcactttcaacagtccctactacccagggcattacccgccaaacatcgattgtacttggaacatcgaggtgccaaataatcaacatgtgaaggtccggttcaagtttttctacctgcttgagccaggggtgcctgccggaacatgcccaaaagactatgtggaaatcaacggtgaaaagtattgcggagagcgctctcagtttgtagtcacatcaaatagtaataaaataaccgtgcgcttccattctgatcagagctacaccgacaccggttttttggccgagtatctatcctatgatagcagtgatccttgtcccggtcaattcacttgtaggaccggcagatgcattcggaaagagctccgctgtgacgggtgggctgactgcacagatcatagcgacgaactcaactgtagctgcgatgcaggacatcagttcacttgtaagaataagttttgcaaacccctgttctgggtttgcgacagcgtcaatgactgtggcgacaattctgatgagcaggggtgttcctgccctgcgcagactttccggtgctcaaatggtaagtgtctgtcaaagtctcagcagtgcaatgggaaggacgactgcggagatggcagcgacgaggctagctgcccaaaggtgaacgtagtgacctgcactaaacacacctataggtgcctcaacgggttgtgtctctccaaaggcaatccagagtgtgatggcaaagaagactgcagcgatggcagcgatgagaaggactgtgattgcgggcttagaagcttcacccgtcaggcaagggtagtaggaggcacagacgcagatgagggagagtggccctggcaggtgagcctgcatgcactcggacaggggcatatctgtggcgctagtttaatctcccctaactggctggtgtctgccgcacattgctacatagacgaccgcggtttccgctatagcgaccccacacagtggacggcctttctcgggttacacgatcagagtcagaggtctgcccctggcgtgcaagagaggcgtctaaagaggattatctcccacccattttttaacgattttaccttcgactacgatattgccctgctggagctcgagaaacccgctgagtatagttcaatggtgcgcccaatctgcctgccagatgcctcgcacgtcttccctgcagggaaagccatttgggtaacaggctgggggcatacccaatacgggggtaccggagctctgattctgcagaagggagagattcgtgtcatcaatcagactacttgcgaaaacctgctcccacagcagatcactcccagaatgatgtgcgtaggcttcctgagtggtggggtggattcttgccagggagactcaggagggcctctctcctccgtggaagccgacgggcgaatcttccaagctggcgtggtcagttggggagacggctgcgcccaacgaaataaaccgggtgtttatactcgtctccctctgtttcgtgactggatcaaggagaacaccggtgtgtag

SEQ ID NO: 242819 - DNA, 3414 bp, synthetic construct
  misc_feature 1..3414: note = Description of Artificial Sequence: Synthetic coding sequence
  source 1..3414: mol_type = other DNA
atgactatgaccgctaacaaaaattctagcatcacccatggagctggaggaaccaaggcccctagaggcactttgtcccgttcccagtctgtaagcccaccgccagtcctctcccccccacgcagtcccatctaccccctttcggacagcgagacatcagcttgtagatatcccagtcactcatcttctagggtcctattgaaggaccggcatcctcccgcacctagtcctcagaacccccaagacccatcccccgacacatcccctcccacttgcccattcaaaactgctagtttcggatacctggaccggtctccgagcgcatgcaaaagggatgcacagaaggaatcagtgcagggcgcagcacaggacgtggcgggagttgctgcatgcctgcctctagcgcaaagtactcctttcccaggaccggctgccggtccacgcggtgtactgctgaccagaaccggcactagagcccatagtttggggattcgggaaaagataagcgcctgggaaggaagacgagaggctagtcccagaatgtctatgtgcggggagaaacgggagggctcaggatccgagtgggccgcatccgaggggtgcccctctcttggctgccctagcgtggttccttctccctgttccagtgaaaagacctttgacttcaaaggacttaggcggatgagtcggaccttcagcgagtgctcttaccctgagactgaggaagaaggagaagccttgcccgtcagggattctttctatagactggagaagcggctgggacgctctgagccctcagcattcttaaggggccacggctcccggaaggagtccagcgcagttctgtcgcggatccagaagatagagcaggtcttgaaggaacagccgggacgcggtctgccccagctgccaagttcctgttacagtgtggaccggggaaagcgcaagactgggaccctggggtccttggaagagcctgccggaggcgctagcgtgtcagcgggtagtcgagccgttggtgtggcaggcgtggctggagaagccggtcccccacctgagcgggagggtagcggttccactaagcccggaacccccggaaatagcccctcctcacagcggcttcctagtaagtctagcctggatccagcagtcaaccctgtgcctaaacccaaaaggacctttgaatacgaagcagataagaaccctaagtccaaaccttctaatgggttacccccttcaccaactccagcagcaccgccaccgctgcccagtactcctgcaccacccgtcaccagacgcccaaaaaaagatatgcgagggcaccgcaagagccagtcacgtaagtcgttcgagtttgaagatgccagcagtctccaaagcctttaccccagctcacccacagaaaacggtacggaaaaccagcccaaattcggcagcaagtccacactagaggaaaacgcctacgaagatattgtgggcgaccttcccaaggaaaacccctacgaggacgtggatctcaagtctcgacgggctggccgtaagtctcaacagcttagcgagaattctcttgactccctccatcggatgtggtctccacaggatcgaaaatacaacagcccaccaacccaactttctctgaaacctaatagccaatcccttaggagcggaaactggagcgaacggaaaagtcaccgactgcccaggctccccaagcgccactcgcatgacgacatgctcctactggctcaactctctctgcccagttccccatctagcctgaacgaggacagtctgtcaactacatccgagctcttgtcgagcagaagggccagaaggattccgaaactggtccagaggatcaactctatttacaacgccaagcgtggtaaaaaacgactaaagaagttgagcatgagctcaattgagaccgccagcttgagagacgagaacagtgaatccgaatccgactcagacgacaggtttaaggcccacacacaaagattagtgcacatacagtcaatgttgaagcgagccccttcataccgaactctggagctggagctgcttgaatggcaggagagagaactttttgagtacttcgttgtagtgtccctcaaaaaaaagccctcacgaaatacgtatcttccagaagtaagttatcaatttcctaagttggacagaccaacgaagcagatgcgcgaagctgaggagcgcctaaaggctattcctcaattctgttttccggatgccaaagactggctgcccgtttccgagtacagctccgagacattttcattcatgttgactggggaggatggcagtagaagatttgggtattgtagacggcttctgccttctgggaagggcccaaggctgccagaggtgtactgtgtcatttcgcgactcggctgtttcggcctgtttagtaaagttctggacgaagtagagagaaggagaggaatttccgcagctcttgtgtaccctttcatgagatctttgatggagagtccttttcccgctcccggtaaaaccattaaggtcaagactttccttcccggtgcaggaaatgaggttctggaattgagacgtcctatggacagcaggttggagcatgtcgactttgaatgcctttttacctgcctgagtgtgagacagcttattaggatctttgcatcactgctcttggagcgcagagtcatctttgttgccgataagcttagcacactaagttcttgtagccacgcggttgtggccttactgtatccattctcttggcagcataccttcattccagtgctgcctgcctctatgattgatatagtttgctgccccacccccttcctggtcgggttgttgagtagtagtctgccaaagttgaaagagctgccagtcgaagaagcattgatggtcaaccttggaagcgaccgatttataagacagatggacgacgaggatactctgctcccgagaaaattacaggccgctctggagcaggctctggagcggaaaaacgagctgatatcccaggacagcgactccgatagcgatgacgaatgcaacaccctcaatggcctggtcagtgaggtgtttattcgctttttcgttgaaaccgtggggcactacagcttattcctcacacagagtgagaaaggcgagcgcgctttccagcgtgaagcatttagaaaatcagtggcctcgaaaagcatccgccgatttttagaagtttttatggagagccagatgtttgccggtttcattcaggaccgtgaattgcgcaagtgtcgcgctaaggggctctttgagcaacgagtcgagcagtacctggaagagctccccgacaccgagcaatctgggatgaacaagttcctgcggggactgggaaacaaaatgaagtttttgcacaagaaaaattag

SEQ ID NO: 242820 - DNA, 3414 bp, synthetic construct
  misc_feature 1..3414: note = Description of Artificial Sequence: Synthetic coding sequence
  source 1..3414: mol_type = other DNA
atgacgatgaccgctaataaaaattcaagcatcacccatggggctgggggtacaaaggcaccaagaggcacactgtcgcgttcgcaatcagtgagtccccctcctgtgttgtcaccgccacgttctcccatctaccctctgtccgactctgaaacttctgcatgccgatacccgagccacagctctagtagggtcctgttaaaggaccggcaccctcctgctccgagtccccagaacccgcaggacccatcacccgacaccagtccgccaacatgtccatttaagaccgcttcttttgggtaccttgaccgaagcccatccgcttgtaagcgggatgcgcagaaagaatccgtacagggagccgcacaggacgtggctggcgtagccgcatgtttacccttggcccagtctactccatttcccggtccagccgcagggccacgaggcgttctcctgacgcggactggaacacgcgcacatagtctgggcatacgcgaaaaaattagcgcttgggaggggagaagagaggcttcccccaggatgtcgatgtgtggtgaaaagcgagaggggagtggcagcgagtgggccgcttccgaaggctgcccgagtctcggatgtcctagtgtggtgccttctccctgctcttcagagaagacatttgacttcaaaggactgagacgtatgtccagaacctttagcgagtgtagttacccggaaacagaggaggagggcgaagccctgccagtgagagactcgttctatcgtctcgaaaaaagacttggccgatccgaaccctccgcttttctgcgtggccacggtagccgtaaggaatcttcagcggtcctatctcggatccagaaaatcgaacaggtgcttaaggagcagcctggtcgcggactgccacagctcccatcttcttgttactccgtggatcggggaaagagaaagaccggcaccctgggttctttagaagaaccggcaggcggagcctctgtctccgccggaagccgagccgtgggcgtggccggagtcgctggcgaagccggtccacccccagaaagggagggttcgggttccactaaacccggaacccctgggaattcaccgtcatcccagaggttgccgtctaagtcatcactggacccagccgtgaatcccgtgccaaagccgaagagaactttcgaatacgaggcagacaaaaacccaaaatcaaagccgtccaatggacttcccccttctcccaccccagccgcaccaccgccacttccctcaacacccgctccaccagtgacgcgacggccaaagaaggacatgagaggccataggaaatcacagagccggaagagttttgagtttgaagatgcctcttcactccaatctttgtacccaagctctccaactgagaatggcacagaaaaccaacctaaattcggcagtaagtcgacactggaggaaaacgcctacgaggatatcgtaggcgacctgccaaaggaaaatccctacgaggacgtggatctcaagtccaggcgagctggacgaaaatcccagcaactatctgagaactcgttggacagcctgcaccggatgtggtcaccccaggatcgaaagtacaattctccccctactcagttgtccctgaagcctaattcgcagagcctgagatcagggaattggtccgaacgcaagtctcatcggctccctaggctcccgaaacggcattcacacgatgacatgttgttgctcgcccagttatcccttcccagctccccctcttccctgaatgaagattcactgtcaacaacgagcgagctgttgtctagtagaagggcgaggcgcatcccaaagttagtacagcggatcaactcaatttataatgccaagcgaggtaaaaaacggctcaagaaactctctatgtcttctattgaaactgctagcctgagggatgagaattctgagagcgagtccgacagcgacgatcgtttcaaagcacacacgcagcgcctggtccatatccagtctatgttgaagcgcgctcccagttatcgtaccctggaactcgaacttctagagtggcaggagagagagttatttgagtattttgtggttgtgagccttaagaagaaaccctcccgaaacacttatctgcctgaggtctcttatcagtttccaaagctagatcgtcccaccaagcaaatgagagaggcggaagagagactgaaggccattccacagttttgcttcccagacgccaaagactggctgcctgtgagcgagtactcctccgagaccttttcctttatgctgacaggagaggacggctctcggaggttcggttattgccgtcggctgctgcctagcggcaagggaccccgtttgccggaagtgtactgcgtgattagcaggctcggctgtttcggcttgttttctaaggttctcgacgaagtggaacgccgacggggaatcagcgccgcactggtttaccctttcatgagatcgttgatggaatctccgttcccagccccagggaagactattaaggtcaagacatttcttcctggcgctgggaacgaggtgctggaattacggaggcccatggacagtagactggagcacgtggatttcgaatgcttgttcacgtgcctgtctgtgagacagctgatacggatttttgccagtttactgcttgagcggagggtcatcttcgtcgctgataagttatctacactctcttcttgctcacatgccgtggtcgcactgttgtacccattcagctggcagcacaccttcatccctgtgctgcccgcttccatgatcgatattgtgtgctgtccaactcccttcctggtaggtcttctttcgtccagcctgcctaagttaaaagaattaccggttgaggaagcactcatggttaatttggggtcagacagatttatccgccagatggacgatgaggatacgctccttccacggaagctgcaggcagcactcgagcaagccctggagcgtaaaaatgaactcatttctcaggattcagacagcgacagtgacgatgaatgcaacaccttaaacggcttggtgtctgaagtgttcattcgcttttttgtggagacagttggccactactccctatttctcacccagtctgaaaagggggaaagggcttttcaacgggaagccttcagaaaatcagttgcctccaagtctattagacgttttctggaggtatttatggagtcccaaatgttcgccggatttattcaggacagagagctgcgcaagtgccgagccaaggggctcttcgagcagagagtggagcaatatctcgaagagctgcccgatacagagcagtcaggcatgaacaagtttttgagaggactggggaacaagatgaagtttctgcataaaaagaattag

SEQ ID NO: 242821 - DNA, 1263 bp, synthetic construct
  misc_feature 1..1263: note = Description of Artificial Sequence: Synthetic coding sequence
  source 1..1263: mol_type = other DNA
atgacaagccggaagaacgggggaggagctcacagctggcaggagacaccctgggaacagcgcagggcgctgggccttcagagagccgagatgactatgacagccaataagaactcatctatcacgcatggtgccggaggtaccaaagcgccacgcggtaccctgtccagaaaatcctttgagttcgaagacgcctcatcccttcaatcactgtacccatcttccccaactgagaacggaaccgagaatcagcctaagtttgggagcaagtcaaccctggaggaaaatgcctatgaagacatcgtgggagatctgcccaaagagaacccatacgaggatgtggaccttaagtccaggagggcgggacggaaatcccaacaattgtctgagaatagcctggacagcctgcacaggatgtggagcccacaggatcgcaaatataattctcccccaacccagttaagcctgaagcccaattcccaaagcctgagaagcggcaattggagtgaaagaaagtcccaccggctgcctagacttccgaagcgacactcacatgatgacatgttactgttagcccagctcagcttgcctagttcgccttcctccttgaacgaggattctctcagtacaacttccgaattactgtccagccgccgtgcccgtagaatccccaaactggtgcagcgtatcaactctatctataacgcgaagcggggtaaaaagagactcaaaaaactctcaatgtcatccattgagacggcaagtctgagagatgagaatagcgagagcgagagtgactctgatgataggtttaaagctcacacacaacggctcgtccatatccagagcatgttaaaacgggcaccctcctatcgaactctcgagctcgagcttcttgagtggcaagagagagaactcctgagtaccttgtggtggtgtccgtcgagacggtctcaccgcgagactccaacctctccaaaatcccccacatctttccccagaaacgtacttagccccgcactgcacgttgccgcaggctctttctcgttcctgaggctctgctcctcaagaacttcttttaggaggtctgtccaaacccccgcatggtctccctctcctgcccaactggctctgctggacagacctaccaagcagatgcgggaggctgaagaaagattaaaagcgataccgcagttctgctttccagatgcaaaagattggctcccggtgagtgagtatatgcgacccttcctgtcctgttag

SEQ ID NO: 242822 - DNA, 174 bp, synthetic construct
  misc_feature 1..174: note = Description of Artificial Sequence: Synthetic coding sequence
  source 1..174: mol_type = other DNA
atgactatgactgctaataagaattccagtatcacccacggagcgggaggtactaaagcacccagagggaccctatcccgcagtcaatccgtatcacctcctcccgttctgtccccacccagatcccctatttatcccctctcagactctgaaactagtgcttgcaggtactag

SEQ ID NO: 242823 - DNA, 123 bp, synthetic construct
  misc_feature 1..123: note = Description of Artificial Sequence: Synthetic coding sequence
  source 1..123: mol_type = other DNA
atgactatgactgccaacaaaaattcatccattactcatggggcagggggaacaaaagcccctagagggactctgtcgagaagtcagagcgtgtctccacccccagtcctttcaccaccgtag

SEQ ID NO: 242824 - DNA, 144 bp, synthetic construct
  misc_feature 1..144: note = Description of Artificial Sequence: Synthetic coding sequence
  source 1..144: mol_type = other DNA
atgtggtctcctcaagacaggaaatacaattcccctcctacccaactatccttaaaaccaaattcacagtcacttaggagcgggaattggtctgagcggaaatcccaccgcctccccagactgccaaagagacactcgcattag

SEQ ID NO: 242825 - DNA, 219 bp, synthetic construct
  misc_feature 1..219: note = Description of Artificial Sequence: Synthetic coding sequence
  source 1..219: mol_type = other DNA
atgacaatgacagccaacaaaaactcttcaataacacatggagcgggaggtacgaaggcacccagaggaactctgtcccgcaagtcgtttgagtttgaagacgcctcatctctacagtcattgtacccttcgtcaccaacggaaaatggaaccgagaatcaaccaaagttcgggagtaagagtaccctcgaggagaatgcctatgaggatatagtgtag

SEQ ID NO: 242826 - DNA, 375 bp, synthetic construct
  misc_feature 1..375: note = Description of Artificial Sequence: Synthetic coding sequence
  source 1..375: mol_type = other DNA
atgacaatgacggccaacaaaaacagttctattacacacggcgctggcggaacaaaagcacctcgcggaacactgtcgcgatcccagtctgtatctccacccccagtcttatctcctccaaggtccccaatataccccttatccgactcggagacatcagcttgtaggtacccaagccactcgagttcacgggtgctcctgaaggaccgacatccccctgccccatccccccagaaccctcaagatccttcaccggacacttcccccccaacttgtcctttcaagaccgccagcttcggataccttgaccgaagtccatccgcttgtaagagggacgctcagaaggaatcagtgcagggggcagcccaagattag

SEQ ID NO: 242827 - DNA, 429 bp, synthetic construct
  misc_feature 1..429: note = Description of Artificial Sequence: Synthetic coding sequence
  source 1..429: mol_type = other DNA
atgactatgaccgccaacaagaactcgagtatcacccatggcgcaggcggtactaaagctccgaggggcacgctgagccgctcacagtccgtctccccgccacctgtgctgtcccctcccagatcccctatttacccactatcagactctgaaacctcagcgtgtagatacccctctcattctagcagtagagtgttgctaaaggatcgacatcctcccgctccttcaccccaaaacccacaagacccaagccccgatactagccccccaacatgtccgtttaaaacagcctcttttggatacctggatcgaagccctagcgcttgcaagcgcgatgcccagaaggaaagcgtgcagggcgctgcacaggacgtggccggagtggcagcatgccttccgctggctcagtctaccccattcccagggtag

SEQ ID NO: 242828 - DNA, 2154 bp, synthetic construct
  misc_feature 1..2154: note = Description of Artificial Sequence: Synthetic coding sequence
  source 1..2154: mol_type = other DNA
atgactatgacagccaacaagaacagttctatcacccatggcgcagggggaacgaaggccccaagaggaactctctcacggaagtcctttgagttcgaggacgcgtcgtcgcttcagagcctctacccctcctctcccacagaaaacggcacagagaaccagcctaagtttggttccaagagcacacttgaggagaatgcttatgaagatatcgtgggcgacctacccaaggaaaacccttacgaagatgtagatctgaaatcacgcagggcaggcagaaaatctcagcagttgagcgaaaacagtctggactcactccatcgcatgtggtcaccccaagatcggaaatataactcccctccaactcaattgtcactcaagccaaatagccaatccctgagatcaggaaactggtcggaacgcaagagtcaccgattgccaaggttgccgaagaggcactctcacgatgatatgctgttactggcccagcttagtctgccatcgagcccaagtagtctgaatgaagattcactgtcaactaccagcgaactgctctcctctcgtagagccagacggattcctaagcttgtgcagcgcataaattccatttataacgccaagaggggcaagaaacgactgaaaaaactgtccatgagttcgatcgaaaccgcttccctgagggacgaaaatagcgaatccgagtcggactccgacgatcgcttcaaggcccatacgcagcggcttgtgcatatccagagcatgcttaagcgtgccccaagctatcgtacactcgaactggaactgctggagtggcaggaacgtgagctgtttgagtatttcgtggtggtttccctgaaaaaaaagccaagtcgcaacacctacctccccgaagtctcatatcagtttcccaagttggacagacctacaaaacaaatgcgtgaggctgaagagcgattgaaggccatccctcaattctgtttccccgatgcaaaggactggcttccagtatccgagtattcaagcgagacatttagtttcatgctgacaggcgaggacgggtcaaggagattcggatattgtcgcaggctcctacctagcggaaaaggccctagactgccagaggtatattgtgttattagccgactgggatgttttggtctgttttctaaggtcctagatgaggtcgagcggcgtcgcggaattagtgctgccctcgtttatccctttatgcggagtttgatggagtcaccgtttcccgctcccggtaagactatcaaggtgaagactttccttccgggtgcgggaaacgaggtgctggagctgcgacgccctatggattcgaggctggaacatgtggacttcgaatgtttgttcacctgtctgagcgtgcggcagctgataagaatctttgcctctctcctgctcgaacggagagttatcttcgttgccgacaagctctcgacactcagtagctgttcccacgccgtcgtggcactcctctacccatttagttggcaacacacttttatccccgttctgcctgcttccatgatcgacattgtgtgttgccccaccccttttttagtggggcttctcagctcgagccttcctaaactaaaagaattgcccgtagaggaggctcttatggttaacctcggttccgacaggttcatccgccagatggacgatgaggacaccctgcttccgagaaaacttcaggctgcactagagcaggccctggagcgcaaaaatgaactcattagtcaggactccgacagcgattcagatgatgaatgtaacactctcaacggtttggtgtccgaagtgtttatccggttctttgtcgaaacagtggggcactactctctttttttgacgcagtctgagaagggagaacgagcctttcagcgggaggccttccgcaagtcagtcgcttctaaatctatccgacgcttcctcgaggtatttatggagtctcagatgttcgcgggatttattcaggatcgcgagctacggaagtgtcgggcaaaaggactgttcgaacagcgggtcgaacagtacctggaggagctgccagatactgaacagagtggaatgaacaagtttctaagaggactggggaataagatgaagttcttacataagaagaattag

SEQ ID NO: 242829 - DNA, 159 bp, synthetic construct
  misc_feature 1..159: note = Description of Artificial Sequence: Synthetic coding sequence
  source 1..159: mol_type = other DNA
atgacaatgaccgctaataagaattccagcattactcatggagctggcggtacaaaagctcctcgcggaaccctgtctcggagccagagtgtatcacctcctcccgtcttgtcaccccctaggtctcctatttatcccttgtccgactccgaaacctag

SEQ ID NO: 242830 - DNA, 336 bp, synthetic construct
  misc_feature 1..336: note = Description of Artificial Sequence: Synthetic coding sequence
  source 1..336: mol_type = other DNA
atgacaatgacagccaataagaattcttctataacccatggtgccggaggaaccaaggccccacgtgggaccctctcacgatctcaaagcgttagccctcctccagtgttaagtcccccaagaagcccgatctatccactgagtgacagcgagacatccgcttgccgctacccatcccactcttcctcgagggtgttgttaaaagaccggcatcctccagcacccagccctcagaaccctcaggatcctagtcccgacactagcccacccacatgtccttttaagaccgctagttttgggtatctggaccggagccctagtgcctgcaagaggtag

SEQ ID NO: 242831 - DNA, 162 bp, synthetic construct
  misc_feature 1..162: note = Description of Artificial Sequence: Synthetic coding sequence
  source 1..162: mol_type = other DNA
atgacgatgaccgcgaataagaatagctctatcactcacggcgcaggcggaactaaggctccgcgtggcactctttcaagatcacagagtgtcagccctcccccagtgttatcgccaccaaggagcccaatctatcccttatctgattccgagacatcatag

SEQ ID NO: 242832 - DNA, 252 bp, synthetic construct
  misc_feature 1..252: note = Description of Artificial Sequence: Synthetic coding sequence
  source 1..252: mol_type = other DNA
atgactatgaccgcgaacaaaaatagcagtataactcacggggcaggtggtacgaaggctcccagagggactttgtcccgtagtcagtctgtgtctcctccaccagtcctgtccccgcctaggtcacccatatatcccctctccgattccgagacatcagcctgtcgatacccctcgcacagcagctctcgggtgttgttgaaggaccggcaccctccagcacccagccctcaaaaccctcaggatccttag

SEQ ID NO: 242833 - DNA, 288 bp, synthetic construct
  misc_feature 1..288: note = Description of Artificial Sequence: Synthetic coding sequence
  source 1..288: mol_type = other DNA
atgacgatgacagcaaataagaattcatccattactcacggagcaggagggactaaagcacccaggggaacgctgtcccggtcccagagtgtcagtcccccaccggtgttgtcccctcctcgtagtcccatttaccccctctctgactcagagacatccgcatgccgatacccatcacattcttcctcccgcgtcttactgaaagaccgccacccacctgccccaagcccccaaaatcctcaggaccccagccctgatacttctccccctacctgtcccttcaagtag

SEQ ID NO: 242834 - DNA, 465 bp, synthetic construct
  misc_feature 1..465: note = Description of Artificial Sequence: Synthetic coding sequence
  source 1..465: mol_type = other DNA
atgaccatgaccgcaaacaagaatagcagcattacccacggcgcagggggtaccaaggccccaagaggtaccctgtctaggtcccagagtgtgtcaccacctccggttttgagtccgcctaggagtcctatctatcccctgagtgattctgaaacaagcgcttgccgttatccatcacatagctccagcagagtgttactaaaggaccgccatccacccgctccttcaccgcagaacccgcaggaccccagtccagacacttcacctccgacttgtccattcaagacagcatcattcggctatctggaccggagtcccagtgcctgcaagcgagatgcccagaaagaaagtgtacagggggctgcacaggatgtagctggcgtagctgcgtgtctgcctttggctcagtcgacccctttccccggacccgctgccggtcctaggggcgtcttgctaacacggtag

SEQ ID NO: 242835 - DNA, 540 bp, synthetic construct
  misc_feature 1..540: note = Description of Artificial Sequence: Synthetic coding sequence
  source 1..540: mol_type = other DNA
atgtggagtcctcaggacaggaagtataactccccgcctacccaactgagcctcaagccgaattcacaaagtctgcgcagcggcaattggtcggaacgcaagtcacacagactgcctcggctgcccaagaggcattcccatgacgacatgcttctcctggcacaattgtctcttccttcatccccatcttcactcaacgaggactcattgtctacaacttctgaactcctgagctctcgtcgtgctcgccgtatcccaaagctggtgcagagaatcaactccatttataacgcaaaacggggaaaaaagcgactgaagaaactctcgatgtcatccatcgaaactgcttcccttcgtgatgaaaattctgagtccgaatcggactccgatgaccggttcaaagcccacacacaaaggttggttcatatccagtccatgctcaaaagagcacctagctacagaacccttgaactggaactgcttgagtggcaggagagagagctgttcgagtattttgtggtggtatccttgaaaaagtag

SEQ ID NO: 242836 - DNA, 2154 bp, synthetic construct
  misc_feature 1..2154: note = Description of Artificial Sequence: Synthetic coding sequence
  source 1..2154: mol_type = other DNA
atgacaatgaccgctaacaagaattcctcgataactcacggtgctggcggtaccaaagccccaagaggcactctcagtaggaaatcctttgagtttgaagacgccagtagcctccagtcactctatccctcatcccccacagagaatgggacggaaaaccagcctaagtttggcagtaagtctactttggaggagaatgcatacgaggatatagtcggcgacctgcccaaggagaatccatatgaagacgtcgaccttaaatcaaggcgcgctggaagaaaaagccagcaactgagcgaaaactcacttgactcccttcaccggatgtggagtccgcaagaccgaaagtataacagccctccaacccagctgtcacttaagcctaattcacagtccctacgcagcggcaactggagcgagagaaaatcccatcggcttcccagactccccaagagacatagccatgatgatatgttacttctggctcagctcagtctccctagcagtccaagtagtctaaacgaggatagtctgagtactactagtgagctcttgagcagcaggcgagctcgccgaattccaaaactcgtgcagagaataaatagcatttacaatgcgaagagaggtaagaagcgcctgaagaagctgtcaatgtcatctattgaaactgctagtctgagagacgaaaacagcgagtccgagagtgactccgatgaccgcttcaaagctcacacccagcggttggtacatatccaatcaatgctcaaaagggcccctagttaccggacacttgagctcgaattattagaatggcaggaaagagagctgttcgagtattttgtggtggtgtcactgaagaagaagccttcgcggaatacctacctgcctgaagtgagctatcagtttccaaaactcgacaggcccacgaagcagatgagagaagcggaagaacgcctcaaagcgattccccagttttgctttcctgatgctaaggattggttaccagtgtctgagtatagctccgagacattcagttttatgttgacaggagaggatggctcacggaggttcggatactgccgcagactactcccctcgggcaaggggcctcgcttaccagaggtctactgtgtgatttctcgactgggctgtttcggacttttctcaaaggtcctggatgaggtggagcggaggaggggaattagcgccgctttggtttacccatttatgcggtccctgatggagtcgccttttcccgcacccggtaaaaccatcaaagttaagacattcctgcccggagctggaaatgaagttctggagcttcgaagaccaatggattcaaggctggagcacgtggattttgagtgcctgtttacgtgcctaagtgtgcgccaattaatccgaatctttgcaagtcttctgctggagcgcagggtcatttttgtggccgataagttgtctactctgtcctcctgttctcacgccgtggtcgcgctgctctaccctttttcatggcaacataccttcatccccgtcctcccagcttctatgattgacatcgtttgttgtcccaccccctttctggtgggcttgctttcttcatccctgcctaaattgaaggagcttcccgttgaagaggccctaatggtcaacttgggttccgaccggttcatcaggcagatggatgatgaagacactcttctcccaagaaagctgcaggccgctctggaacaagctcttgagaggaagaatgagctgatctctcaggattccgattccgactccgacgatgagtgtaatacccttaacggcttggtgtctgaagtgttcatacggttcttcgtggaaactgtcggtcactattccttgttccttacgcagtccgagaaaggagagcgagccttccagagagaagcattcaggaaaagtgtggcttctaagtccatcagaagattcctcgaagttttcatggagagtcaaatgtttgctgggtttatccaggaccgggaactgagaaagtgtagagcaaagggcctatttgaacagcgtgtcgaacagtacctggaggaactacccgatacagaacaatcaggaatgaataaattcctgcgtgggctagggaataaaatgaaattcttacataagaagaattag

SEQ ID NO: 242837 - DNA, 411 bp, synthetic construct
  misc_feature 1..411: note = Description of Artificial Sequence: Synthetic coding sequence
  source 1..411: mol_type = other DNA
atgaccatgaccgcaaacaagaacagtagtatcacacacggcgctggcggtaccaaagctcccaggggcaccctgtctagaaagtcatttgagttcgaggacgcaagctccctccaaagcctttatccatccagtccgacagagaacgggacagagaaccaaccgaaatttggcagtaaaagcaccctcgaagaaaatgcatacgaagatatagtcggtgatctgcccaaggaaaacccatacgaagatgtggacctcaagagtagaagggccggacgcaagagccagcaattaagtgaaaactctctggactccctgcaccgaatgtggagccctcaagataggaagtataactcccccccaacccagctgtccttgaagccaaacagccagtctctgcgctctggatag

SEQ ID NO: 242838 - DNA, 225 bp, synthetic construct
  misc_feature 1..225: note = Description of Artificial Sequence: Synthetic coding sequence
  source 1..225: mol_type = other DNA
atgactatgacagctaataagaattcctccatcactcatggcgctggcggaacaaaagcacctcgcggaaccttaagtagatcccaaagtgtcagccccccaccagttctcagtcctcccagaagccctatctacccactctccgattcagagacaagtgcatgccgatacccatctcacagctcgtccagagtgctccttaaagatcggcatcctccagcatag

SEQ ID NO: 242839 - DNA, 420 bp, synthetic construct
  misc_feature 1..420: note = Description of Artificial Sequence: Synthetic coding sequence
  source 1..420: mol_type = other DNA
atgactatgacagccaacaaaaattccagtattactcatggagcaggcggtaccaaggcaccacgaggaactctgagccgctcacagtccgtgtcaccacccccagtgctgagccccccacgctcaccaatttacccccttagtgattctgaaacgtcagcctgtagataccccagccatagttcaagccgcgtgctgctgaaagatagacaccctcccgcaccatctccacagaacccccaggatccctcgccagatacttcaccccctacatgtccattcaaaactgcttcctttggatacctggatcggtcaccatctgcctgcaaacgggatgcgcaaaaggagtcagttcagggggcagcacaggacgtagccggagttgccgcatgtctccctctggcccagagcacaccctag

SEQ ID NO: 242840 - DNA, 1830 bp, synthetic construct
  misc_feature 1..1830: note = Description of Artificial Sequence: Synthetic coding sequence
  source 1..1830: mol_type = other DNA
atgtggagcccacaggatcggaaatataattctccccctacacaactttccctgaagcccaatagccagagccttcgctcagggaattggtccgagaggaaaagtcatcgactccccaggctgccgaaacggcacagtcacgacgacatgttgctgctggcgcagctgtccctccctagcagtccaagttccctaaatgaggactctctatccactacctctgagctgttgtcctcccggcgtgcccgtaggattcccaagctggtccagcgtattaatagcatatacaacgctaaaaggggcaagaagaggctcaaaaagcttagcatgtccagtattgaaacagcaagcctgagggatgaaaacagcgagtccgagtctgactcggacgatcgtttcaaagcccacacccaaagattagtacacattcaaagcatgctgaagcgagccccttcttaccgcacgctggagctggagctgcttgagtggcaagagagggagttgttcgagtacttcgtggtggtgagcttgaagaaaaagcccagcagaaacacttatctccccgaggttagctaccagttcccgaaattggataggccaacaaagcaaatgcgcgaagctgaggagagacttaaggctataccccagttctgtttcccagatgcgaaagactggctgcctgttagcgaatactcctcagagacgtttagcttcatgctcactggcgaggacgggtcccggaggtttgggtattgcagacgactactcccatccggtaaagggcctaggctgcctgaggtctattgtgtgatctctcgtctgggctgtttcggtcttttttccaaagtgctggacgaagtagaacgtcggagaggtattagcgccgctctggtttatcctttcatgcgcagcctcatggaatcccctttccctgcacccggaaagacaataaaggtgaagacctttcttcccggagctggcaacgaagtgctcgagctgaggcggcctatggatagcaggttagagcatgtcgacttcgaatgtctattcacctgcctgtcagtccggcaactaattcgcatcttcgcgtctctgttattggagcggagagtgatattcgtggcagacaagctgagcactctttcctcctgcagccacgccgtagtcgccctgttataccctttcagctggcaacacacattcatacctgtcctgcccgcatccatgattgatatcgtgtgctgtccaactccatttcttgtcggcctcctatcaagttctctccccaagctaaaagaactccctgttgaagaggcactcatggtgaatctggggagcgacaggtttattagacagatggatgatgaggacaccctattgcctcggaagctgcaggccgctttggaacaagccttggaacggaagaacgagctgataagccaggattccgatagcgattctgacgatgagtgcaataccctgaatggcctggtctccgaagtgtttatccgcttctttgtggagactgtggggcactactccctgtttctcacacagagcgagaaaggcgagcgggcatttcagagggaagcctttagaaagtctgtcgcaagtaaaagcattcgccgatttttggaggtcttcatggaatctcagatgtttgccggatttatccaggatagggaactcagaaagtgcagggctaagggacttttcgagcagcgcgtagaacagtacctcgaggagctgccagacaccgagcaatccgggatgaataagtttctgcgagggttgggtaacaaaatgaagttccttcacaagaagaactag

SEQ ID NO: 242841 - DNA, 234 bp, synthetic construct
  misc_feature 1..234: note = Description of Artificial Sequence: Synthetic coding sequence
  source 1..234: mol_type = other DNA
atgaccatgactgcaaataagaattcaagcatcacccacggagctggtggtactaaagctcccagaggtacactcagtcgcaagtcctttgaattcgaggacgccagtagcctgcaaagtctgtatcccagcagtcctactgaaaatggcacagaaaatcagcccaagttcggcagcaaaagcaccctggaggaaaatgcctacgaagatatcgtcggtgacttgccaaaatag

SEQ ID NO: 242842 - DNA, 81 bp, synthetic construct
  misc_feature 1..81: note = Description of Artificial Sequence: Synthetic coding sequence
  source 1..81: mol_type = other DNA
atgactatgactgctaacaagaactctagtattactcatggcgcaggtggaacgaaggcccctcgtggtacactgagttag

SEQ ID NO: 242843 - DNA, 1035 bp, synthetic construct
  misc_feature 1..1035: note = Description of Artificial Sequence: Synthetic coding sequence
  source 1..1035: mol_type = other DNA
atgtggagccctcaggaccggaagtacaactcccccccaacacaactcagcctgaaaccaaatagccagtcactcagatccgggaactggtccgagcggaaatcccataggctgccacgcctgcccaaaagacattcccacgacgatatgctgcttttggcgcagttgtcccttccttcttcaccgtcatctcttaacgaggacagcctgtcaacgacaagcgagttattgtcctcaaggcgagctagaagaattccgaagctcgtacagcgcatcaacagtatatataatgccaagagaggcaagaagagactgaagaagctgtcgatgtcttcaatcgagactgcctcactgagggatgagaattccgagagcgaatcagattctgacgaccgcttcaaggcacatacacagcgtctggtgcacatccagtctatgctgaaacgagctccgtcatacaggacattggagctggaattactcgagtggcaggagagggagttatttgagtacttcgtcgtggtgagtctcaagaagaaaccaagtcgtaacacctatctccccgaagtttcatatcagttcccaaaattggacaggccaacaaagcagatgagagaggccgaagagaggctgaaggccatcccccagttttgctttccagatgctaaagattggctgccagtttccgagtactcctccgaaacattcagcttcatgctcaccggagaggatggttcccgccgttttggttattgcaggaggctacttcccagcggaaaaggcccaaggttacccgaggtatattgcgttataagtagactcggatgtttcggactgttctcaaaggtgctagacgaggtggagcggagacgcggtattagtgctgccctggtgtatccttttatgcgctcgctgatggagtctccctttccagctcccggtaagacaataaaagtcaagactttcctccctggcgcagggaatgaagttctggaactgaggaggccaatggacagccggctcgagcacgtatag

SEQ ID NO: 242844 - DNA, 231 bp, synthetic construct
  misc_feature 1..231: note = Description of Artificial Sequence: Synthetic coding sequence
  source 1..231: mol_type = other DNA
atgaccatgacagcgaataagaattcaagcattacgcatggcgctgggggtacaaaggccccaagaggcacactctcaaggaagtcattcgagttcgaggacgcctcgtcgctgcaaagtctttacccctcgagtccgacggagaatggaacagagaatcagcccaaattcggctcgaagtccactttagaggagaacgcatacgaggacatcgtcggcgatctgccctag

SEQ ID NO: 242845 - DNA, 225 bp, synthetic construct
  misc_feature 1..225: note = Description of Artificial Sequence: Synthetic coding sequence
  source 1..225: mol_type = other DNA
atgacaatgactgctaacaagaactcttctattacacacggggctggaggaaccaaagcccctaggggtactctatctcgcagccagagcgtgagcccaccacccgtactgtcgccccctaggtctccaatctatcctctgagtgattccgagacatcggcatgccggtatccatcccactcctcaagccgggtactgctaaaggatcggcatccacctgcctag

SEQ ID NO: 242846 - DNA, 435 bp, synthetic construct
  misc_feature 1..435: note = Description of Artificial Sequence: Synthetic coding sequence
  source 1..435: mol_type = other DNA
atgaccatgactgccaataagaattcttccatcactcatggcgctgggggaacgaaggctccccgaggaacccttagccggagtcagagcgtgtcaccacccccagttctcagccctcccaggtctcctatctatcctcttagcgattcggaaacctcagcctgtcggtacccctcacattcctcctctcgcgtactgttgaaagacaggcacccgccagcgccttcaccgcaaaaccctcaagaccccagtccagataccagcccaccaacatgtcctttcaaaacagctagtttcggatatctagaccgatctccatctgcttgcaagcgagacgcacagaaggaaagcgtgcagggcgcagcacaggatgtcgcgggagtggcagcatgccttccgctcgcccagagtactccttttcccggtcctgcgtag

SEQ ID NO: 242847 - DNA, 3414 bp, synthetic construct
  misc_feature 1..3414: note = Description of Artificial Sequence: Synthetic coding sequence
  source 1..3414: mol_type = other DNA
atgactatgacagctaacaagaactcctctataactcacggggcaggaggcaccaaggcccctaggggaactctatctaggagccagagcgttagccctccaccggttctgtcaccacccaggtcccccatatatcctttgagcgactccgagacgtcagcatgcaggtacccttcacactcaagttcacgggtgttgctcaaggatagacaccctcccgctcctagcccacaaaatccacaggatccttctcccgatacttctcctccgacttgccccttcaagactgccagctttggatacctggatagaagccccagtgcatgtaaacgcgacgcacagaaggagtcggtacaaggagctgcacaagatgtggccggtgttgcggcatgtctacctttggcacagtccactccctttcccggaccagcagctggaccgaggggggtgctgttaacacggactggcacgcgagcccactccctgggtataagagaaaaaatttcagcctgggaaggacgacgcgaggcctccccacgcatgtcgatgtgtggagagaaaagagaaggctccggatcggaatgggcagcgagtgaaggttgtccgagcctgggttgtccctctgtcgttccctctccctgcagcagtgaaaaaacttttgacttcaaagggctgaggcgaatgagtagaacatttagcgagtgttcttatcccgaaacagaagaagaaggagaggctttacccgtaagagactccttctaccggttggagaagcgactgggcaggagtgagccatcagcctttttgagaggacacggtagccgcaaagagtcctccgccgtgctgtctcgcatccagaaaatcgagcaggttttaaaagaacagcccggacgaggcctcccccagctacctagttcctgttattctgttgatcggggtaagcgaaaaacgggcacgctcggttctttggaagaacccgctggtggcgcatccgtatcggccggtagccgagctgtgggcgtagctggagtggcaggcgaggctgggccaccacccgaacgcgaaggttccggatctaccaagccaggcacaccaggaaattcgcccagtagccagcgtctgccttctaaatcctctctggaccccgcagtgaaccccgtgcctaaacccaaacggacttttgaatacgaagctgacaagaatcctaagtcaaagccttccaacgggctgccccctagccccacccccgcagccccaccccctctaccctccacaccagctcctcccgtcacaaggagacccaaaaaagacatgcgaggccatagaaagtcgcaatctcgtaagtctttcgagttcgaggacgccagctctttgcagagtctctacccctctagtcccacggagaatggaaccgaaaatcagccaaagtttggttccaagagcaccttagaagagaatgcgtatgaagacatcgtgggggaccttcctaaggaaaacccttatgaggacgtggatctcaagtcccgcagggccggtagaaaatctcaacagctaagcgagaactcgctagacagtttgcatcgcatgtggtcccctcaggatcggaagtataactcaccacctacacagctttcattgaaacccaattctcaatccctgagatccggaaactggtcggagcgcaagtcccataggctccctcgtctacccaagaggcattcccacgacgacatgctcttactggcacagctctccctgccatcgagcccaagctcgctcaatgaggactctctctccaccactagcgaactgctctcctcccggcgtgctagaaggatcccgaagctggtacagcgcataaactctatttataacgctaaacggggtaagaagagactcaagaagctttctatgtctagcatcgaaacagcttcactgagggatgagaactctgaaagcgagagcgattccgacgatcgcttcaaagcccacactcagcgcctggtgcacattcaatccatgctcaaaagagcccctagctatcggaccctcgagcttgagctgttggagtggcaagagcgcgagttatttgaatacttcgtggtggtgtccctcaagaagaagccctcccgtaacacctaccttccagaggtgagttaccagttcccaaagctggaccggcctactaagcagatgcgggaagctgaggagcgcctgaaggccattccacagttctgctttcccgatgccaaagattggctacctgtctcagaatacagctcggaaacgttctcatttatgttgaccggcgaagacggcagccgacgcttcggctattgtcgacggttgctcccatcagggaaggggccaagactccctgaagtttattgcgtcatctcccgactggggtgttttggcctgttctccaaggtccttgatgaggtcgagcggaggaggggaatttctgccgcacttgtgtacccttttatgcgatccctcatggaaagtccttttccagcccctggcaagaccattaaagtaaaaacctttctacccggtgcaggaaatgaggtactggagctgaggaggccaatggacagtcgcctagagcacgtggatttcgagtgtcttttcacttgcctgtctgtacgacagctaatccggatctttgcatcgctcctgctcgagcgtagagtaatattcgtcgctgataaattaagcaccctgagttcatgttcgcatgcagtcgtggcgctgctgtatccgttttcctggcagcataccttcatcccagtcctgccggctagtatgatcgatattgtgtgctgtcctaccccctttctggtaggactcctcagctccagtttacccaaactgaaggaactgcctgtcgaagaagccttgatggtgaatctgggcagtgacaggttcatccgccagatggatgacgaagacacgctactcccacgtaagctgcaggctgccctggagcaagccttagagaggaaaaacgagctgatctctcaggacagcgacagcgacagtgacgatgaatgtaatactctgaacggtctcgtcagcgaggtcttcattcggttttttgtcgagacagtgggacactactccctgttccttacccagtccgagaagggagagcgtgccttccagcgcgaggccttccgcaagagtgtggccagtaagtctatccggagattcttggaagtgtttatggagtctcagatgttcgccggtttcatccaagacagggaattacggaagtgcagggccaaaggcctattcgaacagcgcgtggagcaatatctggaggagcttccagatacggaacagagcgggatgaacaagttccttcggggactgggtaacaagatgaagttcctccataagaaaaattag

SEQ ID NO: 242848 - DNA, 369 bp, synthetic construct
  misc_feature 1..369: note = Description of Artificial Sequence: Synthetic coding sequence
  source 1..369: mol_type = other DNA
atgacaatgaccgctaataagaacagtagtatcactcatggcgctggcggaacaaaggcccctcgtgggactctatcccgttcccagagtgttagccctccacccgttctgtccccgccacgatcccccatctatccactgagcgacagcgagaccagcgcctgccggtatcctagtcactcctcttctcgcgtcctgttgaaggacagacaccctccggctccctctccacagaatccccaggatccctcacccgatacatcacctccaacgtgtccttttaagacagcgtccttcggctacctggatcgctcaccttccgcctgtaagcgcgacgctcagaaagaaagcgtccagggcgcagcctag

SEQ ID NO: 242849 - DNA, 93 bp, synthetic construct
  misc_feature 1..93: note = Description of Artificial Sequence: Synthetic coding sequence
  source 1..93: mol_type = other DNA
atgaccatgaccgcgaacaaaaattccagcatcacacatggggctggaggcaccaaggctccccgtgggaccttgagtcgttcacagagttag

SEQ ID NO: 242850 - DNA, 1758 bp, synthetic construct
  misc_feature 1..1758: note = Description of Artificial Sequence: Synthetic coding sequence
  source 1..1758: mol_type = other DNA
atggctgaagcagctaccgggtttctggaacagcttaagtcttgtatcgtgtggagctggacttacctttggactgtttggttttttatagttctcttccttgtgtacattttgcgggtgcctctgaagatcaacgataatctttcaaccgtgagtatgttcctgaacaccctcacgcctaagttttatgtggctctgacgggaacgtcctcgcttattagtggattgatcttgattttcgaatggtggtacttccgaaaatatgggacgtcatttattgagcaggtctctgtttcccacctgcgtcctctgttaggaggggtggacaacaattcttcaaacaacagcaacagcagcaacggcgactccgatagtaaccgacagagcgttagcgaatgcaaggtctggcgaaaccccctgaacctgttccgtggcgcagagtacaacaggtacacttgggtgacaggtcgagaaccacttacctattatgatatgaacctcagcgcccaggatcaccagactttcttcacatgtgatagcgatcatttaagaccagcggatgctatcatgcagaaggcatggagagagaggaatccacaggccaggatctccgctgcccatgaggccctcgagattaacgaaattcgctctagggtagaggtgcccctcattgccagctctaccatttgggaaatcaaacttctcccaaagtgtgcaaccgcgtacattctactcgcggaggaggaggccaccacaattgccgaagcagagaaactgtttaagcaggccctgaaagcaggagacggatgctatcgtcgatctcagcagttacagcaccacggaagccagtatgaggctcaacaccgtcgggacaccaatgtgctagtgtatataaagcggcgtttagccatgtgcgcccgaagattgggtcgtactagagaagctgtgaaaatgatgagggacctcatgaaggagttccccttactttcaatgtttaatattcacgagaatctcttagaagccctgctggaactgcaggcttatgccgatgttcaggccgtgctcgccaagtatgatgacatcagcctgcccaagagcgccacaatctgttataccgctgctctgctgaaggcacgagctgtctccgacaaattctctcctgaggcggcttcacggagaggactgtccacagctgaaatgaacgctgttgaggctatccatcgcgcagtcgaatttaacccccacgtccccaaatacctgctggaaatgaaatccttgatccttccccctgagcatatcctgaagcgcggtgactccgaggctatcgcttacgcctttttccatcttgcccattggaagagggtggagggggcacttaacttacttcattgtacttgggagggaacattcagaatgataccttatcccttggaaaagggacatctgttctacccgtacccaatctgcaccgagacagctgacagagaacttttgccctcgtttcatgaggtgtcagtctatccaaaaaaggagctgccctttttcattctgtttacagctggtctgtgttcctttaccgcgatgttggcgttgctgacccaccagtttcctgagttaatgggcgtctttgcaaaggctatgattgatatcttttgcagcgccgagttcagggactggaactgtaaatctatcttcatgcgcgtcgaagacgaacttgaaatcccccctgcccctcagagtcaacacttccagaactag

SEQ ID NO: 242851 - DNA, 1500 bp, synthetic construct
  misc_feature 1..1500: note = Description of Artificial Sequence: Synthetic coding sequence
  source 1..1500: mol_type = other DNA
atgagtatgtttctgaatacgctaaccccaaaattctacgtagcgctcaccggaacctccagtctgatttcaggtcttatcctgattttcgaatggtggtatttcagaaagtatgggaccagctttattgagcaggtatccgtgagccacctccgacctttgctgggtggcgttgacaacaatagtagcaacaacagcaactcatcgaatggggattcggattcaaaccgccaatccgtgagcgaatgcaaagtgtggcgaaaccctctcaatctgttcaggggggcagaatataaccgttacacatgggtcaccggcagagagccactgacttattatgatatgaacttatccgcccaggatcaccagactttttttacctgcgactctgatcatctgcggcctgctgatgccattatgcagaaggcctggcgcgaaagaaatccacaggccagaatttctgcagcccacgaagcactggagataaacgagtgcgcaacggcttacatcttgttagccgaggaggaggcaactacgatagctgaggctgagaaactatttaaacaggcactcaaggcgggagatgggtgttatcggagaagccagcagttacagcaccacggctcacagtatgaggcacaacacaggcgggataccaatgtgttagtatatataaaacgtaggctagcaatgtgtgcacgaagattaggcaggaccagagaagcggtcaaaatgatgcgagatctgatgaaggagttccctctattgtctatgttcaacatccatgaaaaccttttggaggccctattggagcttcaagcatatgcagatgtacaggccgtactggccaagtacgacgatatctctctacccaagtcagccaccatttgctacactgcagcactccttaaagctcgggcagtttctgataaattcagcccagaggctgcttctagaaggggcctgtccacggccgaaatgaatgctgttgaagccattcacagggctgttgaattcaacccacacgttccaaaataccttctcgaaatgaagtctctgattctgccacctgagcacattttaaagcggggagactccgaggccatagcttatgccttttttcacttagcccactggaaaagggtggaaggcgcactgaatctcctgcattcatttcgcatgataccgtatcctctggaaaagggacacctcttctacccatacccaatctgtaccgagaccgctgatagggagctattaccaagctttcacgaagtgagtgtgtaccccaagaaagagctcccctttttcatcctgttcactgctggactttgtagttttaccgctatgctcgccctactaacacatcagttccccgagctcatgggcgtgttcgctaaagctttcttatctacactcttcgctcctctgaatttcgtcatggagaaggttgaaagtattcttccgtctagcctgtggcatcagctgactcgcatatag

SEQ ID NO: 242852 - DNA, 1536 bp, synthetic construct
  misc_feature 1..1536: note = Description of Artificial Sequence: Synthetic coding sequence
  source 1..1536: mol_type = other DNA
atgttcggaactgaatcctccctctcaatgtttcttaataccctgacacctaagttctacgttgcactgacgggaacttctagtttaatctctggcctgattttgattttcgagtggtggtactttcggaaatatggcacttcatttatcgagcaggtgtctgtgtcccacctgagacccctgctcgggggagtggataacaactcatccaataattcgaattctagcaacggtgattctgactctaatcggcaatctgtgtccgagtgtaaggtttggaggaatcccctgaacctgttccggggagcagagtataatcggtacacctgggtgacaggtagagaaccattaacatactatgacatgaatctgagtgcgcaggatcatcagacttttttcacatgcgacagcgaccacttacgacccgcagacgccattatgcagaaagcctggcgagagaggaaccctcaggccagaatatctgcagcccatgaagccctggagattaacgagtgcgcgaccgcttacatactactcgctgaggaagaggcaacaaccatagccgaggccgaaaagttgttcaagcaagccctgaaagcaggagacggatgctatcgccgtagccaacaattacagcatcatgggtcacagtacgaggctcagcatcggagagatacgaacgttttggtgtatatcaagaggcgcctggccatgtgcgccaggcgcttgggacggacgagagaagccgtgaagatgatgcgagatttgatgaaagaatttcccctcctgagtatgttcaatattcacgaaaacctgttggaggcgttgctggaactccaagcctatgcggatgtgcaagccgtcctggctaagtatgatgatattagtcttcctaagtccgctaccatctgttacaccgctgccctcctaaaggccagggccgtgagtgacaagttttcgcctgaggccgcatctaggagaggtctgtccactgctgagatgaacgcagtcgaggccatccatcgtgctgtggagttcaatccacacgtacctaaatatctgctggagatgaagagtctcattttaccccctgagcatatccttaaacgtggggattcagaggccatcgcgtacgcatttttccacctggcgcactggaaacgagtagagggagccctgaacctccttcattgcacatgggagggcacgttcaggatgattccttaccctcttgaaaagggacatctgttctacccttatcctatctgtacagagacggccgaccgtgaactcctcccaagtttccacgaggtgtccgtttatccgaaaaaagaacttccctttttcatcttgtttacagctggtttgtgttcattcacagctatgctcgccctgctgacccaccagttcccagagcttatgggagtgtttgcaaaggcctttctgtccactttatttgctccactgaattttgtaatggagaaagtggagtctatcctgcccagcagtctgtggcaccagctgacacggatctag

SEQ ID NO: 242853 - DNA, 1605 bp, synthetic construct
  misc_feature 1..1605: note = Description of Artificial Sequence: Synthetic coding sequence
  source 1..1605: mol_type = other DNA
atgttcggtaccgaaagcagcctaagtatgttcctaaacactctcacccccaaattctatgtagcactgactggcacgagttcacttatctctggtctgattctcatctttgaatggtggtacttccgaaagtatggtacatcttttattgagcaggtttccgtcagccacctgagacctctcctgggaggcgtggacaataattcttctaataattccaattcatcaaacggcgattctgactccaatcggcagtccgtgtctgaatgcaaggtttggaggaacccattgaatctctttcggggagcggagtataatcgttacacctgggtcactgggcgagaaccacttacttattatgatatgaatcttagcgcccaggatcatcagaccttcttcacatgcgatagcgatcatctgaggcccgctgatgcaatcatgcagaaggcctggcgagaacggaacccgcaggccagaattagtgcagcccacgaggctctcgaaatcaacgaaatccggtcccgtgtggaagtacccctgatcgccagcagcaccatttgggagatcaaactacttccaaaatgcgctacggcttatattctgttggctgaggaagaggcaaccacaattgctgaggccgaaaagctgttcaagcaagcgttgaaagctggcgatggatgttatagacggagtcaacaacttcagcaccatggttcgcagtacgaggcccagcacagaagagacacaaatgttctcgtatatatcaagaggcggctggccatgtgtgcacgcaggcttggacgaacccgggaggcagtgaaaatgatgcgggatctcatgaaggagttcccactgctgagcatgttcaacatccacgagaatctactggaggcccttctggaactgcaggcatacgccgatgtgcaggccgtgttagcgaagtacgatgacatcagtctgcctaagagcgctaccatttgctacacagctgcattactcaaggccagggccgtaagcgacaagttttccccagaggcagcgtccagacgcggactgagtactgccgagatgaacgctgtcgaggccatccatcgcgcagttgagtttaacccacacgtacccaagtatctgctcgagatgaaatccctcatcctgcctccagagcatattctcaagcgtggggattctgaagccattgcatatgcttttttccatctcgctcattggaaaagggttgagggggcactcaacctccttcactgtacctgggagggaaccttccgaatgataccctatccattggagaagggacatttgttctacccatatcctatctgcactgagaccgcagaccgggagctccttccctcttttcatgaagtctccgtctatcctaaaaaggagttgcctttcttcattttgttcaccgctggactgtgcagtttcactgcaatgctggcacttttgactcaccagttcccggaactaatgggggtcttcgctaaagcttttctctctacgctgttcgctcctctcaatttcgtgatggagaaggtagagtcgatactgccctctagcctctggcaccagcttactcgaatctag

SEQ ID NO: 242854 - DNA, 1665 bp, synthetic construct
  misc_feature 1..1665: note = Description of Artificial Sequence: Synthetic coding sequence
  source 1..1665: mol_type = other DNA
atggctgaggctgctaccgggttcctggagcagttgaagagctgtatcgtctggtcgtggacatatttatggacggtctggttctttatcgtcctgtttctagtctacatcctacgcgtacctctgaagataaacgacaaccttagtaccgtttccatgtttctgaataccctgacccctaagttttacgtcgcattgaccggaacatcctctctcataagtggactgatacttatcttcgagtggtggtacttccgcaaatatggaacctcatttatcgaacaggtgtcagtcagtcacttgcgcccacttctgggcggagttgataataacagctcgaacaacagcaatagctctaacggtgattctgactcaaaccgacagtcagtatccgaatgtaaagtgtggcgcaaccccctgaacctgtttcgcggagctgagtataacaggtacacctgggttacaggccgagagccactgacatactatgacatgaatctgagcgcacaagatcaccagacattttttacttgtgattccgaccacctccgtccggcagacgccatcatgcagaaggcctggagagaaaggaacccacaggccagaattagtgctgcgcacgaggcactggaaatcaacgagtgtgcaaccgcctacattctcctggctgaggaggaagccaccactatcgcggaagctgagaagctctttaagcaggccctgaaagccggagatggctgttatagacgttcgcagcagcttcagcaccatggcagccagtacgaagcccagcatcggcgagacacaaatgtcctggtctacataaaaagacggttggctatgtgcgccaggagactaggacgcaccagagaggccgtgaaaatgatgcgcgacttaatgaaggagttccccctgttatcgatgtttaacatccacgaaaacctcctggaggccctacttgagctccaggcctatgcggacgtacaagcagttttggccaaatatgatgacatctccctgccaaaatctgctacaatttgctacactgcggctctattgaaggcccgtgcagttagtgataaattttcccccgaggcggctagccggaggggcctcagcacagcagagatgaatgccgttgaagcaatacatagggctgtcgagttcaatcctcacgtccctaagtatcttcttgaaatgaagagtctcattctaccacccgaacatatcctgaaacgaggggactctgaagccatagcctacgccttcttccatcttgcccactggaagcgcgtggaaggagcgttgaacctgttgcattgcacatgggagggaacctttcgcatgataccctaccctctggagaaggggcatttgttttacccctatcccatctgcactgagaccgccgatcgcgaactgctgccctcgttccatgaagtctcagtttatccgaaaaaggagctcccattctttatcctgttcacagccggattatgtagttttactgccatgctggcactccttacacatcagttccctgaactaatgggggtttttgctaaagctttcttatccactctcttcgcccctttgaactttgtgatggagaaggtggaaagtatcctgcccagttccttgtggcaccagttgacacgcatctag

SEQ ID NO: 242855 - DNA, 189 bp, synthetic construct
  misc_feature 1..189: note = Description of Artificial Sequence: Synthetic coding sequence
  source 1..189: mol_type = other DNA
atgtctatgtttctgaacacacttacccccaaattctatgtcgcactgacaggaacgtcatctttaattagcggcctgattctgatttttgagtggtggtacttcaggaagtacggcacttcgtttattgagcaggtctcagtgtctcacctgaggccgcttctaggcggagtcgataacaattcatag

SEQ ID NO: 242856 - DNA, 264 bp, synthetic construct
  misc_feature 1..264: note = Description of Artificial Sequence: Synthetic coding sequence
  source 1..264: mol_type = other DNA
atgagtatgtttctcaatactctcacgcctaaattctatgtcgctctcactggcacaagctcacttatcagtggtctgatactgatcttcgagtggtggtatttcaggaagtatggcaccagctttattgaacaggtctcagtttctcatctccggcctctcctcggaggcgtcgataacaattcaagcaacaactccaacagcagcaatggagatagtgatagtaatcgtcagtcagtgtctgaatgcaaggtttggaggtag

SEQ ID NO: 242857 - DNA, 1323 bp, synthetic construct
  misc_feature 1..1323: note = Description of Artificial Sequence: Synthetic coding sequence
  source 1..1323: mol_type = other DNA
atggccgagaataatgagaacatatcaaagaatgtcgacgtccgtccaaagacttccagatcccgatccgccgacagaaaagatggctacgtctggagcggtaaaaagctgagttggtcaaaaaagtccgagtcatactccgacgccgagaccgtgaacggaatcgaaaagacagaggtgtcactccggaaccaagaacggaaacattcatgtagctcaatagagctggacttggatcactcctgtggccaccggttcctgggccgttcactaaaacagaagctgcaagatgccgtgggacaatgctttcccataaagaattgtagcagtcggcactcgtcaggcctgccctccaaaagaaagattcatatctccgaactgatgttagataaatgcccctttcctccacggtccgatcttgccttccggtggcacttcatcaagcggcacacagcacccataaattccaagagtgacgaatgggtaagcaccgatctgtcacagaccgaattgagggatggtcaactcaagagaaggaacatggaagagaacatcaattgtttctcccacaccaatgtgcagccctgtgtaatcacaacagataacgctctgtgtcgagaaggacccatgacaggttcagttatgaatctagtttccaacaactccattgaagactctgacatggattctgacgatgagattctcactttgtgtacctccagcaggaaacgcaataagccaaaatgggacctcgacgacgagatcctacagctcgaaacacctccaaaataccacacccagatcgattacgtgcattgtctcgtccccgacctgctgcagatcaacaacaacccctgttattggggcgtgatggataagtacgcagccgaggctcttttagagggcaaacccgagggcaccttcctgctccgagatagtgcccaagaagactacttgttttcagtttctttcaggagatactcaagaagcctgcacgcaaggattgaacagtggaaccacaatttctccttcgatgcccacgacccctgcgtgttccattccccggacatcacaggcctgctggaacactacaaagatcccagtgcctgtatgtttttcgaacctcttctttcaactcccttgatccgtacgttccccttctccctgcaacacatttgcaggaccgttatctgtaactgcaccacctacgacggtattgatgccctgcctattccgtcctccatgaagctgtacctaaaggaatatcactacaaatccaaggtcagggtattgcggatcgatgcacccgagcaacagtgctag

SEQ ID NO: 242858 - DNA, 1323 bp, synthetic construct
  misc_feature 1..1323: note = Description of Artificial Sequence: Synthetic coding sequence
  source 1..1323: mol_type = other DNA
atggctgagaacaacgaaaacatctctaagaatgtggacgtcaggcccaaaacctccagatcacggtcagcggatcggaaggatggttatgtctggtcaggaaagaaactgtcatggtcgaaaaagtccgagtcttactccgacgcagagacggtgaatggaattgagaaaaccgaagtttctctcagaaaccaggaacgcaaacattcttgcagctccatcgagctcgatctggatcatagctgtggacacaggtttctcgggagatccttgaagcaaaagctgcaggacgccgtagggcagtgctttccaatcaaaaactgtagtagccggcacagttctggattaccgtcaaaacgaaagatccacatttccgaactgatgctcgacaagtgcccattcccaccaaggtccgatctcgccttcaggtggcacttcatcaagagacacaccgctccaatcaactctaaaagcgatgagtgggttagcacagatctgtcacagaccgagctcagagacggccagctgaagcgccgaaatatggaggagaacataaactgctttagccataccaatgtgcagccatgcgtcatcaccaccgataatgccctgtgtcgcgaggggcctatgacaggctccgtgatgaacctagtaagcaataacagcatcgaggacagcgacatggacagcgacgatgagattctgaccctctgcacctccagccgaaagcggaataagccaaaatgggatctggatgacgaaatactgcagttagaaacaccgccaaaatatcatactcagatagattacgttcactgcctggtgcccgatctcctgcagatcaacaacaacccatgttactggggcgtgatggacaagtatgcagccgaagccttactcgagggaaaaccggagggaactttcctccttcgcgacagtgcccaggaggattacctttttagcgtcagctttcggaggtatagtcgaagccttcatgccaggattgaacaatggaatcataacttcagctttgacgcccatgatccctgtgtgtttcattcacccgatatcacgggtcttcttgagcattataaggacccgtcggcctgcatgttctttgagcctctcttgagcactcctctgatccgcacgttcccattcagcttgcaacacatttgtcgcactgtgatatgcaactgcacaacctacgacggtattgacgccctccctatccctagctcaatgaaactgtacttgaaggaatatcactacaagtctaaagtccgtgttctgcgaatcgacgctcccgaacagcagtgctag

SEQ ID NO: 242859 - DNA, 1323 bp, synthetic construct
  misc_feature 1..1323: note = Description of Artificial Sequence: Synthetic coding sequence
  source 1..1323: mol_type = other DNA
atggcagaaaacaacgaaaacatttccaagaacgttgacgtaagaccgaagacttcacgctcaaggagcgcagatcggaaggacgggtatgtgtggtctggtaagaaactatcttggagcaaaaaatccgagtcctactccgatgccgaaaccgtgaacgggatcgagaagaccgaggtgtccctccgaaatcaggaaagaaaacacagttgcagttcgatagaactcgatttggatcattcatgtggacatcgcttcttgggcagaagcctcaagcagaagctgcaggacgctgtgggacagtgcttccccatcaaaaattgttcatcacggcattcaagtggactgccctctaaaagaaaaattcacatatcagagctgatgcttgacaagtgtccctttccgcctaggtccgacttggcatttagatggcactttatcaagcggcataccgccccaatcaactctaaatctgatgaatgggtttccactgacttatctcaaacagaactgcgtgatggacagctgaagcggcgaaacatggaggagaacattaattgtttttcacataccaatgtgcagccttgtgttataactacggacaatgcactgtgtcgggaaggcccaatgaccggctctgttatgaacttagttagcaacaattcaattgaagatagcgacatggattctgatgatgagattctgaccctgtgcacctcgagcagaaagcggaacaagccaaaatgggatctggacgacgagattttacagctggagactccccctaaataccacacacagattgactatgtgcactgccttgtgcccgatcttctccagataaataacaacccttgctactggggggtgatggataaatacgccgctgaagccctgttggagggcaagcctgaaggcacctttctcttacgggatagtgcccaggaagactatctgttcagcgtatctttccgcagatattctcggagtttacatgcgagaattgagcagtggaatcacaatttcagcttcgatgcccatgatccatgtgtttttcattcccccgatatcacggggcttttggagcactataaagaccctagcgcatgcatgttctttgagcctcttctttcaacccccttgatcagaacgttcccattctcgttgcagcatatttgccgtaccgtaatctgcaattgtaccacatacgatggaatcgacgcattacctattccctcgagcatgaaactgtatctgaaggagtaccattataagtccaaggtccgagtgctgagaattgacgccccagagcagcagtgttag

SEQ ID NO: 242860 - DNA, 1611 bp, synthetic construct
  misc_feature 1..1611: note = Description of Artificial Sequence: Synthetic coding sequence
  source 1..1611: mol_type = other DNA
atggataaagttggtaagatgtggaacaacttcaagtatagatgccagaatcttttcggacatgagggtggctctagaagtgagaacgtggacatgaactctaaccggtgcctgtcagtaaaggaaaaaaacatctctataggagacagcacacctcagcagcagtcctctcctctgagagaaaacatagcgctccagctcgggctgtctccttcaaagaacagctccagacggaaccagaattgcgccacggagattccgcagatcgtggagatctccatcgagaaagacaacgattcatgcgtgacaccaggtacacgtctagccaggagagactcctactcccgccatgctccgtgggggggtaagaagaaacactcatgctcgacaaagacgcagtcctcactggacgctgacaaaaagttcggcagaaccagatctggacttcagcgcagggagcgtcggtacggagtgagctccgttcacgatatggacagcgtatcaagccgaacggtagggtcccgctcacttaggcaacgcctacaggatacggtcggcctgtgtttcccgatgcgaacatactctaaacaatccaagccccttttctcaaataagcggaagatacacctgagcgaactgatgctagagaagtgtcccttccctgcaggaagtgatcttgcccagaaatggcatcttatcaaacaacacaccgctccagtgagcccacactccacattttttgatacgtttgatcctagtcttgtctccaccgaagacgaagaagatagattacgcgagcgcaggagacttagtatagaggagggggtcgatccccctcctaacgcgcagatccacacatttgaggcaacagcccaggtcaatcccctgtataagctaggccctaagcttgcacccggtatgacggagatttcaggggactcatcagccatccctcaggccaactgtgattcagaggaggataccactactctgtgccttcagtcacgccgtcagaagcagagacagatttcaggagactctcatactcacgttagcagacagggggcttggaaggtgcatacccaaattgactacatccattgtctggtcccagacctgctacagatcaccggcaacccatgttattggggcgtgatggaccgatatgaagctgaggccctgttggaagggaaaccggaggggacctttctgcttcgcgattccgcacaggaggattacttgttcagcgttagttttcgcaggtacaacagaagcttgcacgcaagaattgaacagtggaatcacaatttctccttcgatgcccacgacccatgtgtgtttcacagcagcaccgttacaggccttctcgagcattataaggatccaagctcctgcatgttcttcgaacctttgctgacgatctccctgaatcggaccttcccgttctcactccagtatatctgccgcgcagtgatatgtcgctgtacaacctacgacgggatcgacggcctgcctcttcccagcatgctccaagactttcttaaagagtatcactataagcaaaaagtccgcgtgagatggcttgagcgcgagccggtaaaggccaagtag

SEQ ID NO: 242861 - DNA, 1611 bp, synthetic construct
  misc_feature 1..1611: note = Description of Artificial Sequence: Synthetic coding sequence
  source 1..1611: mol_type = other DNA
atggacaaggtgggcaagatgtggaacaattttaagtaccgctgtcagaatctgtttggtcatgaggggggatcccggtctgaaaacgtggatatgaactcgaaccggtgtttaagcgtgaaagaaaagaacatctccatcggtgactctacccctcaacagcagagctcccctctccgcgagaacatcgctctgcagctgggattgtccccaagcaaaaattccagtcggagaaatcagaattgcgctaccgagatcccacaaatcgtggaaatttccatcgagaaggacaatgatagttgcgtgacaccaggaactaggttggccagacgtgatagttactctcgccatgctccctggggcggaaaaaaaaagcacagctgcagcaccaagacacaatcaagtctggatgcagacaaaaaattcggcagaactcgcagcggactccagaggcgggagcggaggtatggtgtcagcagtgtccatgatatggatagcgtgtccagccgcactgttggctcacggtccctgagacagcggctccaggatactgtgggcctctgttttccaatgcgcacatacagtaagcagtctaaaccgttgttctcaaacaaacgaaagatccacttgagcgaactgatgctcgaaaaatgtccatttcctgctggctctgacttggcacagaaatggcatcttatcaagcagcacaccgcaccggtttcacctcactccaccttctttgacacttttgatccaagtctggtatccacggaagacgaagaggatcgcctgcgggaaagacgcagactcagcattgaggagggtgtcgatccccctcctaatgcacagatccacacttttgaagccacggcccaggttaatcctctctacaagctgggccctaaattggcaccgggaatgacagagatctcgggggactcaagtgccattccacaggcaaattgtgattctgaggaggacactacgactctgtgtctccaatccaggaggcagaagcagcgtcagatctcaggcgattcccacacccatgtctcaagacaaggtgcctggaaggtccacacacagatcgattatatccactgcctggtgcccgaccttttgcagattacaggcaacccatgttattggggcgtcatggaccggtacgaggccgaggctctgctggaaggaaagcccgagggaacctttctcctgagagattccgcacaggaggactacttattttcggtgtcctttcggagatataacagatccttacacgcaagaatcgaacagtggaatcataacttttctttcgacgctcatgatccttgcgtgttccattcaagcactgtgactggactcctcgagcattacaaggacccttcctcttgcatgtttttcgaacccctgctcactatctcgctaaatcgcactttccccttctctctccagtatatctgcagggccgtaatatgtaggtgtacaacctacgatggaattgacggtcttccactgcccagcatgctgcaagattttctgaaggagtatcactataaacagaaagttagagtgagatggcttgaaagggagcctgtcaaagctaagtag

SEQ ID NO: 242862 - DNA, 3264 bp, synthetic construct
  misc_feature 1..3264: note = Description of Artificial Sequence: Synthetic coding sequence
  source 1..3264: mol_type = other DNA
atgagtgacagtgaggattccaattttagcgaggaagaagattccgaacgctcctcggatggggaagaggcggaggtagatgaggagcgcaggagcgctgccggaagcgaaaaagaggaggaacctgaggacgaggaggaagaagaagaagaggaggagtacgacgaggaagaggaggaggaagatgacgaccgtccacctaagaagcccagacacggcggttttatactggacgaagccgacgtcgacgacgagtacgaagatgaagaccagtgggaagatggcgctgaagacattctggaaaaggaggagatcgaggctagcaatatagataacgtggttctcgacgaggaccggtctggcgcaagaagactgcagaacttgtggagggaccagagggaagaggaactgggcgagtactacatgaagaaatatgcaaagtcctccgtgggggagacagtttatggtggatctgacgaactttcggacgacattactcagcaacaactgctccctggggtgaaggacccaaacctgtggactgtcaaatgcaagatcggggaagagagggcaacagccatctccctgatgcgaaagttcattgcctaccagtttacggatacccccttacagatcaagtctgtggtggcacccgaacacgtgaaaggatacatttatgttgaagcatacaaacagacccacgtgaagcaggcaatagagggagtcggcaatctgcgccttggctactggaatcaacagatggtccccatcaaggagatgacggacgtgcttaaagtcgtcaaggaggtggctaacctgaagccgaagtcttgggtcagactcaagagaggaatatacaaggacgatatcgcccaagtagactacgtcgaaccaagccagaacacgatctccctgaaaatgatcccccgaatcgactatgataggataaaagcgaggatgagcctcaaggactggtttgctaagcgcaaaaagttcaagcgcccaccacagaggttgtttgacgccgaaaagattcgctctctgggaggagacgtcgcgtcagacggcgatttccttatctttgagggcaacaggtacagcaggaaaggctttcttttcaagtcctttgctatgagcgcagtgattactgagggggtcaaaccaacactatctgaattggagaaattcgaagatcagcccgaaggtattgatctggaggtggtgactgagagtaccggtaaggagagggagcataactttcagcccggagacaatgtggaggtgtgtgaaggggaacttattaatctgcaagggaagattctgtcagtggatggcaacaaaataactattatgcccaagcacgaggacctgaaagacatgctcgagttccccgctcaggaacttcggaaatactttaagatgggagatcacgtaaaagttattgctggccgatttgaaggcgacacaggactgatcgtgagggtggaggagaatttcgttatactcttctccgatctgacaatgcacgaattaaaggttctccccagagacttgcagttatgttcggagactgcttcaggcgtcgacgtcggcggacagcatgagtggggggagctggtccaacttgatccgcagacagtcggggttatcgtgcgcctggaacgagaaacattccaagtgctgaatatgtatggtaaagtcgtcacagtcaggcatcaggctgtcacacgcaagaaggataaccgatttgccgtcgccctagactcggaacaaaataatattcacgtgaaagatattgtgaaggtgatcgatggaccacattcagggcgagagggagagattcgacacctgtttagatccttcgcgttcctgcactgcaaaaagctggtcgaaaacggtggcatgttcgtctgcaaaaccaggcatttggtactggccggaggctctaaaccaagagatgtaacaaacttcacagtggggggtttcgctccaatgagccccagaattagcagccccatgcatccttctgctggagggcaacgaggaggctttgggagtcctggcggaggatctggtggcatgtctcggggaagaggtaggcgggacaacgaattgatcggacagacggtgaggatctcccagggaccatataaaggatatataggggttgtgaaagacgccaccgaatcaactgctcgtgtcgagcttcatagtacctgtcagacaattagcgtcgacaggcagagactgaccactgtaggaagtaggcgcccaggaggcatgacatctacctacggacgaacacctatgtacggcagtcagaccccaatgtacggctctggtagccgtacccccatgtatggatctcagacccccctccaagatgggtctagaacacctcactacggatcacaaacaccactgcatgatgggtcaagaacacctgcccagtcaggtgcttgggacccaaacaaccccaacactccatcccgcgcagaagaggaatatgagtacgcctttgacgatgaacctactcccagtccgcaggcgtatggcggtaccccgaaccctcaaactcccggttaccccgatccaagcagcccgcaggtgaatccccagtataatcctcagacccctggcacccccgctatgtataacaccgaccagttcagcccttacgctgccccttctccgcaggggtcgtatcagcccagcccctctccccagtcatatcaccaggtcgccccttcacctgctgggtaccagaatacccatagcccggcaagctaccacccaactccatctcctatggcctaccaggccagtccgtcaccctctcctgtcgggtacagcccaatgacacccggtgcccctagtccgggaggttataaccctcataccccaggctccggaattgagcaaaactcaagcgattgggtgaccactgatatacaagtcaaggtgcgggacacatacttggatacgcaggttgtgggtcagaccggggttatccgcagcgtgaccggtggaatgtgttccgtatacctcaaggactccgaaaaggtggtgtccatttcctccgaacacttggagccaattactccaactaagaacaacaaagttaaagttattctgggggaagaccgagaggccaccggcgtcctgcttagcatagacggggaggatggcatagtacggatggaccttgacgaacaactgaagatcctgaatctcaggtttcttggaaagctgctcgaagcatag

SEQ ID NO: 242863 - DNA, 3198 bp, synthetic construct
  misc_feature 1..3198: note = Description of Artificial Sequence: Synthetic coding sequence
  source 1..3198: mol_type = other DNA
atgtccgactctgaagattcaaatttttccgaggaggaagactcggagaggtccagtgatggggaagaagccgaagtagacgaagagagaagaagcgccgctggctcggagaaggaggatgacgatcggccaccaaagaaacctcgccacggaggctttatcctggacgaagcggacgtggacgacgaatatgaagatgaagaccagtgggaagacggagccgaggacattttggaaaaagaggaaatcgaggcatcaaacatcgacaacgtggtgctggacgaagatagatcgggcgcaagacggctacaaaacctttggagagaccagagagaggaggagctaggagagtactacatgaagaaatatgcaaaatcttctgttggcgaaacagtctacggtggatcagacgaactgtcagatgatatcacccagcagcaactcctgcccggagttaaggatccaaatctgtggaccgtgaagtgcaagatcggcgaggagcgtgccacggctatctccctgatgagaaaattcattgcctaccaattcacagacacacctctccagatcaagtcggttgtagcccctgaacatgtgaaaggttatatatacgtggaagcttacaagcagacccacgtgaagcaagccatcgagggagtaggtaatttaaggctgggatattggaaccaacagatggtaccaataaaggagatgactgacgtgctcaaggtggttaaggaggtggccaatctcaaacctaaatcttgggtccgccttaaacgcggaatctacaaagatgacatcgcacaggtggactacgtggaaccctcccagaatacaatatccttgaagatgatccccagaatcgattatgacaggatcaaagctcgtatgtcacttaaagattggtttgcaaagaggaaaaagtttaagcgcccaccgcagcgcctattcgatgccgaaaaaattaggtcattgggtggggacgttgccagtgacggcgatttcctcatttttgaggggaaccgatacagccgcaaaggctttcttttcaaatcttttgctatgagcgctgtgattacagaaggagtgaaacccaccctctccgagctggagaagttcgaagatcagccggaaggtattgacctggaagtagtcacggagtccaccggaaaagagcgtgagcacaattttcaacccggtgacaatgttgaagtctgtgaaggagagctgatcaacctgcaaggcaagattctgagcgtcgacggtaataaaatcacgataatgcctaagcatgaggaccttaaagacatgctcgagtttcctgcacaagaactcagaaagtattttaagatgggcgatcatgtaaaggtgatagcgggaaggttcgagggagacaccggcctaatcgtgagagtggaggaaaattttgtgatcctgtttagcgatctgaccatgcacgaactgaaggtgctgccacgagacctccagttgtgtagcgagaccgcctctggggttgatgtagggggacagcacgaatggggagagctggtacaactggatccgcagaccgtaggcgtgatcgttcgcctggagagggaaacttttcaggtgttaaacatgtacggcaaagtagtcacagtccggcaccaggcagtcacgagaaaaaaggacaacaggttcgccgtggccctggattcagaacagaacaacattcacgttaaagatatcgtgaaagtgatcgacgggccacactccggcagggagggtgaaattcgacacctgtttagatcattcgcatttttgcattgcaaaaaactggtggaaaatggagggatgttcgtgtgcaagacacgtcacttggtcctggccggagggtccaaacccagagacgtgactaattttacagtgggcggattcgcacctatgtcacccaggatctccagtccaatgcatccatccgcaggaggacagcgaggcggattcgggagccctggaggcggatccggcggaatgtccagagggagggggagacgtgacaacgagctgattgggcaaaccgtccgtatcagccaagggccatataagggatacataggggtcgtgaaggacgcaacagagtctacagctagagtagagctgcactcaacatgtcagaccatttccgtggacaggcagcgcctcaccaccgtcggatccaggcgtccagggggaatgacgtcaacctacgggcgaacccctatgtatggtagtcaaactcccatgtacggcagcggaagcagaacccccatgtacggatctcagacccctttgcaggacggcagtagaaccccgcactatgggagtcagacgcctctgcacgacggcagcaggacacccgctcagtcaggtgcgtgggaccctaacaaccccaataccccctctagggccgaggaagaatatgaatacgcctttgacgacgaacctacaccttctccacaagcctatggcggaacacccaacccgcaaacaccgggttaccctgacccatcctcacctcaggtaaacccacaatacaatccccaaacccctggcacaccagcgatgtacaataccgaccaattttctccatacgctgccccaagcccgcagggatcctatcagccgtcaccatctccccagtcataccaccaggtggcgccatcgccggcaggatatcagaacacccattctccagcttcataccaccccactccatcacctatggcttaccaggcatcacccagtcctagccctgtgggttattcacctatgaccccaggcgcaccaagtcctggcggttacaacccacatacacccggatccggcattgagcagaactcttctgactgggtgacaaccgacatccaggtaaaggtgcgtgatacctacctcgacacccaggtggtcgggcagactggggtcatacgctcggtgactggtggaatgtgctcagtctatctcaaggactcagagaaggtggtgtcaatctcgagcgagcacctggagcctattacgcctaccaagaacaacaaggttaaggtcattttaggagaagatcgagaagcaacgggggtgcttctctctatagatggcgaggacggcattgtgcgtatggacctggatgagcaacttaagattcttaatttgcggttcctgggaaagctactcgaagcatag

SEQ ID NO: 242864 - DNA, 3252 bp, synthetic construct
  misc_feature 1..3252: note = Description of Artificial Sequence: Synthetic coding sequence
  source 1..3252: mol_type = other DNA
atgtctgactccgaagattcgaatttctcagaggaagaagattccgagagatcctccgatggagaggaagcagaggtggatgaggagcgacgctcagcagctggtagtgaaaaagaagaggagcccgaggacgaggaggaggaagaagaggaggaggaatacgatgaggaggaggaggaagaggacgacgataggcccccaaaaaaacctagacatgggggtttcattctggacgaggctgatgtggacgatgaatacgaagacgaagaccagtgggaggacggggctgaggacattttggagaaagcaagcaacattgataacgttgtcctcgacgaagatcgatctggcgctagaaggctgcagaacctgtggcgggaccagagggaggaagagttgggagaatattacatgaagaaatacgctaagagttcggttggagagaccgtttatggaggatccgatgaactcagcgacgacataactcagcaacagctcctgcccggtgtgaaagaccccaatctgtggaccgtgaaatgcaagatcggcgaggagcgcgcaactgcgattagtttgatgcgcaaatttatcgcgtatcagttcactgacacccccctgcaaataaagtcagtggttgcccctgagcacgtgaagggctacatctacgtggaagcctataagcagactcacgtgaagcaggccatcgaaggggtcggtaacctgcggcttggttactggaaccagcagatggtgcccattaaagaaatgactgatgttttgaaagtggtgaaggaggttgcgaacctgaaaccaaagagctgggtgaggctgaagcgcggaatttataaagacgacatcgctcaggttgactacgtagaaccttcacaaaatactatctctcttaagatgattccccgtatcgattacgaccgcattaaagccaggatgtcactgaaagactggttcgctaagcggaaaaagttcaaacgtccaccccagcgcctctttgacgctgaaaaaattcgcagcctgggcggagatgtggctagcgacggcgactttctcattttcgagggaaaccggtactcgcgaaaaggattcctgtttaagagctttgccatgtcggctgttattactgaaggggttaaacccacattatcagagctggagaagttcgaagaccagccagagggaattgatctggaggtagtgaccgaatctaccggaaaggaacgagagcacaactttcaacccggagacaacgttgaagtgtgcgagggtgaactgattaacctccaagggaaaatcctcagtgtggacggcaataagattacaatcatgccgaagcacgaggacctcaaagatatgttagagttcccagcccaggagctgagaaagtactttaagatgggagaccatgtgaaggtcatcgctggccgatttgagggcgacacaggtctgatagtgagagtggaggagaacttcgtaatactcttctccgatcttacaatgcacgaactaaaggttctgcctcgggacctgcagctttgttccgagacagcctcaggagttgatgtcgggggacagcatgaatggggggagcttgtgcagttggaccctcagactgttggcgttatagtcagactggagcgcgaaactttccaggtcctaaacatgtacggaaaagtcgtgactgtgcgccatcaggcagtgactcggaaaaaggataatcgctttgcagttgcactggactcagagcagaacaatatccatgtgaaagatattgtaaaggtcatcgacgggccacactcagggagagagggagagatcaggcacctgtttaggagctttgcttttctgcattgtaagaaacttgtggagaacggaggcatgttcgtgtgcaagacccgtcatctcgttctggccggaggtagtaagccacgcgatgtcaccaacttcacagtcggtggcttcgctcccatgtccccgagaattagctccccaatgcatccatctgccggagggcaacggggagggttcggatcaccagggggagggtccggtggcatgagcagaggacgtggccgtcgggacaacgaactgataggccagaccgtgcgcatcagccagggtccatataagggctatatcggcgtcgtgaaggacgctacagaatccaccgcaagagtcgagctccactcaacatgtcagactattagcgtagatcggcagcggctgacaaccgtcggcagccgcaggcctgggggaatgaccagcacctacgggaggactccaatgtacgggagccagacgcccatgtacggatccggctcacgcacccccatgtacggttcacagacccccctgcaagatggctctagaacaccccactatggctctcagactcccctccatgacgggtctcgaactcctgcccagtccggggcatgggacccaaacaatccaaatacacctagcagagcggaggaggaatatgaatatgcttttgacgacgaacctacaccttctccccaggcttatggcggaacgcctaacccacaaactcccggatacccagatccgtccagtccccaagtgaatcctcaatataatccacaaacaccaggaacaccagctatgtacaatacagatcagttctcaccttatgccgctcctagcccgcagggatcctatcagccgagcccctcacctcaaagctaccatcaggtggccccatcacctgccggataccagaatacccactccccagcttcttaccacccgacgccatctcctatggcctaccaagcaagtccatcaccctctcctgttgggtatagcccaatgacacccggtgcaccgagtcctggcggatataacccacacactcctggaagcgggatcgagcagaactcctccgattgggtgaccacggacatccaggtcaaggtgagagacacttatttggatacacaagtcgtcggtcagactggcgttatccggtctgtaactggcggaatgtgttctgtctacctgaaagactctgagaaggtggtctcaatttcgagcgaacatctagaaccgatcacccctaccaaaaacaataaggtgaaagtgattctgggcgaggaccgcgaggctacaggggttctcctttccattgatggagaagacggaattgtgcgaatggatcttgatgaacagctgaaaattctgaacctgaggttcctgggcaagcttctggaggcttag

SEQ ID NO: 242865 - DNA, 3264 bp, synthetic construct
  misc_feature 1..3264: note = Description of Artificial Sequence: Synthetic coding sequence
  source 1..3264: mol_type = other DNA
atgtcagacagcgaggactcaaacttttcggaggaagaggactccgaacggtcatcagatggggaggaagcagaagtcgacgaagagaggagatcagccgctggatcggagaaagaggaagagcccgaggatgaggaggaggaagaggaggaagaggagtacgatgaagaggaggaagaggaagatgacgacaggccccctaaaaagccacggcacggtgggtttatcctggacgaggcagacgtcgacgatgagtacgaggacgaggaccagtgggaggatggagccgaagacatcctggagaaagaggagattgaagcctcaaatatagacaatgtcgttttggatgaggaccggagtggggcacggagactgcaaaatttatggcgagatcaaagagaggaagagctcggtgagtattacatgaagaagtacgccaagtcatccgtgggggagaccgtgtacggcggttctgacgagctgtcagacgacatcacgcaacagcagctgctaccaggggttaaggatcccaatttatggactgttaagtgcaagattggtgaggaacgcgcaaccgctatctccctgatgcgtaagtttatcgcttatcagttcaccgatacgcctctacagattaagtccgtagtagcacccgagcacgtcaagggatatatctacgtggaagcatataaacaaactcacgtaaagcaagcgattgagggggtcggtaatcttcggctgggatactggaaccaacaaatggtcccaatcaaagagatgaccgatgttctgaaggtcgttaaggaggtagccaacttgaagcctaaatcctgggttcgcctcaagcgcggtatctataaggacgatattgctcaggtggattacgtcgagccatcacagaatacaatcagcctgaagatgattccacgcatagattatgaccgcattaaggcccgaatgtcactgaaggattggttcgctaaaaggaagaagttcaagaggccccctcagaggctgttcgatgcagagaaaattcgaagcctgggcggagacgtggctagtgacggcgacttcctgatctttgagggcaacagatacagcaggaaaggctttttatttaagtctttcgcaatgagcgcagtgatcacagagggagtcaagcccaccctgagcgaactcgagaagtttgaggaccaaccggagggcatcgacctggaggtggtcacagaaagcactggcaaagaacgtgaacataatttccagccaggtgataacgtagaagtttgtgaaggtgaactgatcaacctgcagggcaaaatcctgagcgtggatggaaacaagattacaattatgccaaagcacgaggacctgaaggacatgctcgagtttcctgctcaggaactgagaaagtatttcaagatgggcgatcacgtaaaggtaattgcgggtagattcgagggcgatacgggcctcattgtgcgggttgaggagaactttgtgatcctgttcagcgatttaaccatgcacgagttgaaggtactcccaagggacctgcaactgtgtagcgagactgcatccggcgtggacgtgggaggccagcatgagtggggagagttggtccagctggacccccagaccgtgggcgtgattgtgcggctggagcgagagacttttcaggtgttgaatatgtatgggaaggtggttaccgttcgacatcaagctgtcactcgcaaaaaggataaccgtttcgccgtcgccctggattctgagcagaacaatattcatgttaaggatatcgtgaaagtgatcgacgggcctcactcgggcagagagggcgagatcagacatttgttccgatcctttgctttcctacattgtaaaaaactggtggaaaacgggggaatgttcgtctgcaaaactcggcacttagtgttagccggagggtctaagccaagagacgtcactaacttcaccgttgggggatttgcacctatgagtcctcgaataagttccccaatgcatccatctgccggaggtcagaggggaggttttggcagccccggagggggatctggtggtatgagtagggggagaggacggcgtgataacgaattaatcgggcagactgtgcgtattagccagggaccctataaggggtatataggagtggtgaaagatgccaccgaaagcactgccagggtcgaactgcatagtacctgtcagaccatctctgtggacaggcaaaggctgaccaccgtaggttcccgtagacctggcggaatgacatccacgtacgggagaacccccatgtacggttcacaaactcctatgtacggctcggggagcagaacccccatgtatggaagccagacaccgttgcaggacgggtcgcgcaccccccattatgggtctcagacaccgttgcatgacgggagccgaactccagcccaatcgggagcctgggaccctaataaccctaatacgccttctagggccgaggaagagtacgaatacgcctttgatgacgagcctaccccatctccccaggcctacgggggaacacctaacccccagacaccaggctacccggatccatcgagtccccaggtaaatcctcagtacaacccacagacccccggaacccccgctatgtacaataccgatcagttttcaccatacgccgcacccagtccacagggtagctatcagccgagccccagcccacaaagttaccaccaagtagcaccatcgccagctggttaccagaatacccattcgcccgcttcctatcatcccacgccttcccctatggcctaccaggcaagcccgagcccttccccagttggatactctccgatgactcccggagcgccaagcccaggcggatataacccccatactcctggatctggtattgagcagaacagttctgactgggtcaccaccgatattcaggtcaaggtccgtgatacctatctggatactcaagtggttggacagaccggggtcataagatctgttaccggcggaatgtgttcggtatatttgaaggattcagaaaaggttgtgagtatttctagcgaacacctggaaccaatcactccaacaaagaacaacaaggtaaaagtgatactgggcgaagaccgggaggccacaggtgtcctactcagcatagatggagaggatggaatcgtgcggatggacctggatgagcagctcaagattctgaatctccggttcttgggcaagttgctagaagcatag

SEQ ID NO: 242866 - DNA, 3264 bp, synthetic construct
  misc_feature 1..3264: note = Description of Artificial Sequence: Synthetic coding sequence
  source 1..3264: mol_type = other DNA
atgtccgactccgaggatagcaacttcagcgaggaggaggactctgagcggagttccgatggagaggaggctgaagtggacgaggagcgtagaagcgcggctggttccgaaaaggaagaagaacccgaggatgaggaggaggaggaagaagaagaagagtacgacgaagaagaggaggaagaggatgatgatagaccacccaagaaacctagacacggtgggtttatcttggacgaagccgatgtggatgacgagtacgaggacgaggatcagtgggaggacggcgctgaggacattctcgagaaggaggagatcgaagcctctaacatagataacgtcgtactggatgaagacaggagtggcgctaggcgcctgcagaatctttggagggatcagcgtgaggaggagctgggagagtactacatgaaaaaatatgccaaaagctcagtgggcgagaccgtctatggcggatcagatgagctcagtgacgatatcactcaacagcagctgctgcccggagtaaaagaccccaacctgtggactgtgaaatgtaaaatcggtgaggaacgcgctactgccatctcactgatgcggaagtttattgcgtaccagttcacagatacaccacttcagattaagagcgttgtggcaccagagcatgtcaaaggctatatctatgtagaggcgtacaaacagactcatgtgaagcaagccatagagggtgtgggaaatttgcgtctcggctattggaatcagcagatggttcccattaaagagatgaccgacgtgctgaaggtggtgaaggaagtggccaacctgaaaccaaagagctgggtgagattaaaaagaggaatttataaggacgatatcgcccaagtcgattacgttgagcccagccagaacacgattagcctgaaaatgatacctcgcattgattacgatcggatcaaggcgaggatgtcattgaaggactggtttgctaagagaaaaaaattcaagcggcctcctcaacggctgttcgatgccgagaaaatcagatctttagggggagacgtagcatctgatggggattttctgatcttcgaaggtaatcggtacagcagaaaaggctttttgtttaagtctttcgccatgtccgcagtgataactgagggcgtcaagccaacactctctgaattagagaaattcgaagaccaaccagaaggaatagacctagaggtagtgaccgaaagtacagggaaagagagggaacacaactttcagccgggtgacaacgtagaggtctgtgagggcgaactgattaacttacaaggcaaaattctgtcggtggatggcaataagattactatcatgcctaagcatgaagacttgaaagacatgttggagtttccggcacaggagttaaggaaatactttaagatgggggatcacgtgaaggtaattgccggacgattcgaaggcgatactggcttgatagtccgcgttgaggagaacttcgtaatcctctttagtgacctcactatgcacgaactcaaggttctgcccagggatctgcagttgtgctcggagactgcttccggggtcgatgtgggagggcagcacgaatggggcgagttggtccaactggacccccagaccgtaggagtgattgtccggctcgagagagaaacgtttcaggtgctgaatatgtacggaaaagtagtgacagtgcgacatcaggcagtgacgagaaagaaagacaataggttcgccgtcgcactcgactctgaacaaaataacattcacgtgaaagacatcgtgaaggtcatagacggccctcattcaggccgagagggagagatccggcacctgtttaggagcttcgccttcctccattgtaagaaactagtggaaaacggaggaatgttcgtgtgcaagaccagacacctagttctcgccggagggtcaaaacccagggacgtcactaacttcacggtaggtgggttcgccccaatgtcccctcgcatttcaagccccatgcaccctagtgctggcggacaaaggggcggatttggatctccaggcggaggaagtggaggaatgtcccgcggaagagggcgaagggacaacgagctgattgggcagactgttagaatatcccaggggccatacaaaggttacattggtgttgtgaaggatgccacagaatccactgcccgagtcgagctgcactcgacatgccaaacaataagcgtggatcgccagaggttgactacagtggggtccaggaggccaggcggtatgacatcaacctacggcagaacccccatgtacggtagccaaacccctatgtacggatccggttctagaacccccatgtatgggagccagaccccacttcaggatggcagccgaactccacattacggtagccagaccccgttgcacgatggatccagaacacccgctcagtctggcgcttgggacccgaacaatcctaataccccatcacgggctgaggaagaatacgagtatgccttcgatgatgagcctacccctagtcctcaggcttacggaggaaccccaaatcctcagacgcctggctaccctgacccatcttcccctcaggtaaacccccagtataatccccagactccgggtacacccgcaatgtataataccgatcagttctctccatacgctgccccaagtcctcagggtagctaccaaccctctccctctcctcagagttatcaccaggtggctccctccccagcaggctatcagaacacacacagccccgcaagttatcaccctacacctagcccaatggcctaccaagctagccccagcccatctccggtgggttatagccctatgactcccggtgcaccatcacccggtggatataatccccacacccctggatctggtatagaacagaattccagcgattgggtgaccacagatatccaggtgaaagttcgcgacacctacctcgatacccaggtcgtaggccagactggcgtaatccgaagcgtgaccggaggtatgtgcagcgtctatctcaaagattcagagaaggtggtctctatatcgtctgagcacctggaacccattaccccaacgaagaataacaaagtgaaagtgatattaggcgaggaccgggaggctacaggcgtccttctgtccatcgacggtgaggatggtatcgttcggatggatctggatgagcagttgaagatcctgaacctccgctttctggggaagctactggaagcctag

SEQ ID NO: 242867 - DNA, 3264 bp, synthetic construct
  misc_feature 1..3264: note = Description of Artificial Sequence: Synthetic coding sequence
  source 1..3264: mol_type = other DNA
atgtcagactctgaagattcgaatttctctgaagaggaggactctgagcgaagttctgacggggaggaagcagaggtcgatgaggagcggagatccgccgctggtagcgagaaggaggaagaaccagaggatgaagaagaagaggaagaggaggaagagtatgatgaggaagaggaggaagaggatgacgaccggcctccaaaaaagcccaggcacggcggatttattctggacgaagctgacgtggatgacgagtacgaggatgaggaccaatgggaagacggggcagaagacatcctcgagaaggaggagattgaagcttccaatattgacaatgttgtgctagacgaggacagatccggcgctcgccgtctgcagaatctctggcgcgaccagagggaggaggagctgggggagtattatatgaaaaagtacgccaaatcctctgtaggcgagacagtttacggcggttctgatgagctgtccgatgatataacccaacagcaactccttcctggcgtgaaggatcccaacttgtggactgtcaagtgtaaaataggcgaggagagagccaccgccatatcccttatgagaaagttcattgcatatcagttcaccgacacacccctgcagattaagagcgttgtggcccctgagcatgttaaagggtacatctatgtcgaggcttacaagcagacacacgtcaaacaagcgatcgaaggggttggcaatctgagattaggatactggaatcagcagatggtgcccataaaagaaatgacggacgtgctgaaggtcgtgaaggaagtcgccaacctgaaaccaaagtcttgggtgagactgaagcgtggcatatacaaggatgacatagctcaggtcgactatgtggagccctcacaaaacacgatcagcctcaaaatgatccccaggattgattacgatcgcataaaggctagaatgtcccttaaggactggtttgcaaagaggaaaaaatttaagcggccacctcagaggttattcgatgctgaaaaaattcggtccttggggggagatgtggcgtcagatggggacttccttatctttgaaggcaatcgatactcgagaaaggggtttctgtttaagagctttgctatgagcgccgtaattacagaaggggtaaagcctacactatccgagctagagaagtttgaggatcagcccgagggcattgacttggaggtagttactgaaagcacggggaaagaacgggagcacaatttccagccaggagataatgtagaggtgtgtgaaggggagctaatcaatctccaggggaagatactgagcgtggacggaaacaaaattaccatcatgccgaagcacgaagacctcaaggatatgctggagttccctgcccaagagcttcggaaatactttaaaatgggagaccacgtgaaggttattgcaggaagattcgagggtgataccggccttatcgtgcgggtagaggagaactttgtcatactgttcagcgacctcaccatgcatgagctaaaagttctccctcgggacctccagctgtgcagtgagacggcttcaggagtggacgttggtggtcagcacgagtggggtgagttagtacagctggatcctcagaccgttggcgtgattgtacggctagagcgtgagactttccaagtcctcaatatgtacggcaaagttgtcacggtacggcaccaggcagtaacgagaaagaaagataataggtttgccgtggctctggacagtgaacagaataacattcatgtgaaagacatagtaaaagtcatagatggccctcactctggtcgcgagggggaaataagacatctcttcagatcatttgcattcttacattgcaaaaaattggtggagaacgggggtatgttcgtgtgtaaaacaagacatttagtgcttgctggcggttctaagcctcgtgacgtcaccaattttactgtgggaggtttcgcacctatgagcccccgaatatccagtccaatgcatccatctgccggagggcagcggggtgggtttggcagccctgggggtggaagcggaggcatgagcaggggccgagggcgtagagataatgagctcattgggcagaccgtgcgtattagccaaggcccttacaaaggatatattggcgtcgttaaggatgccacagaatccacagcgagggtcgaattgcacagcacctgccagacgatttctgtcgacaggcagcgcctaacaaccgtgggctcccgcaggccaggaggaatgacctccacgtatggacgcacacctatgtatggcagccagacccctatgtatggcagcggtagccggacgcctatgtacgggtcacagacccctttgcaagatggatcaaggacccctcattatggttcccaaacccctttgcacgacggcagccggacacctgctcagtctggtgcttgggaccccaacaaccccaacacaccttccagagccgaggaggagtacgagtatgccttcgacgacgagccaacccccagtccccaggcgtacggagggacaccaaatccccagacaccaggctaccccgatcctagttcaccccaagtgaacccacagtataacccccagacccccggaacgccagcaatgtacaacacagaccaattcagtccctatgccgctccttccccgcagggatcttaccagccgagcccatcaccacaatcttaccaccaggttgctcctagtcccgcaggctaccagaacactcatagccccgctagctatcacccaacaccctcccccatggcgtaccaggccagcccgagcccctctccagtgggttacagcccgatgacacccggagccccatccccgggaggttataatccacacacaccaggctccgggatagagcagaactcgtcagactgggtaacaaccgacattcaggtcaaagtacgggatacctatctggacacacaggtggtaggccagaccggtgtgatccgttcagtgaccggcggaatgtgttctgtgtatttaaaagatagcgagaaagtggtgagcatcagcagcgaacacttggaacctatcaccccaactaagaataataaggtcaaggtgatcctcggtgaagacagggaggccaccggggttttgctgagcatagacggggaggatggcatcgttagaatggacttggacgaacagctaaagatcttaaacctcaggttcctgggtaagcttctggaggcctag

SEQ ID NO: 242868 - DNA, 5180 bp, synthetic construct
  misc_feature 1..5180: note = Description of Artificial Sequence: Synthetic coding sequence
  source 1..5180: mol_type = other DNA
atgagtgatttcgtggagagcgaggcagaggaaagtgaagaggagtacaatgatgaaggagaagtcgtcccacgggttactaagaagtttgtagaagaggaagatgacgacgaagaagaagaggaagagaatctggacgatcaggatgaacagggtaacctgaaggggtttataaatgatgatgacgacgaggacgaaggcgaggaagatgaggggtccgactccggagattccgaagatgacgttggccacaaaaaaagaaaacgcacatcttttgacgaccgactcgaagacgacgacttcgacctgattgaggagaacctgggagtgaaggtgaaacggggtcagaagtaccgaagagtcaaaaagatgtcagatgacgaggatgacgatgaagaagagtacggtaaggaagagcacgagaaggaggccattgccgaggagatctttcaagacggtgagggggaggaagggcaggaggcaatggaggcccctatggctccacccgaagaggaagaggaggacgatgaagaaagtgacattgacgacttcattgtggacgacgacgggcagcccctcaagaagcccaaatggaggaagaaactgcccggttacactgacgccgcactgcaggaggctcaggagatattcggggtagattttgactacgacgaattcgaaaagtataatgagtacgacgaagagctcgaggaggagtatgagtacgaagacgacgaagccgaaggcgaaattcgggtccgtcccaaaaagactaccaaaaagcgggtgagtcgtcgctcgatattcgaaatgtatgagccctctgagctggaatcctctcatctcacagatcaggataacgaaatccgcgcaacagatttacccgaacgctttcagcttcggtcaataccagtcaaaggagcggaggatgacgagctggaagaggaggcagattggatatacagaaacgcctttgcgacacccaccatttcactgcaggagagctgcgactacctggatcggggacagcccgcttcctcgttttcccgcaagggccctagtactatccaaaagatcaaggaggcgctaggatttatgcggaatcagcatttcgaggtgccattcatcgctttctaccgcaaggagtacgttgagcccgaactgcatatcaacgatctctggagagtctggcaatgggacgagaagtggacgcagctgagaatacggaaggagaatctgactcggctattcgaaaagatgcaagcctaccagtatgaacagatttcagctgatcccgacaagccattagccgatggcatcagggctttagatacaactgacatggagagactgaaagatgtccagtccatggacgagcttaaggatgtctataatcacttcctgctctattatggaagagacatacccaaaatgcaaaacgcagcaaaggccagtagaaagaagctgaaaagagtcagggaagaaggcgatgaagaaggggaaggcgatgaagcagaagacgaagaacaaagaggacccgagttgaagcaggccagtcgacgggacatgtacacaatttgccaatcagccggactcgatgggctggcaaaaaagttcgggctgacaccagagcagtttggggaaaacctgcgcgacagctaccagcggcatgagacagaacaattccccgctgaacctctcgaactggctaaggactacgtgtgcagtcaatttcctacgccagaagccgttctggagggcgcacgatatatggtggccctgcagattgcaagagagccgctcgtgaggcaagttctcaggcaaacctttcaagagcgcgcaaaactcaatatcacccctacgaaaaagggtaggaaggatgttgatgaggcccattatgcttattcctttaagtatcttaagaacaaaccagttaaagagctacgcgatgaccagttcctaaaaatatgcctggcagaggacgagggacttctgaccacggacataagtattgacttgaaaggagttgagggttacggaaatgaccagacatacttcgaggagatcaagcagttttattatcgagacgaatttagccaccaggtccaggaatggaaccggcagcgtactatggcaattgaaagggctcttcagcagttcttgtatgtgcaaatggccaaggagttaaaaaataagctgttagccgaagctaaggagtacgtgatcaaagcttgcagccgaaagctgtacaactggctgagggtggcaccctaccgtcctgaccaacaggtagaggaggacgacgactttatggacgaaaatcaagggaaaggcatccgggtactcgggattgccttttcaagcgcacgggatcaccccgtattctgcgctcttgtgaacggcgaaggcgaagtcaccgactttctgcggcttccacatttcacgaaaagacgtaccgcatggagggaggaggagcgtgagaagaaagctcaggatattgagacactcaagaaattccttcttaacaaaaaaccccatgttgtaacggtggcaggcgaaaacagggatgcacaaatgctcatagaagacgtcaagcggatcgtgcatgagctggatcaggggcaacaactcagctccataggcgtagagctcgtggacaacgaactcgcaattctctacatgaattctaagaaatctgaggcagagtttcgagattatcctcccgttttgcgacaagcagtttctctggcacgtcggattcaggatcctttgatagaatttgcacaggtgtgctcttccgacgaggacatcctatgtctaaagttccacccccttcaggaacatgttgttaaagaagaactgctgaacgccctctactgcgagttcatcaacagggtgaatgaggttggagtcgacgtaaatcgagccatcgcacacccctactcccaggcgctcattcaatatgtctgtggcctgggcccacgcaagggaacacatttgctgaagattctcaaacaaaataatacaaggctggaatccagaacgcaactcgtcaccatgtgtcacatgggacctaaagtgttcatgaattgtgcaggcttccttaaaatagacacagcctcactcggtgattctactgacagctacattgaagtattggacggcagccgcgtccacccagaaacttatgaatgggcgagaaagatggcggtagatgcactggaatatgacgaatccgcagaagatgccaaccctgcaggcgcacttgaggagattttggagaacccagaaagattgaaagacctggacctcgatgcgtttgcggaggaacttgagagacagggttacggagataagcatatcaccctgtacgatataagggcagagctgtcctgtagatataaggacctgcgcaccgcctatcgttctccaaacacggaggagatttttaacatgctaacaaaagagacacctgagaccttttatattggaaaactgattatttgtaatgttacgggtatagcgcaccgcagaccccagggcgaaagctacgatcaggcaattcggaatgatgagacaggcctgtggcagtgtcctttttgtcagcaggataacttccccgaactatccgaggtctggaaccacttcgatagcggatcctgcccgggacaagcgataggtgtgaaaacaaggctggacaatggagtgacaggattcatcccaacaaagttcctgtccgataaggtggtgaagcgccctgaagaacgagtgaaagtggggatgaccgtccattgtcgcatcatgaaaatcgatattgaaaaattttctgcagatctcacatgccgcaccagtgatctcatggacaggaacaacgaatggaaactgcctaaggacacatactacgattttgatgccgaggctgccgatcacaaacaggaggaagacatgaaacggaagcagcagcgcaccacctacataaaaagggtgatcgcacacccatcctttcacaatataaattttaagcaggccgaaaagatgatggaaacgatggaccagggcgatgtgattattcgcccatctagtaagggcgaaaatcatctgactgttacctggaaagtgtccgacggcatctatcagcacgtggacgtcagggaggaaggtaaagaaaacgccttttcattgggggctacgctctggatcaatagtgaagagtttgaagatctggatgaaattgtcgcacggtatgtgcaacctatggccagctttgctcgcgatctgctcaaccataagtattaccaagactgctctgggggagacaggaaaaaactcgaggagctgcttattaagacaaaaaaagagaagccgacctttattccctacttcatttgcgcctgcaaagaacttcctggcaaatttttgctggggtaccagcctcgaggcaagcctcgcatcgaatacgttaccgtcacccccgaaggcttcaggtacagagggcagattttccccaccgtgaatgggctgttcagatggttcaaggaccactatcaggatccagtcccagggatcactcccagctcatctagtcgtacacgtacccccgcttctatcaatgctacaccagcgaatataaacctcgccgacctcacacgtgccgtcaacgcactccctcagaacatgacatcccagatgttctccgctatagctgctgtcacaggtcagggccagaaccccaatgccacccccgcacagtgggccagttcacaatacgggtacggagggagcggcggaggctcgtctgcttaccacgtttttcccacccccgcacagcagcccgtggcaacacctcttatgaccccttcttatagctatacaactccctcccagcctattaccacaccccagtaccaccagttacaggccagtacgactccgcagagcgcgcaggcccaaccacaaccaagcagctcctcacgacagcggcaacagcagccaaagtccaattctcacgcagccattgactggggtaaaatggccgagcaatggttgcaggagaaggaggctgagcgcaggaagcagaagcaacggttgacaccaaggccatctccgagcccgatgatcgagagcacacctatgtccatcgctggggacgcaactcccttacttgacgagatggaccgcta

SEQ ID NO: 242869 - DNA, 2181 bp, synthetic construct
  misc_feature 1..2181: note = Description of Artificial Sequence: Synthetic coding sequence
  source 1..2181: mol_type = other DNA
atgtctgacttcgtcgaatcagaggccgaggagtctgaggaggagtataacgatgagggcgaggtggtgcccagggtgacaaaaaagtttgtcgaggaggaggacgacgacgaagaggaggaggaggaaaatctcgatgatcaggacgaacaagggaatctcaagggttttatcaacgacgatgacgatgaggatgagggggaagaggacgaagggagcgactctggagactcagaagacgatgtgggacataaaaaaagaaagaggacctccttcgatgatagactggaggacgacgactttgatctaatcgaggaaaacttgggggtaaaagtaaagcgcggtcaaaagtaccgcagagtcaaaaagatgagcgatgacgaggatgacgatgaggaagagtacggcaaagaggagcacgaaaaggaagccatcgcagaagagatattccaagacggggagggcgaggagggtcaggaggcaatggaagcgcctatggcaccgccagaagaagaagaggaagacgacgaggagtcagatatcgacgattttatcgtggacgatgacggccagcctttaaagaaaccgaaatggcgaaaaaaattaccgggatacacagatgcggctctgcaagaggcccaggaaatcttcggtgttgatttcgactatgatgagtttgaaaagtataacgaatacgatgaggaactggaagaagaatatgagtacgaggacgacgaggctgagggagaaatacgcgtccgacctaagaaaacgaccaagaagcgggtaagccggcgatccattttcgaaatgtacgagcctagcgagcttgagtcaagccatctgaccgaccaggataatgaaatccgtgctactgacctccccgaaaggtttcagctgcgctccatccccgtgaaaggcgctgaggatgacgaactggaggaggaagctgactggatataccggaatgccttcgcaacccctaccatcagcctccaggaatcttgcgactacctggaccgaggccagccagcatccagcttttcacgaaaggggccttctaccatacagaaaatcaaggaagcgctcggcttcatgaggaaccagcacttcgaagtcccattcatcgccttttatcgtaaggaatacgtggaaccagagctacatataaacgatctgtggcgtgtgtggcaatgggacgaaaaatggacccaactgaggatccgcaaggagaacctaacaagacttttcgagaaaatgcaggcctatcagtatgagcagatatctgcagatcccgacaagcccttggctgacgggatacgcgctcttgacactactgacatggaacgcctaaaggatgtgcagtcgatggatgagctcaaagacgtttataaccattttttactgtactacggtagagatattcccaagatgcagaatgccgctaaagcctcaagaaagaaactgaaacgggttcgcgaagagggcgacgaagagggggaaggagatgaggctgaggacgaagaacagcgcggacccgagctgaagcaggcgtctcgacgggacatgtacactatctgtcagtctgcgggactcgatggtctggctaagaagttcggccttacacccgagcagtttggcgagaacctgcgggattcttatcagaggcacgagacagaacagttcccggctgaaccactcgaactcgcgaaggactatgtctgcagtcagtttccaacacccgaagcagtgttggaaggtgccagatacatggtcgcgctacagatcgccagagagcctctcgtgagacaggtcctccgccaaacattccaggagcgggctaaattaatgacaccctcatactcctatactactcccagtcaacccatcacaacccctcagtatcaccagctgcaggccagcactacacctcagtcagctcaggcacaaccccagccctcctcttcttctcggcaacgacagcaacagccaaagtccaatagccatgctgccatcgactggggcaaaatggctgaacagtggctgcaggaaaaggaggcggagcggagaaagcagaaacagcggttgacaccacgaccctcccccagtcctatgatcgagagtacccctatgagtatcgctggggacgccactcccctgctcgatgagatggaccggtag

SEQ ID NO: 242870 - DNA, 2361 bp, synthetic construct
  misc_feature 1..2361: note = Description of Artificial Sequence: Synthetic coding sequence
  source 1..2361: mol_type = other DNA
atgtccttcagtcgcgcactgctgtgggccagactacccgctggacggcaggctggacacagagcagctatttgcagcgccttacgccctcattttggaccattccctggagtcctggggcaagtcagcgtcctcgctactgcctcttctagcgcgtccggtgggtcaaaaattcccaatacgtccctattcgtacccctgaccgtaaagccccagggtccatcagccgacggggacgtgggtgcagaactgacaagacctctggataagaacgaggtgaaaaaagtgctggataaattctacaaaaggaaagagattcaaaaactgggagccgactatggactagacgctcggctgttccatcaggcgtttattagctttagaaactatattatgcagtcccattcccttgatgtggacatacatatcgttctgaacgatatttgtttcggggctgcgcacgccgatgatctgttccctttctttcttcgacacgccaagcagatcttcccagtgctggattgtaaagacgatctgaggaagatctcagacttgcgaatcccaccgaactggtaccccgacgctcgagctatgcagcgaaaaattattttccacagcgggccaaccaattcaggcaagacgtaccacgcaattcagaaatacttctcagcgaagtccggggtttactgcggcccactcaaactgctcgcccatgaaatttttgaaaaatccaacgcagcgggagtgccctgcgacttagtaactggtgaggagcgggtgaccgtgcagccaaatggcaaacaggcttctcatgtgtcctgcactgtggagatgtgttcagtgacgactccctacgaggttgccgtgattgatgaaatccagatgataagggaccctgctcgcggatgggcatggacccgggctctcctgggcctgtgcgccgaggaagttcacctgtgtggtgagcccgcagcgatcgacctagtcatggagctgatgtataccacaggggaggaggttgaggtacgcgattataagaggctgactccgatttctgtgctagatcatgccctagagagcctcgataatctgcggccaggagactgcattgtctgcttcagcaaaaatgatatctacagtgttagccgccaaatcgagatacgagggctggagtcggccgtcatatatggaagcctgccaccaggaaccaaactggctcaggcaaagaaattcaacgacccaaatgacccatgcaagatccttgtcgcaacagatgctatcggaatgggtctcaacctctcgattcgaagaattatattctattcattgatcaagccttctatcaacgagaagggggagcgggaactggaaccgatcacaacaagccaggcactccagatcgcgggaagggctggccgattcagcagtcgctttaaagagggcgaggtcaccactatgaatcatgaagacctctcgttactgaaggaaatccttaagcgcccagtcgatccgataagggcagccggtctacatcccaccgccgaacagatcgagatgtttgcttatcacctccccgatgcaacccttagcaatctgatcgacatatttgttgacttctctcaggttgacgggcagtattttgtgtgtaacatggatgactttaagtttagcgccgaactgatccagcacataccactctcgctgagggtgaggtacgtcttctgtactgcacctattaataagaagcaaccattcgtgtgctcatctcttctgcagttcgcccgtcagtatagtcggaacgagcccctgacattcgcctggctgagaagatacattaagtggccactgctgccaccaaagaatatcaaagatcttatggacctagaggccgtgcacgatgtgctggatctgtatttgtggctctcctacagatttatggacatgttcccagatgcttctttaatcagagatctgcaaaaggagcttgacggtatcattcaagatggggttcataatatcactaagctgatcaagatgagcgaaacacacaaactgctaaaccttgagggattccccagcggctcacaatctaggttaagcggcaccctcaagagtcaagctcgccgaacgaggggaacgaaggcactcgggagcaaggctacagaacctccttcacctgacgccggagagctttctctggcttctaggctggtgcagcagggactgctcacccctgatatgctaaaacagctggaaaaagagtggatgactcagcagaccgagcataacaaagaaaagactgagagtggaacacaccccaaaggcaccaggcggaaaaagaaggagccggatagcgattag

SEQ ID NO: 242871 - DNA, 792 bp, synthetic construct
  misc_feature 1..792: note = Description of Artificial Sequence: Synthetic coding sequence
  source 1..792: mol_type = other DNA
atgtcattctctcgggcactcctatgggcacgcctccccgcaggcagacaggccggacacagggcggcaatctgcagcgcgctgaggccacattttggccctttccccggagtgctgggccaagtcagcgtgctggcgactgcctcaagtagcgccagcggtggctccaagatcccaaatacatcgctgttcgtgcccctgactgttaaacctcaaggcccttctgccgacggcgacgttggcgcagaactcaccagacccctggacaaaaacgaagtggccgtgattgatgagattcagatgatccgcgatccagcgagaggctgggcatggacccgcgctctactgggcttgtgcgccgaggaggtgcatctgtgcggagagcctgcggctatcgatttggttatggagctgatgtacactaccggggaggaagtggaggtccgcgattataaacggctgactcccatttccgtgctggaccacgcattggaaagcctagataatctgagacccggtgactgcatcgtgtgttttagcaaaaatgatatctattccgtttcacgccagatcgaaattcgcggacttgagtccgctgtgatttatggttccctcccgccaggcacaaagcttgctcaagcaaagaaattcaacgaccctaatgacccctgcaaaatcctggtggccacggacgctattgggatgggcctcaatctttccatcaggcgcatcatcttctattctcttatcaaaccttccattaacgagaaaggggagagggagctggagtag

SEQ ID NO: 242872 - DNA, 1233 bp, synthetic construct
  misc_feature 1..1233: note = Description of Artificial Sequence: Synthetic coding sequence
  source 1..1233: mol_type = other DNA
atggccgctgtgggcgctgaggctagaggagcttggtgcgtaccttgcctcgtgtcactcgataccctccaagagttgtgtcgtaaagaaaaactcacttgcaaatctatcgggatcaccaaacgaaatctgaataattacgaagttgagtatctatgtgattataaggtagtgaaggatatggagtactatcttgtgaaatggaagggctggcctgactctaccaacacctgggagccacttcagaatctgaagtgtcccctgctattacagcagttttcgaatgataagcacaattatctcagtcaagttaagaagggcaaagctatcactccaaaagataacaacaaaaccctcaagcctgccatcgccgagtacatcgttaagaaagccaagcaacggattgctctccaacgatggcaggatgagctgaacaggaggaagaaccacaaaggaatgatctttgtagagaatactgtggatctcgagggcccaccctcagacttttactatattaatgaatataaacctgcccctggtatctcactggtgaacgaggctacatttggttgctcttgtaccgattgcttttttcaaaaatgttgtccagccgaagccggagttttgttggcatacaacaaaaatcaacagatcaaaatccctccgggtactcccatctatgagtgtaactctagatgtcagtgcggacctgactgccctaatagaatagtgcaaaagggtacccaatactcactttgcatctttagaacctcaaatggcaggggctggggggtgaaaacactcgttaagataaaacggatgagctttgtaatggaatacgtgggtgaggtcatcacatctgaggaagccgagcggagaggtcagttttatgacaacaaaggcataacctacctgttcgaccttgattatgagagcgacgagtttaccgtcgatgccgcaagatatggtaacgtgagtcacttcgtcaatcactcttgcgaccctaacctccaggttttcaatgtctttatagataacctggatactaggctgccacgaatcgctctgtttagtactagaacgatcaacgctggcgaagaactgacatttgactatcagatgaaaggatctggagacatcagttccgattccatagaccactctccagccaaaaagcgagtgagaactgtttgtaagtgtggagctgtgacatgccggggttacttgaactag

SEQ ID NO: 242873 - DNA, 693 bp, synthetic construct
  misc_feature 1..693: note = Description of Artificial Sequence: Synthetic coding sequence
  source 1..693: mol_type = other DNA
atggccgctgttggggctgaagcccgaggggcttggtgcgtgccttgtctggtttctttggatactctccaggagctgtgccgcaaggagaaacttacctgtaaaagcattggaataactaagcgaaatcttaataattatgaggtcgaatacttgtgcgactataaggttgtcaaagacatggagtactatcttgtgaaatggaaaggatggcctgacagcacgaatacctgggagcctctgcagaacctcaagtgcccactcctcctgcagcaatttagcaacgataaacataactatttgtcgcaagtcataacctcagaggaagccgaaagacgcggacagttttacgacaacaagggtattacgtacctctttgacctggactatgaatccgacgagtttaccgtggacgccgcacgctatggcaatgtatcgcactttgtcaatcacagttgtgatcccaaccttcaggtcttcaacgtcttcatcgacaacctcgacaccaggttgcccaggattgcgttgttcagtacccgaactataaatgccggagaagaactgacatttgactatcagatgaaaggttccggcgatataagctccgatagcatcgaccacagccctgctaaaaagcgggtgcgtaccgtgtgtaagtgcggagctgtaacatgtaggggctacctcaattag

SEQ ID NO: 242874 - DNA, 459 bp, synthetic construct
  misc_feature 1..459: note = Description of Artificial Sequence: Synthetic coding sequence
  source 1..459: mol_type = other DNA
atggagtactaccttgtaaaatggaaaggatggccggattccaccaatacgtgggagccactccagaatctgaagtgccccctgctcctccagcagttcagtaatgataaacacaactatttgtcccaggtgatcacaagcgaggaggcggagagacggggacagttctatgacaataaaggaatcacataccttttcgatctcgattatgaatcagacgaatttaccgtggatgccgctcggtacggcaacgtgtcccacttcgtgaaccacagctgtgatccgaatctgcaggtatttaacgtctttatcgataatctagatacaaggctccccaggatcgcccttttcagcacccggactataaatgccggagaggaactgacctttgattatcagatgaaaggcagtggtgatattagttctgatagtatcgaccattctcctgcaaagaagtag

SEQ ID NO: 242875 - DNA, 1053 bp, synthetic construct
  misc_feature 1..1053: note = Description of Artificial Sequence: Synthetic coding sequence
  source 1..1053: mol_type = other DNA
atggaatactacctggtcaagtggaaaggatggccagactctacaaacacttgggaaccgttgcagaacctcaagtgtcccttgttgctgcagcagttttccaacgataagcataattatttgagccaagtgaagaagggaaaggctattaccccaaaagataataacaaaactcttaagccagccatcgccgagtacatcgtgaaaaaggcaaagcagcgaattgcccttcagcgttggcaagacgagcttaaccgacgaaaaaaccataagggcatgatcttcgtcgagaatactgtagatctggaggggcctccctccgatttctactacatcaacgaatacaaacccgcacctgggatctctctggtgaacgaagcgacctttggatgctcctgcaccgactgcttcttccagaaatgttgccctgctgaggccggtgttctgctggcgtacaataaaaatcagcagatcaagattcctcccggaactcctatatacgagtgcaatagtagatgtcaatgcggcccagactgtccaaatagaatcgtgcaaaaaggaacccagtattctctctgtatcttccgcacttccaatggcagagggtggggtgtgaaaacgctggtgaaaataaagcgcatgtctttcgtaatggagtatgtcggtgaggtgatcacaagcgaggaagctgagaggagaggacagttctacgacaacaagggtattacatacctgtttgacttggattatgaatctgatgaattcacagtcgacgcagcacggtatggcaacgtatctcatttcgtcaaccattcatgtgacccgaacctccaagtgttcaatgtgttcatagataatctggacactcgccttccaagaattgcactgttctcaaccaggaccatcaacgctggtgaggagctgacatttgattatcaaatgaagggaagtggtgatatttcaagtgactcaatcgaccacagtccagccaagaagcgtgttcgaactgtgtgtaagtgcggcgctgtgacctgtagggggtacctgaactag

SEQ ID NO: 242876 - DNA, 2658 bp, synthetic construct
  misc_feature 1..2658: note = Description of Artificial Sequence: Synthetic coding sequence
  source 1..2658: mol_type = other DNA
atgaagtggttgggggagagcaaaatcatggtggtcaatggcagaaggaatggaggaaagttgagcaatgaccaccagcaaaaccagagcaagctacagcacaccggtaaggacacactgaaggctggaaagaacgctgtcgagagacgctcaaaccgatgcaacggcaattccggatttgagggccagtcccggtatgttccgtcgagtggaatgtcagcaaaagagttgtgtgagaacgacgacctagctacgagcctcgtccttgacccatatctcggcttccaaacacataagatgaacacctctgccttccccagtagaagctctcgtcacttctcgaagtccgacagcttcagtcataacaaccctgttcgtttccgacccattaagggtaggcaggaagagctcaaagaggtcatcgaaaggttcaagaaggacgaacacctcgagaaggcgtttaaatgtctgacatctggcgagtgggcccgacactacttcctgaacaaaaataagatgcaggagaagctctttaaggagcacgtgttcatttatctcaggatgtttgcaacagacagcggtttcgagatcctgccctgtaaccgatattcttctgagcagaatggagctaagatcgtcgctaccaaggagtggaaaaggaatgataaaatcgagttgctcgtgggctgcatcgcagagctgtcggaaatcgaagaaaatatgcttctgaggcacggagagaacgacttctccgttatgtacagcactagaaaaaattgcgcacaactgtggctagggccagcagcgttcatcaatcacgattgccggcctaattgcaaatttgttagtaccgggagggacaccgcttgcgtgaaagctttgagagacattgaacccggagaagaaatcagctgctattatggcgacggattcttcggcgagaataatgagttttgcgaatgttacacatgtgaacgcaggggaacaggggcttttaagtcccgcgtagggctcccagctccagcccctgtgattaacagtaagtacgggctcagggagaccgacaaacgacttaacagactcaagaagttaggggactcttcaaaaaactccgactcacagtccgttagcagcaacacggacgcagatacaactcaggagaagaacaacgcgacctctaaccggaagagttcagtgggtgtcaagaagaatagcaagtcccgaaccctgacacgtcagagtatgtctagaattcctgccagctccaatagcacgtccagtaaacttacccacattaacaacagccgggtacccaagaagcttaagaagcccgcaaaacccctgctgtctaaaatcaagctgcggaatcattgtaaacgtctggagcagaaaaacgcctccagaaagctggagatgggtaacctcgtccttaaggaacccaaagtcgtgctgtataagaacttaccgatcaagaaggacaaggagcctgaaggtcctgcacaagcagcagtggcgagcgggtgcttgacacgccatgctgcaagggaacacagacagaaccccgtccggggagctcatagccagggagagagtagtccctgcacctacatcaccagaaggagtgtgagaactagaaccaatctaaaggaggcatccgatatcaaattagaaccaaacaccctcaacggttataagtcttcggtgactgaaccgtgcccagatagcggagagcagctgcagccggctcccgtccttcaagaggaagagctggcacatgaaacggcacagaagggtgaagccaagtgccacaagtcagacacaggtatgagcaagaagaagtcacggcaaggtaagctcgttaagcagttcgcgaagatagaagaaagcacacccgtgcatgactcgcccggaaaggacgacgctgtacctgatttgatgggaccccattcagaccagggagaacactctggaaccgtgggcgtccctgtgtcatacaccgactgcgcaccttcacccgtcggctgttcagtggtcactagcgactcattcaaaacaaaagatagctttagaactgccaaatccaagaagaagcgtaggatcactcgctacgacgcacagctgatcctcgaaaataacagcggcatccccaaactgaccctgcgtaggcgccacgattcctcaagtaagacgaatgaccaggaaaatgatggcatgaacagcagtaagataagcatcaagctcagtaaggaccacgacaacgataacaacctctacgttgcaaagctcaataacggattcaattctggctctgggtcctctagcacaaaactcaaaattcagctgaaacgggacgaagaaaatcggggttcttataccgaaggcctccatgagaatggcgtgtgctgctcggatcctctcagcctgctggagtccaggatggaggtggatgattattcccaatacgaggaagaaagcaccgacgatagcagttcatctgagggagatgaggaagaagacgactacgacgacgacttcgaagacgactttatcccgttgccccctgccaaacgcttgaggcttattgtgggcaaggatagcatcgacatcgatatcagttccagaagacgtgaagaccagtcactgaggctgaatgcctag

SEQ ID NO: 242877 - DNA, 1182 bp, synthetic construct
  misc_feature 1..1182: note = Description of Artificial Sequence: Synthetic coding sequence
  source 1..1182: mol_type = other DNA
atgaagtggctcggagagtctaaaattatggtggtcaacgggaggagaaacggaggcaagctctcaaacgaccatcagcagaatcagtcgaagttgcagcacactggtaaggataccttgaaggccggaaagaacgccgtcgaaaggcgttctaaccgctgcaatggtaattcaggttttgaaggccaaagtagatatgtgccatcctcgggaatgagtgctaaagaactgtgtgagaacgacgatctcgccacgagcctcgtgctggacccatacctcgggttccagacccacaaaatgaatacttctgctttcccgagccgaagttcacgccatttttccaaatccgactctttctcacacaataatccagttcgcttccgtcctattaaaggtcgacaggaggagttgaaggaggtgattgagcgcttcaagaaggacgagcacctggaaaaggcattcaagtgtctgaccagtggcgagtgggcgaggcattatttcctcaacaagaacaagatgcaagaaaaactgtttaaagagcacgttttcatttacctccggatgttcgcaactgacagcggcttcgagatactgccatgcaaccgttattcttcagagcagaacggggcaaaaattgtagccacgaaagagtggaaaaggaatgacaagatagagcttctggtgggctgcatagccgagctgtcggagattgaggagaatatgctcttacggcacggggaaaacgacttctctgtgatgtactctacaaggaagaattgtgcacagctgtggctgggacccgctgctttcatcaatcacgactgtagacctaactgcaagttcgttagtacgggcagagacacagcctgtgtcaaagctctccgggatattgagcctggcgaagaaatcagctgttactacggggacggcttctttggggaaaataatgagttttgtgaatgttacacctgcgagcggagaggaactggggcattcaaaagcagagtaggtctgcctgctcccgcaccggtgattaacagtaagtatggcttgcgagagaccgacaagcgtttaaatcgcctgaagaaattgggagattccagcaagaacagcgactcccagtcggtgtcctctaacaccgatgccgacacaacacaggaaaaaaataatgccagcaaatag

SEQ ID NO: 242878 - DNA, 1182 bp, synthetic construct
  misc_feature 1..1182: note = Description of Artificial Sequence: Synthetic coding sequence
  source 1..1182: mol_type = other DNA
atgaagtggctgggcgaatctaagatcatggtggtgaatgggcgtagaaatggcggaaagttaagtaacgaccatcaacagaaccagagtaagcttcagcacactggaaaggacaccctcaaagcaggtaagaatgccgtggagaggaggtctaaccggtgcaacggtaacagcggctttgaaggacagagcagatacgttcccagctcgggcatgtcggccaaggagttgtgtgaaaacgatgacctggctacctccctggtgcttgacccttatctgggattccagactcataaaatgaacacaagtgccttcccctctaggtcaagtcgccatttctctaaaagcgactccttctctcacaataatccggtgcgctttaggcccatcaagggtaggcaggaagagctaaaggaagttatcgagcgcttcaaaaaggacgagcatctggagaaggcattcaagtgtttgacatctggggagtgggccaggcattactttctaaacaaaaataaaatgcaggaaaaactgttcaaggagcatgtgtttatctatctgagaatgtttgccaccgatagcggctttgaaattctaccatgtaataggtactcttcagagcagaatggtgccaagatcgtcgccaccaaagagtggaagcggaacgacaaaatagagctgctggtagggtgtatagccgagctctcggagatcgaggagaacatgctgctacgacatggcgagaacgactttagcgtcatgtacagcacacgaaagaattgtgcacagctctggctggggcctgcagccttcatcaatcacgattgccgccctaattgcaaattcgtttcaaccggcagagatacagcatgcgtgaaagcattgcgtgatatcgagcctggagaggagatcagctgttactacggtgatgggttcttcggagagaataatgaattctgcgagtgttacacctgcgagcgccgtggcaccggtgccttcaaaagccgggttggcctccccgcacctgcgccagtcatcaattccaagtatggcctacgcgagaccgataagaggctaaatagattgaaaaagctgggggacagttcgaaaaatagtgactctcagagcgtgagctctaacactgatgcagatacaacccaggagaagaataacgccagcaaatag

SEQ ID NO: 242879 - DNA, 357 bp, synthetic construct
  misc_feature 1..357: note = Description of Artificial Sequence: Synthetic coding sequence
  source 1..357: mol_type = other DNA
atgaaatggttgggtgagagcaaaattatggtcgtgaacggacgcaggaacggtgggaaactgtcaaacgaccaccaacagaaccagtccaagctacaacacaccggaaaggataccctcaaagcgggtaagaacgctgtggagcgaagatccaaccgctgtaatggcaactccggatttgaggggcaatcaaggtatgtaccctcgtctgggatgtccgctaaagagctgtgcgagaatgatgatcttgccactagtctggtgttggacccctatctaggcttccagacacacaagatgaacacttctgccttcccttcacgcagcagtagacattttagcaagagcgacagttag

SEQ ID NO: 242880 - DNA, 1389 bp, synthetic construct
  misc_feature 1..1389: note = Description of Artificial Sequence: Synthetic coding sequence
  source 1..1389: mol_type = other DNA
atgggccctgatagagtaactgcacgggagctctgcgagaacgacgatctagcgacatcattggttctggatccatacctgggctttcggacccacaaaatgaacgtgagccctgtgcctcccctgagacgccagcagcacctgagatctgccttagaaacctttctgcgccaaagagacctggaggccgcttatagagccctgactcttggtggatggactgccagatatttccagtcacggggtcctagacaggaggccgctttgaagacacacgtataccggtatctcagagcgttcctgcctgagtctggattcacaattctgccttgcacgcgctattcgatggagacaaatggtgcaaagattgtgtccacaagggcctggaaaaagaacgagaagttggagctgctcgttggatgcatcgctgaactccgagaggccgacgagggtttgctaagagccggagagaatgacttctccatcatgtatagcactcgtaagcggagcgcccagttatggctggggcctgcagccttcattaaccacgattgtaagcccaattgtaagtttgtgcccgcagacggaaacgctgcctgcgtaaaggttctgcgggacatcgaacccggtgacgaggtcacatgcttctacggcgaggggtttttcggagagaagaacgaacactgcgagtgtcatacttgcgaacgtaagggggagggtgcgttccgcaccaggccaagggaacctgccctgcctccaaggcctttagataaatatcagctgcgagagacaaaacgacggctccagcaggggctggatagcgggagcaggcaggggctgctgggacctagggcttgcgtgcatccatctccccttcggagggaccccttctgcgctgcttgccagccattacgactgccggcatgctcggccagacccgatactagtcccttgtggctgcaatggcttcctcaaccacagcccagggttagacccagaaagagacgacgaccacggcctagacgcgctcctgtgttgtctactcaccacgctgcccgtgtctcactccaccgatggggtggctgtggtcctcattgccggctgcggggagaggcactggtggcgctgggacagccacctcacgctcgatgggctcctcaacaggattggcattgggccagacggtatggattaccatatgtggtacgggtcgacctgaggagactagctccggctccccctgccacacccgcacccgctggcacccctggacccattctcattcctaaacaagctctggcatttgcgccattcagcccgccaaagaggctcagactggttgtgtctcacggaagcattgatctggacgtcggaggagaggagctctag

SEQ ID NO: 242881 - DNA, 390 bp, synthetic construct
  misc_feature 1..390: note = Description of Artificial Sequence: Synthetic coding sequence
  source 1..390: mol_type = other DNA
atgcctcgtcgcggtagatggctgtcctgcagtcctgaggctgaagggattcgaagggtgggctcacgcgcagcactgagggtgcatcccttggaacaccgtcctcgttggggcacccctgggggtatgactaaaggctctcggttcctcgcgccagaaagcgagctgtcatgggggccaggcgacgctactcccggactgtggttttttattagtgatggcgtgggcgaggatctctggaatagcgcgggttggtctagcgtgcctgaaggctttggacagcgcatgaggggcccaggtctgaccccccacacggacgcaggcggagacgggaataaacgtcgtcactctgagagattgtgccgggctagtgtattacagccaccctag

SEQ ID NO: 242882 - DNA, 744 bp, synthetic construct
  misc_feature 1..744: note = Description of Artificial Sequence: Synthetic coding sequence
  source 1..744: mol_type = other DNA
atgcacttggccagattggtcgggtcatgtagtctccttctgctgctaggtgccctgagcggatgggccgcttccgatgacccaattgaaaaggtgatcgagggcattaaccgagggctgagcaatgccgaacgggaggtgggcaaggcccttgacggaattaattccggcattacccacgcgggacgggaggtggagaaggtcttcaatgggctgagcaatatggggagtcacacagggaaggaactcgacaaaggcgtgcagggtctcaaccatggcatggacaaagtcgcccacgagataaaccacggaattggtcaagctggcaaagaagcggagaaactaggacacggtgtgaacaacgccgcaggacaggccggaaaagaagccgacaaggcagtgcaggggttccataccggcgtccaccaggctggaaaggaagccgagaaactgggccaaggcgtcaaccatgccgcagatcaagctggcaaggaggtggagaagcttggccagggggctcaccacgccgcaggccaggccggaaaggagctgcagaatgctcataacggagttaatcaagcttctaaagaagctaaccagctcctgaatggaaaccaccagagtggcagctcatctcaccaaggtggcgctaccactactcccctcgccagcggggcttctgtcaatacaccatttatcaacctgcctgccctgtggaggtccgtggccaacatcatgccatag

SEQ ID NO: 242883 - DNA, 1773 bp, synthetic construct
  misc_feature 1..1773: note = Description of Artificial Sequence: Synthetic coding sequence
  source 1..1773: mol_type = other DNA
atgcacctggctcggcttgtgggtagttgctctcttctactgctgctcggggcactctccggatgggccgcatcagacgacccaattgagaaagttattgagggtataaaccggggattatctaacgccgaacgcgaggtcggtaaagcccttgatgggatcaattcaggcatcacccacgcgggtcgggaagtggaaaaggtattcaatggcctgtccaatatgggtagccatacgggaaaagagcttgacaagggcgtgcagggtctgaatcatggcatggacaaggtggcacatgagattaaccacggaatcggtcaggccggtaaggaagccgagaagctggggcatggagtgaacaatgccgctgggcaggttggaaaggaggctgacaagttaatccaccacggagtccaccatggagccaaccaggctggttccgaagcgggtaaattcggacaaggcgtagataatgctgcaggccaggccggtaacgaggctggtcgcttcggccaaggtgtccatcacgccgcaggtcaggcgggaaacgaggccggtcgatttggtcagggcgttcatcacgctgccggacaggccggaaacgaagctggaaggttcggtcagggcgctcaccacggcttgtcagaaggctggaaagaaaccgagaagttcgggcaggggatccatcatgccgcaggtcaggtcgggaaggaagcagaaaagttcgggcaaggagcccatcacgctgctggtcaagcagggaatgaggcaggccgatttggccagggggtccatcacggcctcagcgagggttggaaggagactgaaaagtttggacagggcgttcatcataccgctggccaagtagggaaggaggctgagaaatttggccaaggagcacaccacgccgctggtcaggccggaaatgaggcaggaagattcggtcagggggcacaccacgccgctggtcaggcagggaatgaggctgggaggtttgggcagggagtgcatcacggactaagcgaggggtggaaggaaacagaaaaatttggccagggcgtgcaccacgccgctagccagtttggtaaggagacagagaaactgggacatggcgtgcaccacggcgtcaacgaggcctggaaagaagcagaaaagttcggccaaggcgtccaccacgccgctagccaggtcggcaaagaagaggacagggtcgtgcagggtctccatcatggagtctcccaggccggaagggaggccggacagttcggacatgacattcaccacacagccggacaggctgggaaagaaggggatatcgcggtccacggggtacagcctggtgtgcatgaggctgggaaagaagctggccagttcggtcaaggagtacatcacaccctcgaacaagcaggaaaggaggcagataaggcagttcaagggttccataccggtgtacaccaagccggtaaagaagccgaaaaactaggccagggagtcaaccacgccgctgatcaggctggcaaagaagttgaaaagctcggacagggcgcacaccacgccgctggccaggccggaaaggaattgcagaacgctcacaatggcgttaaccaggcctcaaaagaagctaatcaactgctgaacggtaatcaccagtccggctcctctagtcaccagggcggtgcaacaacaacaccgcttgcctccggtgcaagcgtgaacacacctttcattaacttaccggcactgtggcggagcgtcgcaaacattatgccctag

SEQ ID NO: 242884 - DNA, 288 bp, synthetic construct
  misc_feature 1..288: note = Description of Artificial Sequence: Synthetic coding sequence
  source 1..288: mol_type = other DNA
atgggatcacatacaggaaaggagctcgacaaaggagtgcagggactgaaccatggcatggataaggtcgcgcacgagataaatcacggtattgggcaggctgggaaagaggccgagaaactcggacacggagtcaataatgcagccggtcaggggaaccaccagtctgggagcagcagccatcagggcggagccaccaccacaccactggcctccggcgcttctgtgaatacccccttcatcaatctgccagccctgtggagaagcgttgctaatattatgccctag

SEQ ID NO: 242885 - DNA, 738 bp, synthetic construct
  misc_feature 1..738: note = Description of Artificial Sequence: Synthetic coding sequence
  source 1..738: mol_type = other DNA
atgtggctgtgcccattagccctgaatcttatcttgatggctgcgagcggcgctgtgtgtgaagtgaaagacgtgtgtgtgggctcaccgggtataccgggtacccctggatcacatggtctgccaggcagggacggacgggacggtctaaagggagatccaggtcctccagggccaatgggtccacctggcgagatgccatgtcctcctggaaacgacggtcttcccggtgccccaggaataccaggtgagtgtggcgagaagggagagcccggagaacgcggtccaccaggattgcccgcacacttggacgaagaactccaagctaccctgcacgactttcgtcatcagatcttgcagacaagaggagctttgagcttgcaggggtccattatgaccgttggggagaaggtcttttcgtcaaatggacagtctatcactttcgatgccatccaggaggcctgtgccagggccggaggcaggatcgccgttcccaggaatcctgaggaaaatgaggccattgccagcttcgtgaaaaaatataacacttatgcttacgtcggccttaccgagggaccctctcccggagatttccgatacagtgacggcacacccgtcaactataccaactggtacaggggcgaaccagcgggtcggggtaaggaacagtgcgtggagatgtacacggatggacaatggaacgaccgaaactgcctctactctcggctgaccatttag

SEQ ID NO: 242886 - DNA, 570 bp, synthetic construct
  misc_feature 1..570: note = Description of Artificial Sequence: Synthetic coding sequence
  source 1..570: mol_type = other DNA
atgggtcctcccggagagatgccctgccccccaggcaacgatgggttgcccggagctccaggaatcccaggagagtgcggtgagaaaggcgagcctggggagcgcggacctcctgggctccccgcacatctagacgaggagttacaggccaccctgcacgactttagacatcagatccttcaaactagaggcgctctgtcccttcagggctcaatcatgaccgtcggagagaaggtgttcagcagcaatggacaatcaatcacatttgacgccatccaggaggcctgtgccagagccggaggacggatagctgtacccagaaatcctgaagagaatgaggccatcgctagttttgtgaagaaatacaatacatatgcctatgtcggcctgacagaggggcctagtcccggagacttccgctattctgacgggacccctgttaattacaccaattggtaccgcggagaacctgcgggacgcggaaaggagcaatgcgtggaaatgtacactgatgggcagtggaacgatcgtaattgtctctattctagattgactatctgcgagttttag

SEQ ID NO: 242887 - DNA, 747 bp, synthetic construct
  misc_feature 1..747: note = Description of Artificial Sequence: Synthetic coding sequence
  source 1..747: mol_type = other DNA
atgtggctgtgtccactggctcttaatcttattctgatggccgcatcaggagcggtctgtgaggtcaaagacgtctgtgttggcagtcctggcattcccggaactcctggcagccatggacttcccggacgggacgggagagatggcctgaaaggagatcctgggcctccgggtccaatggggccaccaggggaaatgccgtgtcccccaggtaacgatggactgcctggagctcctggcattccaggtgagtgcggcgagaagggagaacctggcgaaagaggtccaccaggcttgcccgctcacctcgatgaagaactccaggccactctgcacgactttaggcatcagatccttcagacaagaggagccttgtcgctgcagggtagcattatgaccgtaggcgaaaaagtgttttccagcaacggtcagtccataaccttcgatgccattcaagaggcttgtgcccgtgccggagggaggatcgctgtgccaaggaatccagaggaaaacgaagccatcgccagcttcgtcaagaaatacaacacttacgcgtacgtgggtctaactgaggggccttctcccggagattttcgctacagcgatggcaccccagtgaattacaccaattggtataggggggagcccgctggtcgcggtaaagaacagtgtgttgagatgtacacagatggacagtggaatgacaggaactgcttatactccagactcacaatctgtgaattttag

SEQ ID NO: 242888 - DNA, 747 bp, synthetic construct
  misc_feature 1..747: note = Description of Artificial Sequence: Synthetic coding sequence
  source 1..747: mol_type = other DNA
atgtggctttgtcctctcgctcttaatctaattctgatggcagcgtccggggcagtgtgtgaagtgaaagacgtctgtgttggctctccgggaatccctggcactcccggaagccacggtctcccgggtagagacggacgcgacgggttgaaaggggatccgggaccgcctggccctatgggcccaccgggtgagatgccgtgtcctccaggtaacgacggactccccggtgcaccaggaattcctggggagtgcggtgaaaaaggcgagcctggagaacgagggcctccaggactgcccgctcacctggacgaggagctacaagccacgttgcatgactttcgacatcagatactgcagaccaggggagctctctccctgcaagggtcaattatgaccgttggggagaaggttttttcttcgaatggccagtcaataacattcgatgctatccaagaggcttgcgcacgagcagggggtcggatagccgtcccccgaaaccccgaggagaacgaagcaattgccagtttcgtgaagaagtataacacctacgcgtacgtcggattgacagaaggcccaagtccaggcgattttcggtatagcgacggaacacccgtcaactataccaattggtacaggggggagccagccggtcggggaaaagaacagtgtgtcgagatgtataccgacggccaatggaatgatcggaattgcttatactctcgcctcacaatctgtgagttctag

SEQ ID NO: 242889 - DNA, 792 bp, synthetic construct
  misc_feature 1..792: note = Description of Artificial Sequence: Synthetic coding sequence
  source 1..792: mol_type = other DNA
atgagaccttgccaggtgcccggtgccgctacagggccaagggccatgtggctgtgccctctggcactcaaccttatcctgatggcagcttctggggctgtgtgcgaagtgaaagacgtctgcgtggggtctcctgggatcccgggtacccctgggagtcacggcttgccaggcagagacggacgggatggtctgaagggggatcccggtcctcccggacccatgggccctccaggagagatgccctgtccccctggtaatgatggcctgcccggagcgcctggcatccctggagagtgtggggagaaaggggaacccggagaacggggtcccccaggtcttccagcccacttagacgaagaattgcaggccaccctccacgatttcaggcatcagatcctgcaaacaagaggagccctgagtctccaaggcagtatcatgaccgttggagagaaagtttttagctccaacggtcagtcaataactttcgacgctatacaggaggcctgtgccagagccggagggagaatcgccgtgccaaggaatcccgaggaaaacgaagcgatagcttcttttgttaagaagtacaatacctatgcctacgtcgggctgaccgaggggccatccccaggcgactttcggtacagtgacggaactcctgtcaactacaccaactggtacaggggtgaaccagcgggacgcggaaaggaacaatgcgtggagatgtatacagatggtcagtggaacgacaggaattgcctgtactctagactgaccatctgcgagttctag

SEQ ID NO: 242890 - DNA, 747 bp, synthetic construct
  misc_feature 1..747: note = Description of Artificial Sequence: Synthetic coding sequence
  source 1..747: mol_type = other DNA
atgtggttatgtcccctggccctgaacctaatcctgatggccgcttccggggcagtgtgcgaggtaaaagatgtgtgtgtgggcagtcctggtatccccggaactcctggaagccatggcttgcctggcagggacgggcgtgacgggctaaaaggcgatccgggacctcctggacccatgggaccaccaggcgaaatgccgtgccctccaggcaatgacgggctgccaggtgcacctggcatcccaggcgaatgtggagaaaagggggagcctggggagcgcggtcccccaggcctgccggcacaccttgatgaggaacttcaggcaacactgcatgattttagacatcagatcctgcagacgcggggagccctaagcttacagggatctattatgacggtgggcgagaaggtattcagctcgaatggtcagtccatcacgtttgacgcaatccaagaagcctgtgcgagagccggaggtaggattgcagtgcccagaaacccggaggaaaatgaagctatcgccagttttgtgaagaagtacaatacctacgcctacgtgggcttaaccgagggccctagcccgggtgacttcagatactccgatggaactcctgtcaactacacgaactggtaccgtggagagcccgcagggagaggcaaggaacagtgtgtggagatgtacacggatggccaatggaatgatcggaactgcctctacagcagactgaccatttgcgaattttag

SEQ ID NO: 242891 - DNA, 477 bp, synthetic construct
  misc_feature 1..477: note = Description of Artificial Sequence: Synthetic coding sequence
  source 1..477: mol_type = other DNA
atgtggttgtgcccactggccctgaacctcattctaatggccgcatctggagccgtgtgtgaggtgaaggacgtgtgcgtgggatctccaggaattccaggcactccgggatcacacggacttccaggcagggacggacgcgacgggctcaaaggcgatccgggacccccagggcctatgggaccacccggtgaaatgccctgccctcccggtaatgacggactgccaggagccccagggatcccaggcgagtgtggggaaaagggggaacctggcgagcggggacccccaggcttgcctgctcatcttgatgaagagctgcaggcgacgctgcatgattttagacatcaaattctgcagactcgcggagcactcagcttgcagggaagtatcatgacagtaggcgaaaaagtattcagctcgaacggtcagagcataacatttgacgccatacaggaagcctgtgccagagcgtag

SEQ ID NO: 242892 - DNA, 477 bp, synthetic construct
  misc_feature 1..477: note = Description of Artificial Sequence: Synthetic coding sequence
  source 1..477: mol_type = other DNA
atgtggctgtgccccttggctctgaacctgatcctgatggccgcatctggtgctgtgtgcgaagtaaaggacgtgtgtgtcggatcccctggaatcccgggtacacctggctctcacggcctaccaggccgagatggcagggatgggctgaaaggcgacccaggtcctcctgggccaatggggcctcccggagagatgccctgtcctcctggcaatgatggattgcccggtgctcctggcatcccaggcgagtgtggagagaagggcgagcccggtgagagaggtccgcctggactacccgctcaccttgatgaggagttgcaggctactctacatgacttccggcatcagatcctgcaaaccagaggtgcgctcagtctgcagggcagcattatgacagtgggagagaaggtgtttagctctaatgggcagagcattacttttgacgctatccaagaagcttgtgccagagcatag

SEQ ID NO: 242893 - DNA, 747 bp, synthetic construct
  misc_feature 1..747: note = Description of Artificial Sequence: Synthetic coding sequence
  source 1..747: mol_type = other DNA
atgtggctttgtcctctggccctcaccctgattctcatggccgcaagcggcgctgcctgcgaagtaaaggacgtatgtgtgggctctccaggcatacccggaacccccggaagccatggactgcccggtcgagacggcagagacggggttaaaggcgacccgggaccccctggacctatgggaccccctggcgaaacgccctgtccccctggtaacaatggtctcccaggcgctcctggagtccctggcgagcgcggagagaaaggggaggccggagagcgcggtcctccgggacttcctgctcatctggatgaggagctgcaggcaactctacacgattttagacatcagatcttacaaacacgaggtgccttatcactgcagggcagcattatgactgttggggagaaagtttttagcagcaacggacaatccataaccttcgacgctatccaggaggcttgcgcacgcgctggcggacgcatcgctgtgccccgaaaccccgaagaaaatgaagctatcgccagcttcgtgaagaagtataacacctacgcatatgttggtcttactgaaggaccttctccgggagacttccggtacagtgacggtacacccgtgaattacacaaattggtacagaggcgaacccgctggcaggggcaaggagcaatgtgtggagatgtacacagacggacaatggaacgatcgaaactgtctgtattctaggctcaccatttgtgaattctag

SEQ ID NO: 242894 - DNA, 747 bp, synthetic construct
  misc_feature 1..747: note = Description of Artificial Sequence: Synthetic coding sequence
  source 1..747: mol_type = other DNA
atgtggttgtgcccactggccctaacacttatcctgatggctgcttccggcgcagcctgtgaggttaaggacgtgtgtgtgggaagcccagggattccaggaacacctggaagccacggtctgccaggacgcgatggaagagatggggtaaaaggtgaccccggtcctccgggacccatgggaccacccggagagacaccatgtcccccagggaacaatgggttgcccggagcccctggcgtgccaggcgaacgcggtgaaaagggcgaggcgggagagagagggcctcctggcttaccggctcatctggacgaggaactacaagcaactcttcacgatttcaggcaccagatcctgcagacacgaggagctcttagcctgcagggaagcatcatgacagtcggggagaaagtgtttagtagcaatgggcagagtattacatttgatgccatacaagaggcctgtgcccgagcaggcggacgcatcgccgtgcctcgaaaccccgaggaaaacgaggcaattgcatctttcgtgaaaaagtacaacacctacgcctatgtgggactgacggaaggaccctccccaggcgactttagatacagtgatgggaccccggtcaattacacaaactggtacaggggagagcccgcaggccgtggtaaagaacagtgcgtcgaaatgtacacagacggacaatggaacgatcggaactgcctatacagtagactgacaatatgtgagttctag

SEQ ID NO: 242895 - DNA, 477 bp, synthetic construct
  misc_feature 1..477: note = Description of Artificial Sequence: Synthetic coding sequence
  source 1..477: mol_type = other DNA
atgtggctctgcccacttgccctgaccctgattttgatggctgcctccggggcagcatgcgaggtaaaagacgtatgtgtcggcagtcccggaattcccggtacacccggatcacacggtcttcctgggagagacggccgtgatggcgtgaagggggatcctggtcctccaggcccaatgggcccacctggggaaacaccttgtccacctggcaacaatgggctgcctggcgcaccgggagttcctggagagaggggtgagaaaggcgaggccggagagcggggaccacctggcctgcctgcccaccttgatgaggagctgcaggccaccttacacgatttcagacatcaaatcctccagacccgtggggcactgtctctccagggtagtatcatgacagtgggcgagaaagtattttcatccaatggacagtcaatcaccttcgacgccattcaggaagcctgtgcaagggcttag

SEQ ID NO: 242896 - DNA, 645 bp, synthetic construct
  misc_feature 1..645: note = Description of Artificial Sequence: Synthetic coding sequence
  source 1..645: mol_type = other DNA
atgcggccatgccaggtgcctggcgcagccaccggtcctcgggctatgtggctgtgcccgttggccttaacactgatccttatggcggcttcgggagccgcttgcgaggtgaaggatgtatgcgtagggtccccaggtattcctggaaaaagaggcgagaagggagaagcaggtgagcgcggtcctccgggtctaccagcacatctggacgaggagctgcaggccaccctccacgatttccgccatcagatacttcagactaggggagcgctctctttgcagggatcaattatgactgtgggcgagaaggtcttttcttcaaacggacagtctattacgttcgacgccatccaggaggcatgtgccagagccggtggcagaatcgctgtgcccaggaatcccgaagagaacgaggccatagcctcctttgtgaaaaagtataatacgtacgcctatgtaggcctgaccgagggaccctcccctggggacttccggtattctgatggtaccccggttaactacacgaattggtatcgcggtgagcctgctggaaggggtaaggaacagtgtgtggaaatgtatactgacggccaatggaatgatcgtaactgtttgtatagccggttaacaatttgcgaattctag

SEQ ID NO: 242897 - DNA, 1146 bp, synthetic construct
  misc_feature 1..1146: note = Description of Artificial Sequence: Synthetic coding sequence
  source 1..1146: mol_type = other DNA
atggccgagtcacatcttttacaatggctgcttctgctgctgccaaccctgtgcggccctggaactgctgcctggactacatcttctctcgcatgtgctcaggggcctgagttttggtgccagtcactggaacaggcccttcagtgcagagcactgggccattgcttacaggaagtctggggccacgtcggcgcagacgacctgtgccaggagtgtgaagacattgtgcacatcctgaataagatggccaaggaagctatctttcaggacaccatgagaaagtttctcgaacaggagtgtaacgtgttgcccctcaagctgctgatgccgcagtgcaaccaggtgctggatgactactttccgcttgttatcgactactttcagaaccagactgacagtaatgggatctgtatgcacttaggattgtgcaagagccgacagcctgaaccggagcaggaaccgggaatgagcgaccctttgccaaagccactaagggaccctctgcctgatccgctgctggataaattggttctgcctgtgttgcccggtgccctacaggcaagacccggaccccacactcaagatctctctgaacagcaatttcccatccccctcccttattgttggctttgcagggctctcatcaagcggattcaggccatgatccctaaaggcgcactggcagtcgcggtggcacaagtttgtagggtggtgccactcgtggccggtggcatctgccagtgcctggctgaacgctactcggtgatcttactggacaccctgctgggtagaatgctcccccagttggtttgcagacttgtactacgctgttctatggatgacagtgccggaccaagatcaccaaccggggagtggctgccacgggatagcgaatgtcatctgtgcatgtctgtaaccacccaagcgggaaacagctccgagcaggcaatcccccaagcgatgttacaggcctgcgtgggctcttggttagatcgtgaaaagtgtaagcagtttgttgagcaacacacgccccagttgctcaccctagtccccaggggctgggatgcacacaccacatgccaggcgctcggcgtctgcggcactatgtcctcacccttacagtgtattcattccccagacctgtag

SEQ ID NO: 242898 - DNA, 1128 bp, synthetic construct
  misc_feature 1..1128: note = Description of Artificial Sequence: Synthetic coding sequence
  source 1..1128: mol_type = other DNA
atgctcctcttcctcctatctgccctggttctgctgacacagcctctgggctatctggaagccgagatgaaaacttactcacatcggactatgccaagtgcctgcaccctggtcatgtgttcctctgtggagtctgggctccccggtagagacggaagggacggtcgagaggggccacggggagaaaaaggcgatcctggtctcccaggggctgcgggtcaggccggaatgcctggtcaggccggaccggttgggcctaagggcgacaatggctccgtaggagagccaggcccaaagggcgatactgggccttctggtccaccaggccctccaggcgttcctggtcccgctgggagagaggggcctctcggaaaacagggcaatattggcccacaaggaaaaccaggcccaaagggcgaagccggacctaagggtgaagtgggggcacccggaatgcagggatccgctggggctcggggtctcgccggtccgaagggcgagcgcggagttccgggagaacggggagttcctggaaacaccggtgctgccggttcagccggagctatggggccacagggctcgcccggagcacggggaccacctggtttgaaaggtgataaaggaatccccggagacaagggtgccaaaggcgaaagcggactgcccgacgtcgccagcttgcggcaacaggtggaggcattacaggggcaagtgcagcatctgcaggccgcatttagccagtacaagaaggttgaactgttcccgaacggtcagagcgtgggggagaagatcttcaaaactgctggtttcgtcaagcccttcacagaagctcagctactgtgtacccaggcagggggtcagttagccagccctcgcagcgccgcagagaacgctgctttacagcaactagtggtcgctaagaatgaagctgccttcctcagcatgaccgactcgaaaacggagggaaagtttacttaccccacaggtgagtccctggtgtatagtaattgggccccaggcgagccaaacgacgacggtggcagcgaagactgtgttgagatattcaccaatgggaaatggaatgatagggcttgtggtgaaaaacggctggtggtgtgtgaattttag

SEQ ID NO: 242899 - DNA, 657 bp, synthetic construct
  misc_feature 1..657: note = Description of Artificial Sequence: Synthetic coding sequence
  source 1..657: mol_type = other DNA
atgtttttgtccacttccaagcatggaagacaagaggcaatgcttttgtttctgctcagcgcccttgtgctactgacccagcccctcggatatcttgaggccgagatgaaaacgtattcgcaccgcacaatgccgtcggcctgcacattagtgatgtgttccagcgtcgaaagtggtcttcctgggagagacggacgcgacggtcgggaagggccacgcggagagaaaggcgaccctggcttgcctggagccgctggccaagcaggcatgcctggccaagctggcccagtcgggcctaagggggacaacgggagcgttggagaaccgggaccaaagggggacacaggtcccagcggacctcccggtcccccaggcgtaccgggtcccgctggtcgagaagggccactgggcaaacaagggaacatcggtccccagggcaaacccggtccaaaaggagaggccggtcccaagggagaggtgggcgcacccggaatgcaggggtcagcaggggctaggggcctcgctggaccgaagggggaacgaggggtgcccggagaaagaggtgtgcctgggaatactggcgcagcaggttctgctggcgctatggggccacagggctctccgggtgcgaggggcccacccggtctgaagggctag

SEQ ID NO: 242900 - DNA, 903 bp, synthetic construct
  misc_feature 1..903: note = Description of Artificial Sequence: Synthetic coding sequence
  source 1..903: mol_type = other DNA
atggccgcagtagcggcactgcagcttggcctacgggcagctggactggggcgagcccctgcgtccgccgcttggaggtcagttctgcgcgtgtccccgcgaccaggggtcgcttggcggccatcaaggtgtggcagctccgctgctgaagcatcggctacaaaagccgaagacgactcgttccttcagtgggtgctgctcctgatcccagttaccgcatttgggttagggacgtggcaggtgcaacgccgaaagtggaagctcaacctcatagctgagcttgagagccgcgtgctcgccgagccagttccactacccgctgatcctatggagctcaagaatctggagtatagacctgtaaaggtccgaggatgctttgaccattctaaggagttgtacatgatgccgaggacaatggtcgaccccgtccgcgaggccagagagggaggcctgatatcctcttcaactcagtctggcgcttacgtggtcactccctttcattgtacggacctgggcgtcacgattctagtaaataggggcttcgtgccccgtaagaaagtcaaccccgagacacgacagaaaggccagatagagggagaggtggatctgattggtatggtgagattaacagaaaccagacagccttttgtgccagagaataacccagagcggaatcactggcattaccgcgaccttgaggccatggccagaataactggcgcagagcctatctttattgacgcaaatttccagagcacagttcctggtggacccatcggtggccaaacccgagtaaccttgagaaatgaacaccttcagtacattgtgacttggtacgggctcagcgctgcaacctcgtatctatggttcaagaagttcctgagaggcactccgggagtctag

SEQ ID NO: 242901 - DNA, 813 bp, synthetic construct
  misc_feature 1..813: note = Description of Artificial Sequence: Synthetic coding sequence
  source 1..813: mol_type = other DNA
gctccagccagcgcagcatggagatccgtcctgcgtgtctcaccgcgacccggtgtagcatggagacccagccggtgcggctcgagcgccgctgaagccagtgcaactaaggcagaggatgactctttcctgcagtgggtcctgctccttattccagttaccgcattcgggcttggcacatggcaggtgcagagacgcaagtggaagctgaacctgatcgccgaactcgaatccagagttctcgccgagcctgtgcccttgccagcggatcccatggagctcaagaacctagagtataggcccgtcaaagtgagaggttgctttgaccattccaaggagctctacatgatgcctcggaccatggtggatcccgtgcgagaggctcgggaagggggacttattagctcttcgacccagagcggtgcctacgtagtcacaccttttcattgtacagacttgggaaagaaggtcaaccccgagacccgacagaaaggccagatcgagggcgaggtcgatttaatagggatggtacgattgacagagacccgccagccctttgtgcccgagaacaaccctgagagaaatcactggcactatagggacctcgaggctatggccagaatcaccggggcagagccaatatttattgatgcaaattttcagagtaccgtgccaggtggtcccatcggaggacagacccgtgttaccctgagaaacgaacatctccagtatattgtgacctggtatggtctaagtgccgctacgtcatatctgtggtttaagaagtttttgaggggaactcctggagtttag

SEQ ID NO: 242902 - DNA, 771 bp, synthetic construct
  misc_feature 1..771: note = Description of Artificial Sequence: Synthetic coding sequence
  source 1..771: mol_type = other DNA
atgtcagaactgcccggtgatgtgcgggcatttctccgagaacatccgagtctcaggctccagactgacgcccgaaaggtgagatgtatactgacaggccacgaactcccttgtagactacccgagctgcaagtgtataccagggggaagaagtatcaaagattggttagggccagtccggctttcgactacgcggagttcgagcctcacatcgtgcccagcacaaaaaatccacaccagcttttttgtaaattgaccctgaggcacatcaacaaatgcccagagcatgttctgcgccacacccagggaagaaggtaccagagagccctttgcaaatatgaggaatgtcagaagcagggtgtggagtacgtgcccgcttgcttagttcaccgcagacgccgtagagaggaccaaatggacggcgatggacccaggccgagggaagctttctgggaacccacctcctctgatgaaggtggtgctgcatcagatgatagcatgacagacctatacccacccgagttattcacaaggaaggaccttggctccacggaggacggggatgggacggatgattttcttacagacaaagaggacgaaaaggcaaagccccctagagaaaaggccacagatgaatcgcggcgtgaaaccactgtctacagaggacttgtgcagaaacgagggaagaagcaattgggttccctgaagaaaaagtttaagtctcatcatcggaaacctaagagcttttcgagctgtaaacagccaggttag

SEQ ID NO: 242903 - DNA, 810 bp, synthetic construct
  misc_feature 1..810: note = Description of Artificial Sequence: Synthetic coding sequence
  source 1..810: mol_type = other DNA
atgggccagaatgaccttatgggcaccgccgaggactttgccgatcagtttctgagggtgaccaaacagtacctgcctcatgtagctcgcctgtgcctcatatcaaccttcctggaggacggcatccggatgtggttccagtggtcagaacaacgcgattatatagataccacatggaactgcggttatctgctggccagttcctttgtcttcctcaacctcttaggccagctgaccgggtgcgtattggtcttatcaagaaacttcgtccaatatgcttgttttggcttgttcgggataattgcgttacagactatagcctattcaatattgtgggatttgaaatttctcatgcgcaacctggctctcggcggagggctcctcctgctgctggcggagagccggtctgagggtaagtccatgtttgcaggggtccccaccatgcgtgagtcttcacctaagcaatatatgcagctggggggtcgggtgctcctggtgctcatgtttatgacgctcctgcattttgacgccagcttcttttcaatcgtccaaaatatcgtaggcaccgcgctaatgatcctggtggcaatcgggttcaagacaaagctggctgccttgacccttgtggtctggcttttcgcgattaacgtgtactttaatgccttctggactataccggtgtacaagccaatgcatgattttctaaaatacgatttttttcagacaatgagcgtcattggtgggcttctcctcgtcgttgcgctgggcccaggaggggtgagtatggatgaaaagaagaaagagtggtag

SEQ ID NO: 242904 - DNA, 561 bp, synthetic construct
  misc_feature 1..561: note = Description of Artificial Sequence: Synthetic coding sequence
  source 1..561: mol_type = other DNA
atgggccagaatgatttaatgggcactgctgaggattttgctgaccaatttctgcgagtaacgaaacagtatctgcctcatgttgccaggttgtgtctgatctctacgttcctcgaggacggaatccggatgtggtttcaatggtcggagcaacgagactatatagataccacgtggaactgcggctatctgttagccagtagctttgtcttccttaatcttctcggacaacttaccggatgtgtcttagtcctgtccagaaatttcgtgcaatatgcatgcttcggattatttggaatcatcgcacttcagaccatcgcctacagcatcctttgggatctgaagtttctgatgagaaacctggccctcggcggaggattactgctgttactagccgagagtaggtccgagggcaaatcaatgttcgccggtgttcccaccatgagagagtcttcacctaagcagtacatgcagctcggcggacgggttttgctggtgctcatgttcatgaccttgctgcatttcgatgcctcatttttttcccagccttctcagcagtag

SEQ ID NO: 242905 - DNA, 567 bp, synthetic construct
  misc_feature 1..567: note = Description of Artificial Sequence: Synthetic coding sequence
  source 1..567: mol_type = other DNA
atgggccaaaatgatctcatgggcactgctgaagattttgctgatcaattcctacgcgtcactaagcaatacctgccacacgtcgctaggctgtgccttatcagtacctttctcgaggacggtatccgtatgtggtttcagtggagcgaacagagggattacatcgacactacatggaactgcggctatctacttgcgtcatctttcgttttcctgaacctgctcggtcagctgacgggctgtgtccttgtgcttagcagaaacttcgttcagtatgcttgctttggtctattcggaattatagcattacaaactatcgcatatagcatcctgtgggatcttaaattccttatgcgcaatttagccctgggcggtggtctgctgttgttactggccgaaagccgtagtgaaggaaaatccatgttcgccggagtgcctaccatgagggagagctctcccaaacatacctgtctcgcaaaaaccagaggtaggcagggtctggtacgcggaggattcaacaagactgcctccttttatgtctcttcttccttgccccttccttggtag

SEQ ID NO: 242906 - DNA, 783 bp, synthetic construct
  misc_feature 1..783: note = Description of Artificial Sequence: Synthetic coding sequence
  source 1..783: mol_type = other DNA
atgcgctccttggccactgagttccttcgggtcacaaagcagtacctgcctcatgttgcgcgattatgtctgatctccactttcttggaggacggaatccggatgtggttccagtggtctgagcagagagactacatagacactacttggaactgcggttatctgctcgcaagttcatttgtctttttaaacttgctggggcaactcacaggctgcgtgctagtgctgagtcgcaacttcgtccaatacgcctgtttcggcttgtttggcatcattgcactgcaaacaatagcctattctatattgtgggacttgaaattcttgatgagaaacctggctcttggaggtggtctgctcttactcctggccgagagccgctccgagggtaaatccatgttcgcaggcgtccctaccatgcgggaaagctctccaaagcagtacatgcagctgggagggagagtgttgttggtattaatgttcatgaccttgcttcacttcgacgcctcctttttttcgattgtgcaaaatatcgtgggaactgccctcatgatcctcgtggccattggttttaagaccaaattggcagccctgaccctggtggtgtggctgttcgccattaacgtgtactttaatgccttctggacgatccccgtgtataagcctatgcacgacttcttgaaatacgatttttttcagactatgagtgtcatcggcggactgcttctcgtggtcgctctagggccaggcggtgtgtcaatggatgagaaaaagaaggaatggtag

SEQ ID NO: 242907 - DNA, 387 bp, synthetic construct
  misc_feature 1..387: note = Description of Artificial Sequence: Synthetic coding sequence
  source 1..387: mol_type = other DNA
atgggccagaatgacttgatgggaaccgcagaggactttgccgatcagttccttcgcgttacgaaacagtacctcccacatgttgctcggctgtgtctgattagcacctttttggaagatgggattagaatgtggttccaatggtctgaacaacgcgattacatcgacactacctggaactgcgggtaccttctggccagttcctttgtattcttgaatctcttagggcaactcaccggttgcgtgctcgtcctgagtcggaattttgttcaatacgcctgctttggactgttcggaattatcgccttacaaacaatagcttatagtatcctctgggaccttaagttcctgatgcggctgtctagaacaagctgggcacaactttag

SEQ ID NO: 242908 - DNA, 1086 bp, synthetic construct
  misc_feature 1..1086: note = Description of Artificial Sequence: Synthetic coding sequence
  source 1..1086: mol_type = other DNA
atggcgagcctgctggcaaaagatgcctacctgcagagcctggctaaaaaaatttgtagccattctgcccctgaacagcaagcacgcaccagagctgggaaaacacagggatccgagacagccggtcctccaaagaagaagaggaagaaaacgcagaagaagttcagaaagagggaggagaaggccgcagaacataaggctaaaagcctgggtgaaaaatcacctgcagccagcggggcacggaggcctgaggccgctaaagaagaagctgcttgggcttcttcttccgctggcaacccggcagacggcttggccacggagcccgagtctgtgtttgccctcgacgtgctaaggcagcggttgcatgagaagatacaggaggctagaggtcaaggtagcgctaaggagctgagccccgcagcacttgagaagcgcagaaggcgcaagcaagaacgtgaccgcaaaaagcgaaagagaaaggaacttagggctaaggagaaggccagaaaagccgaagaagcaacagaggcccaggaggtcgtggaggctaccccggagggcgcttgtacagagcccagggaaccccctggactgatattcaataaggtagaagtctccgaggatgaacccgcaagtaaagctcagcgcaggaaagaaaagcgccagcgggtgaaaggcaacctgacccctttgaccggaaggaattatcggcaactgctagagcgcttacaggctagacagtcacgcctcgatgaattgcggggacaggatgagggaaaggcacaggagcttgaggccaaaatgaagtggacaaacctcctgtacaaagccgaaggtgtaaaaatccgtgatgatgagcggttgctccaggaagccttgaaacggaaggagaaacgcagagctcagagacaacggagatgggaaaagaggactgccggagtagtcgaaaagatgcagcagcgccaggacagacggaggcaaaacctacgcaggaagaaggccgcaagggctgaaaggcggctgcttcgagcacgcaagaagggccgaatcctgccccaagatttggagcgtgctggactagtgtag

SEQ ID NO: 242909 - DNA, 789 bp, synthetic construct
  misc_feature 1..789: note = Description of Artificial Sequence: Synthetic coding sequence
  source 1..789: mol_type = other DNA
atggccatgagctccggcggatccggaggcggagttcctgagcaggaagattccgtcttattccgcagagggactggtcagagcgacgactccgatatttgggacgataccgcgcttattaaggcctatgacaaggctgtcgcaagcttcaaacatgcccttaagaacggggatatctgtgagacgtccggaaagcccaaaactactccaaaaaggaagcctgctaaaaaaaacaagtcccaaaagaagaacacagctgccagcctccaacaatggaaagtgggagacaagtgctccgctatctggagcgaggacggctgtatctacccagcgacaattgcttctatcgattttaaaagagagacgtgtgtagtggtgtataccggttacggtaacagagaggagcagaaccttagcgacctgttgagtcccatttgcgaggtcgcaaataacattgagcagaatgcgcaagagaacgaaaatgagtcgcaagttagtactgacgaatcagaaaacagccggagcccaggcaacaagagcgacaatatcaaacccaagtctgccccatggaactccttcctgccaccaccccctcctatgcccggacccaggctgggccctgggaagattatcccccctccccctccgatctgtccggattctctcgacgatgccgatgctctaggcagcatgctcatcagttggtatatgagcggatatcacaccggatactatatggggttccgtcagaaccaaaaggagggacggtgctcacactctctcaattag

SEQ ID NO: 242910 - DNA, 885 bp, synthetic construct
  misc_feature 1..885: note = Description of Artificial Sequence: Synthetic coding sequence
  source 1..885: mol_type = other DNA
atggcgatgtccagtgggggatctgggggaggggtccctgagcaggaggattcagtgctgttccgacgcggaacaggccaatctgatgactccgacatctgggacgataccgctctgatcaaggcctacgataaggcagtcgcttctttcaaacacgctctaaaaaacggcgatatttgcgagacatccggcaagcccaaaacaacaccaaagcgcaagcccgctaaaaagaacaaatcccagaaaaagaatacagctgcatctctccaacagtggaaagtgggcgacaagtgctccgcgatctggagtgaggacgggtgcatctaccctgcaaccattgccagtatcgattttaagcgagaaacatgcgtggtggtctatacaggatacgggaatagggaggagcagaacctgagtgacctgttgtcaccaatttgcgaggtggctaataacatagagcagaatgcacaggaaaacgaaaacgaatctcaggtgtctacggatgaaagcgagaactctcgttcgcccggaaacaagtcagataatatcaaacccaagagtgccccatggaatagttttctgcccccaccaccacctatgcccggtcctagactaggcccaggaaagcctggactgaagttcaatgggccacccccacctccacctccccctcctccccacctactgtcttgttggctacctcctttcccctccggcccacccataatcccgccaccgcctccaatttgtcccgatagcctggatgatgctgatgccctaggatctatgctcatctcctggtatatgtctggctaccatactggttattatatgggattcaggcagaaccagaaggagggacgctgcagtcactccttgaactag

SEQ ID NO: 242911 - DNA, 789 bp, synthetic construct
  misc_feature 1..789: note = Description of Artificial Sequence: Synthetic coding sequence
  source 1..789: mol_type = other DNA
atggccatgtcctcgggaggctccggtggtggcgtgcccgaacaggaggactctgtgctgttccgccgaggcaccggtcaaagtgacgatagcgacatttgggacgataccgcactcatcaaagcatatgataaagccgtcgccagcttcaagcatgctttgaaaaacggcgacatttgtgagacgagcgggaagccaaagaccacccctaaaaggaagcccgcaaaaaaaaataagtcacaaaagaagaatacagccgcttcccttcaacaatggaaggtgggggataagtgttccgccatttggtctgaagacgggtgcatttaccccgctactatcgcctccattgattttaaaagggaaacgtgcgtcgtggtgtacaccggatatgggaacagagaggagcagaatctcagcgatctgctgagcccaatttgcgaagtcgccaacaacatagagcagaacgcgcaggagaatgaaaatgagtcccaggttagcacggatgagagtgagaactccagatctcctggaaataaaagtgacaatatcaagcccaaaagtgctccctggaactcgtttctgccacctcctcctcctatgcctggcccacgcctcggacccggaaaaatcattcctcctcctcctcccatatgtccggactctctggacgatgccgatgcattgggcagcatgctgatctcctggtatatgagcggctatcatactggttattacatgggcttcaggcaaaatcaaaaggagggaagatgctcccacagtttgaactag

SEQ ID NO: 242912 - DNA, 849 bp, synthetic construct
  misc_feature 1..849: note = Description of Artificial Sequence: Synthetic coding sequence
  source 1..849: mol_type = other DNA
atggctatgtcatccgggggaagcgggggtggagttcccgagcaagaggatagtgttctgtttaggagggggaccggccagagcgatgatagcgacatctgggacgatactgccttgattaaggcttacgacaaggcggtagcatctttcaaacacgccctgaagaacggcgacatatgtgagacatccggcaagccaaagacaacgcctaaacgcaagcccgcaaaaaagaataaatcccagaagaaaaatacagccgctagtctacagcagtggaaggtgggtgacaaatgctccgcgatctggtctgaggatggttgcatttaccctgcgacaatagcttctatagatttcaagcgggagacttgtgtcgtagtctatacaggttacggcaatagggaggagcaaaatctgtccgatttgctcagtcccatatgcgaggtcgctaacaatatcgagcaaaatgcgcaagagaacgaaaatgaatcccaagtgagcactgacgagtcagaaaatagtaggagccccggaaacaagagcgataacatcaagcccaagagtgccccatggaacagtttcctcccaccaccccctccaatgcctggacctcggttaggaccaggaaaaccaggtctcaagtttaacggccctccacctccaccccctcccccaccaccccatttgttatcatgctggctgcctcccttcccatcaggaccccctatcatcccgccacccccacctatctgccctgatagcctggacgatgccgacgccctcggatcaatgctcataagttggtatatgagcggctatcacacaggatattacatggaaatgttagcatag

SEQ ID NO: 242913 - DNA, 885 bp, synthetic construct
  misc_feature 1..885: note = Description of Artificial Sequence: Synthetic coding sequence
  source 1..885: mol_type = other DNA
atggccatgtccagcggcggatcagggggaggcgtacccgaacaagaagatagcgttctcttcaggcggggtacgggccaatccgatgactcggacatctgggatgatacagccctcattaaagcttacgacaaggccgtggcttcgtttaagcatgccctgaagaatggagacatatgtgagacctccgggaaacccaaaacgacccctaagcgaaagcctgcaaagaaaaacaagagccaaaaaaagaataccgccgcttcattacagcagtggaaggtgggggacaagtgcagtgctatctggagtgaagatggatgcatttatcccgcaactattgcttcaatcgatttcaagagggagacctgtgtagtcgtctatactggatacggaaatcgggaagagcaaaatctctcagatctgctgtcgcccatttgcgaggttgccaacaacattgagcagaacgcccaggaaaatgagaacgagagtcaggtttcaaccgacgagagcgagaatagtcgttcaccgggaaacaagtcagacaacataaagcccaaaagcgcaccatggaatagttttctaccgccacccccacccatgccaggccctcgtctcggacctggcaagcctggcttgaagtttaacgggcctcctcccccaccaccaccccctccgcctcatttgctctcatgttggctccctccattcccaagcgggcctccaatcatccccccacctccccctatttgtcctgattccctggacgatgcagatgcactgggcagcatgctgatttcctggtatatgtcgggctatcacactgggtattatatgaccggtttccactgcgtatcccaggatggtctaaacttgttgacaccatag

SEQ ID NO: 242914 - DNA, 684 bp, synthetic construct
  misc_feature 1..684: note = Description of Artificial Sequence: Synthetic coding sequence
  source 1..684: mol_type = other DNA
atggccatgagttcagggggtagcggaggaggtgtcccagagcaggaggactctgtacttttcaggcggggtacgggccagtcagacgactcagatatatgggatgacacggccctcatcaaggcatacgataaagctgtcgcctctttcaagcatgccttaaaaaatggcgacatttgcgaaacaagtggcaaacctaaaacgacaccaaaacggaaacctgccaagaagaacaagagtcaaaaaaaaaataccgcggcttcactgcagcagaatgaaaatgaaagtcaggtgtctaccgacgagtctgagaattccagaagccccggtaataagtccgataatatcaaacccaaaagcgctccatggaactcctttctgccaccccctccaccaatgcccggaccccgtctgggccctgggaagccagggctgaagttcaacggccctccccctcccccacctcccccacctccgcatcttttatcgtgttggctccctcccttccccagcgggccaccaatcataccccctccacctcccatatgtcctgattctctcgacgatgccgacgcgcttggatctatgttgattagctggtatatgtcggggtaccacacgggatactacatgggttttcgccagaaccagaaggagggcaggtgctctcactccttgaactag

SEQ ID NO: 242915 - DNA, 849 bp, synthetic construct
  misc_feature 1..849: note = Description of Artificial Sequence: Synthetic coding sequence
  source 1..849: mol_type = other DNA
atggccatgtcttctggagggtccggtggcggtgtgcccgagcaggaggatagcgtcctatttcggagggggactggacagagtgacgatagtgacatatgggatgacacagctctgataaaagcttatgacaaagctgtggcatctttcaagcatgcattgaaaaacggggacatctgcgaaacctctgggaagcccaaaaccacacccaagcgcaagcccgcaaaaaaaaacaaatctcagaagaagaacaccgccgcaagcctccagcaatggaaagtcggcgataaatgtagcgcgatctggtcagaagatgggtgcatatacccagccaccattgcctcaattgacttcaagagagaaacatgtgtggtggtgtatacagggtacggcaatcgagaagaacaaaacctgtctgacttattgagcccaatatgtgaggtggcaaacaatattgaacaaaacgctcaggagaacgagaacgaaagtcaagtttcaactgacgagagcgagaactcccggagccccggtaacaaatcagacaacattaagcccaagagcgcgccatggaactccttcctgccccctccccctccaatgcctggcccacgcctaggccctgggaaacctgggttgaaatttaatggccctccccctcccccacctccaccgcctccacacctgctgtcgtgctggctccctccattcccctctggacctccaattatccctccccctccaccgatctgtcccgacagcctagatgatgccgatgctctcgggagcatgttaatctcttggtatatgtcaggctatcataccggatattatatggagatgctcgcgtag

SEQ ID NO: 242916 - DNA, 789 bp, synthetic construct
  misc_feature 1..789: note = Description of Artificial Sequence: Synthetic coding sequence
  source 1..789: mol_type = other DNA
atggccatgtcatctggcggatctgggggtggtgtgcccgagcaagaggatagtgtcttgtttcggagagggacaggccagagtgacgactcagatatttgggatgacacagctctcattaaggcttacgataaggcagtcgcaagcttcaaacatgctcttaagaacggcgacatctgtgaaacgagcggtaaacccaagaccactcctaaaaggaagccagctaagaagaataagtctcagaagaagaatacagctgccagtctgcagcagtggaaggtgggggacaaatgcagtgctatctggagcgaggatggctgtatctacccagccaccattgcttccattgacttcaaacgggagacctgcgtagtggtgtataccgggtatgggaaccgcgaggaacagaatttgtcggatctgttgtctcctatttgcgaagtggcgaacaacattgagcagaatgcccaggagaacgaaaatgagtcacaagtgtccacagatgaaagcgagaactcccgcagccccggtaataagtctgacaacatcaagccaaaatctgccccttggaactccttcttgcccccaccgccaccaatgcctggacccagactgggtcctggtaagatcatccccccaccgccacccatctgccctgattccttagacgacgccgatgccctcgggagtatgctgatctcctggtatatgagtggatatcacactggttactacatgggattcaggcaaaaccagaaagaaggtcgctgttcccattcactgaattag

SEQ ID NO: 242917 - DNA, 885 bp, synthetic construct
  misc_feature 1..885: note = Description of Artificial Sequence: Synthetic coding sequence
  source 1..885: mol_type = other DNA
atggcaatgagcagcggtggctccggtggtggtgtccctgaacaagaggacagcgttctatttcggcgaggcaccggtcagagcgacgacagtgacatctgggatgacaccgccctgattaaagcctacgataaggctgtggcaagctttaagcacgcactgaagaatggagacatttgtgagacatctggtaagccaaaaacaacgcccaaacgtaagccagctaaaaagaataagtcacaaaagaaaaacaccgcagcaagtcttcaacaatggaaggtaggcgacaagtgctccgctatctggtccgaagatggctgtatctaccctgcaacaatcgccagtattgattttaagcgggagacgtgcgttgtcgtgtatactggctatggcaacagagaggaacagaacttatctgacctgctcagccctatttgtgaggtggctaataacattgagcaaaacgctcaggagaacgagaatgaatcacaggtctccaccgacgagagcgagaactccaggtctccgggtaacaagtccgacaatatcaagccgaagagcgcgccttggaactccttccttcccccaccaccacccatgcctggaccacggttgggcccaggaaagcccggtcttaaattcaatggccctcccccaccaccacccccacctccccctcacctcttgtcttgctggctgccgccatttccttcggggcctccaatcatacctccaccccctcctatttgccccgactcgctagacgatgccgatgctttaggttctatgctaatctcatggtacatgtcggggtatcacaccggttactacatgggtttccgacagaatcagaaagagggcaggtgctcccatagtctgaactag

SEQ ID NO: 242918 - DNA, 885 bp, synthetic construct
  misc_feature 1..885: note = Description of Artificial Sequence: Synthetic coding sequence
  source 1..885: mol_type = other DNA
atggctatgagctctggaggcagtggtggaggagtgcctgaacaggaggattcggtcctgttcaggaggggaaccggacaatccgacgacagcgatatatgggacgatactgcactcattaaggcttacgacaaagctgtcgcctctttcaagcacgccttaaaaaacggcgacatttgtgagacatcagggaagcctaagacaactcctaagcgcaaaccagcgaagaaaaataagtctcaaaagaagaatactgctgcctccctgcagcagtggaaagtgggcgataagtgctctgccatctggtccgaagatggatgcatatatccggctacaatcgccagcatcgattttaaaagagaaacctgtgtagtggtctacacagggtacggtaatagagaagagcagaatcttagtgacctgctcagcccaatctgcgaagtcgctaacaacatagagcagaatgcgcaggagaacgaaaacgaatcccaggtttcgacagacgagagcgagaatagtcgcagccccggtaacaagagtgacaatatcaaacccaaaagcgccccttggaattccttcctacccccaccgccacctatgcccggaccaagattaggcccagggaaacccggactgaagttcaacggtccccctcctccaccgcctccacctccaccccacttactgtcctgctggttgccacctttcccttccggccctcccatcatccctcccccaccccctatttgtcccgactcattggatgacgctgatgcactgggaagtatgctgatttcttggtatatgagcgggtatcataccggctactacatgacaggttttcactgcgtctctcaggatgggcttaacctgctgaccccttag

SEQ ID NO: 242919 - DNA, 684 bp, synthetic construct
  misc_feature 1..684: note = Description of Artificial Sequence: Synthetic coding sequence
  source 1..684: mol_type = other DNA
atggcgatgtcatccggtggttctggcggtggcgtgccagagcaagaggattccgtcctcttccggaggggaactggccagtctgacgacagtgatatttgggacgacacagcattaatcaaagcttacgataaggctgtggcaagttttaagcatgctctaaaaaacggcgatatttgcgagacatcaggtaagcccaaaactacacctaaacgaaagcccgcaaagaagaataaatcccaaaaaaagaacaccgcagcgtctctccagcagaacgagaacgagtctcaggtcagcacagatgaatctgagaacagccgcagtcccggaaacaaatctgataacatcaagcctaagtcagccccttggaactcattcctgccaccacctcctccaatgcctggtccccgtctgggccctggaaagcccggtctgaaatttaatgggcctcctccacctccccctcctccacctccacatctgctctcctgctggcttccaccattcccatcaggcccaccaataatacctcctcctcctcccatctgtccagacagcctggacgacgctgatgcactagggtccatgctcatatcatggtacatgtccggctaccataccggatactacatggggtttcgccaaaaccagaaggaaggaaggtgcagtcattccctaaattag

SEQ ID NO: 242920 - DNA, 4494 bp, synthetic construct
  misc_feature 1..4494: note = Description of Artificial Sequence: Synthetic coding sequence
  source 1..4494: mol_type = other DNA
atgccccgttgcatagcgcacttttgcgagaaaccaccttcggtgtcttactcaattcttgagtcagtgagcaaagctaagtttgccgcaggcagcgtagtaagcttcaaatgtatggaggggtttgtactcaacacaagcgccaagattgaatgcatgaggggcggacagtggaaccctagtccaatgtcaatccagtgcattccagtacggtgtggggaaccaccgtccatcatgaacggatatgccagtgggagcaactacagcttcggagccatggtcgcctacagttgtaataagggcttttatataaaaggggagaagaaaagcacctgtgaggcaacaggacagtggtcatctcctattcccacttgtcacccagtttcatgtggggaacccccaaaagtcgagaacgggtttctggagcacacaaccgggagaatctttgaatctgaggtaaggtaccagtgcaatcccggttacaaaagcgtggggagccctgtgttcgtctgccaagccaaccgccattggcacagcgagagtcccctgatgtgcgtgccacttgattgcggaaagcccccacccatccaaaacggttttatgaaaggggagaacttcgaagtgggatccaaggtgcagttcttctgcaacgaggggtatgaattggtgggagactcttcctggacatgtcaaaaatctggcaaatggaacaaaaaaagtaatccaaagtgcatgcctgccaagtgcccggagccaccgctactcgagaaccagcttgtcctaaaggaactcactactgaggtgggcgtcgttactttttcatgcaaggaggggcacgtgctgcaaggcccatccgtcctaaaatgtttgccctctcagcagtggaatgactccttccctgtgtgcaagatcgtgctctgtactcccccaccactgatctctttcggagtgcctattccctcgtctgctctgcatttcgggagcaccgtgaaatactcctgcgtcggcggttttttcctgcggggaaatagtacaactctttgccagcccgatgggacatggtcgagtccattgccggagtgtgttccggtcgagtgcccacagcccgaagaaatccctaacggcatcatcgatgtgcagggtctggcctatctgtccacagcactatacacctgtaaacccggattcgagcttgtgggaaacaccaccacattgtgcggggaaaatggacattggttggggggaaaaccaacctgcaaggctattgaatgcctcaaaccaaaagaaattctaaacggcaaatttagttacacagacttacattacgggcagaccgttacgtactcctgcaatagaggcttccgtctggaagggccttctgctctcacctgcctggagaccggcgactgggacgttgatgctccctcttgtaatgcgatccattgcgatagccctcaacccatcgaaaacggattcgtggagggagctgattacagttatggagcaatcatcatttattcctgtttcccaggatttcaagtagctgggcacgcaatgcagacatgcgaggagtctggatggagcagttctatcccaacttgcatgcctatcgattgcggactgcccccacacatagactttggagattgtaccaagctaaaagacgaccaaggttacttcgaacaggaggatgatatgatggaggtgccttatgtgacaccacaccctccatatcacttgggcgctgtagccaagacttgggagaatacgaaagaaagccccgctactcattcatcgaattttttgtatggtactatggtttcatacacctgtaatcccggatacgagctcctgggtaatccagttctgatatgccaggaagacggcacatggaatggcagcgcacctagctgcatttccatcgagtgcgatctcccaacagctccagagaacggattcctgcgttttaccgagacatctatggggtctgctgtccagtactcgtgtaaacctgggcacatcctggcaggttccgatttaagactgtgtttggaaaaccgcaagtggtcgggagcttcgccgaggtgtgaggcaatttcctgcaagaagccaaatcctgtgatgaacggatccatcaaagggtcgaactacacgtatcttagtactctgtactacgaatgtgacccagggtacgttctgaacggaaccgagcgccgtacctgccaggatgacaaaaactgggatgaggatgaacctatctgtattccagttgactgtagcagtccgccagtatccgccaatgggcaagtgcggggtgacgaatatacctttcagaaggaaatagaatacacctgtaacgagggctttttactggagggcgctaggagcagggtgtgccttgcgaacggtagctggtccggggcaacaccagattgcgtccctgtcagatgcgccactcccccacaactggctaatggagtgaccgaggggctggactatgggtttatgaaggaagtgacctttcactgccacgaaggatacatcttgcatggcgctcctaagctgacttgccagtctgatggcaattgggacgccgaaatccctctgtgcaaaccagtgaactgtgggccaccagaagacttggcccatggatttccaaacggtttcagttttatccacggtggacacatccagtaccagtgcttcccagggtacaagctgcacgggaacagcagcaggcgctgcctcagtaacgggagctggtcaggaagcagtccctcctgcctcccatgtagatgcagtacgcccgtgatcgagtacggcaccgtgaacggcaccgacttcgattgtggaaaggcggctcgtatccagtgttttaaggggttcaagttgttgggcctgtctgagattacctgcgaagccgatggacaatggtcctctgggtttccccattgtgaacacacatcgtgcggaagcctgccaatgattccgaatgcctttattagcgaaacctcttcatggaaagagaacgtcatcacctatagctgcagatctggctatgtcatccaagggagttccgatctgatctgcacagagaaaggcgtatggagtcagccatatccagtctgcgagcccctttcctgtgggtccccgccaagcgtagccaatgccgtggcaaccggcgaggcgcacacatacgagtctgaggtcaagctccgctgcctggaaggctatacaatggacactgatactgacaccttcacatgtcagaaggatggacggtggttccccgaacgaatcagctgttctccaaagaagtgccctctccccgagaacataactcacatcctcgtccatggggacgattttagcgtgaatcggcaggtcagtgttagttgcgcagaggggtacacatttgagggagtgaatatttctgtctgtcagctagacgggacatgggagcctcctttttccgacgaatcctgctcccccgtatcttgcggaaagcctgagagtcccgagcacggtttcgtcgtaggatcaaagtacactttcgaatcaactatcatttatcaatgcgagccagggtacgaactagaaggtaatagggaaagagtctgccaagagaatagacagtggtcaggcggtgtcgcaatctgcaaagagaccaggtgcgagacacctctggaattcctcaatggtaaagctgacatcgagaatagaacaacaggtccaaatgtggtgtattcttgcaacaggggctactccctggagggacctagtgaggcacattgtaccgaaaatggcacatggtcacatcccgtcccactgtgcaaacccaatccatgcccagtgccgtttgttatacccgagaatgcactactcagcgagaaagaattttatgttgaccagaacgtgtctattaaatgccgggaaggcttcctgctccaaggacacgggatcattacttgcaaccccgacgagacatggacacaaactagcgctaagtgcgaaaaaatttcttgtgggccacccgcacacgtcgagaatgctatagcaaggggagtccattaccagtatggagacatgataacctactcctgttacagtggctatatgctggaaggcttccttaggagcgtctgcctggagaacggcacatggacctccccccctatctgtcgcgctgtgtgccgctttccatgtcagaacggtggtatttgtcagagacccaacgcttgttcctgccctgagggctggatgggaaggttatgtgaggaacctatttgcatcctgccttgcttgaatggtggccgatgcgtggccccttaccaatgtgactgtcctccaggatggaccgggagtagatgccataccgccgtgtgccagagcccctgtctgaacgggggaaaatgtgtccgtccgaatcgatgtcactgcctgagttcatggacgggacataattgcagccgtaaacgacgtaccggcttttag

SEQ ID NO: 242921 - DNA, 4650 bp, synthetic construct
  misc_feature 1..4650: note = Description of Artificial Sequence: Synthetic coding sequence
  source 1..4650: mol_type = other DNA
atgtggccgagactggctttttgctgttggggcctcgcgctagtgagcgggtgggcaactttccagcaaatgtccccatcaagaaactttagcttcagacttttccccgagactgcgccaggagccccaggcagcattccagcgccacccgcacccggagatgaggctgcgggaagtagagtagagagattgggacaggcgtttaggcgacgtgtgcgcctgctgagagagctttctgaacgattagaactcgtctttcttgtagatgattcttccagcgtcggggaggtcaatttccgcagtgaactgatgttcgtgcggaagttgctgagcgatttcccagtggtgcccaccgccactagggtagccatcgtaactttctctagtaaaaactatgttgtccctcgggtcgattacattagtacacgcagagccagacagcacaagtgtgcattgctgcttcaggaaattccggctattagttatcggggaggcggaacttatactaagggggcattccagcaagcggcacagatcctgctccatgccagggagaatagtaccaaggtcgtctttctcataaccgatggatactctaatggcggtgaccctagacccattgccgcaagcctacgggacagcggtgtagaaatttttacgtttggcatctggcagggcaacattcgcgagctcaatgacatggcgtccaccccgaaggaggagcactgctatctcctccatagctttgaggaatttgaggcattggcaaggagggcactgcatgaagatctaccaagtgggagttttattcaggacgatatggtgcattgttcctacctgtgtgatgaaggtaaagactgttgcgaccggatgggctcctgtaagtgtggaacacacacagggcactttgaatgtatctgcgagaagggatactacggcaaagggctgcagtatgagtgcacggcttgcccgagcggtacctataaacccgagggcagtccaggaggcatatcctcttgcataccctgcccggatgagaaccatactagcccacccggatccacttctccagaggattgcgtgtgcagagaaggctatcgggcttcggggcagacttgtgagttggtgcactgccctgccctgaagcctcccgagaatggatatttcatccaaaacacatgtaataatcactttaacgctgcgtgcggagtgaggtgtcacccgggttttgacctggtggggagctcgatcattttgtgcctgccaaatggcctttggtcaggcagcgagagttattgccgcgtgcgaacctgccctcacctccgccagcctaagcatggtcacatttcctgtagtacaagagagatgctctacaaaaccacatgcctggtggcgtgcgatgagggctacaggctggagggatctgataaattgacctgtcaagggaattcccagtgggacggtcccgagcccaggtgcgtggagaggcactgctcgactttccagatgcccaaggacgtcataatatcaccacacaactgtggtaagcaaccggctaagtttgggaccatatgctacgtctcctgccggcaaggctttatcctgtccggagtaaaggaaatgcttagatgcaccacttccggcaagtggaatgttggtgtgcaggcggctgtctgtaaggatgtggaagcaccccagatcaattgcccaaaagacatagaggccaagaccctcgagcagcaggacagcgctaacgtgacttggcagattccgaccgcgaaggataattctggggagaaagtcagcgtgcatgtccaccctgcgttcaccccaccctatctatttcccatcggcgacgtagctattgtgtacactgccactgacctttccgggaatcaggccagctgtatattccatatcaaggtgatcgacgccgagccacccgtgattgattggtgtaggtccccacctcccgtgcaggtcagcgaaaaggtgcacgccgctagttgggacgaacctcaattttctgacaactctggagctgagttggttattacgagatcccatactcagggtgacctcttccctcaaggagaaacgatagtgcagtataccgcaacggacccttctggcaataaccgcacatgcgacatccacatagtaattaagggatctccttgtgagattccctttacaccagttaatggagactttatatgtactccagataacaccggggtgaattgtaccctgacctgtctagagggctacgattttacggagggttccacggacaaatattactgcgcctatgaagacggggtgtggaaacctacttacacaactgagtggcccgactgcgcaaaaaaacggttcgctaaccacgggttcaagtctttcgagatgttctacaaagccgcacggtgcgacgacactgatctcatgaaaaaattctcagaagccttcgagacaactctgggcaagatggttcccagcttttgctccgacgccgaagacattgactgtcgtttggaggagaacttgactaagaaatactgcctcgaatataactatgattacgagaacggcttcgctatcggtcccggaggctggggcgctgctaaccggctcgattactcctatgatgactttctggatactgtacaggagaccgctacaagtattggcaacgccaagtcctccagaattaaacgttccgcgccattgtctgattataaaattaaactaatcttcaatataactgcttccgttcccctccctgacgaacggaatgatactcttgaatgggagaatcagcaaagacttcttcaaaccttggaaacgattacgaacaagctgaagcggaccttgaacaaagaccccatgtattcatttcagttggcttccgagattttgatagccgactcgaattcccttgagaccaagaaggccagccctttttgccggcctggcagcgtgttaagaggccgaatgtgcgtgaactgtccactgggcacctattataatctcgaacatttcacctgcgagagctgtaggattgggtcttaccaggacgaggaaggacagttggagtgtaagttgtgcccatctggtatgtacacagaatatatacattcccgcaatattagtgattgtaaagcacaatgcaagcagggcacttactcttacagtggcctggagacatgtgaatcatgccctctgggaacctaccagccaaagttcggctcgagatcatgcttatcctgccccgagaatacttccacagttaagagaggggcagttaacatctctgcgtgcggagtaccgtgtccagaaggcaagttcagccgcagtggactgatgccgtgccacccttgtcccagggactattaccagcccaatgccggaaaagctttctgtctcgcatgtcccttttacggcacaactccttttgccggatctaggtccattaccgagtgttcgtcgttctcatcaacattcagtgcggctgaagagtcagtggttcccccagctagccttggccatataaagaaacggcacgagatctcaagccgggtgttccatgaatgtttttttaacccctgtcacaacagtgggacgtgccagcagctgggcagagggtatgtttgcctgtgccctctgggatacaccgggctgaaatgtgagacggatatcgacgaatgctctcccttaccctgccttaataacggagtgtgcaaagatttggtgggagagtttatatgcgaatgcccttcgggctacacaggacagcggtgtgaagaaaacatcaacgagtgctctagctctccttgcctcaataaaggtatttgcgtagatggcgtggctggctaccgctgcacgtgtgtcaaaggattcgtgggcctccattgcgaaaccgaagtaaacgaatgtcaaagcaatccttgcctcaataacgctgtctgtgaagaccaggtgggcggtttcctgtgcaagtgcccacctggatttttggggacccggtgcggcaagaatgttgatgagtgcctgtcccagccttgtaaaaacggtgctacatgcaaggacggcgctaactcatttcgctgcctttgcgctgccggattcacaggctcccactgtgaacttaacataaacgagtgccagtccaacccatgccgcaaccaggccacctgtgtcgacgagctgaactcatactcctgcaaatgccagccagggtttagcgggaagcgctgcgaaacagagcaatccacaggattcaatctggactttgaggtgtccggtatctatgggtatgtcatgctggatggcatgctgccgtcactgcatgcgctaacatgtacattctggatgaaatcatcagatgatatgaattacggtacccccatctcctatgctgtcgacaacgggagcgataacacgttactcctgaccgactacaatggttgggttctgtacgtgaatggcagggagaaaattactaactgtccttctgttaacgacggcagatggcaccatatcgccattacgtggacttctgccaatggaatctggaaggtgtacatcgatgggaagctttccgatggaggcgctgggctgtcagtggggctgcccatcccaggcatgttttag

SEQ ID NO: 242922 - DNA, 2538 bp, synthetic construct
  misc_feature 1..2538: note = Description of Artificial Sequence: Synthetic coding sequence
  source 1..2538: mol_type = other DNA
atgagtccttcaagaaacttctcttttcgattatttcccgaaaccgcccctggggcacccggatcaataccagctcctcccgctcccggtgatgaggccgcaggaagcagggtggaacgtctgggtcaagcatttaggcgcagggtgaggctgctgcgtgaactgtccgagcgtctggaactagtcttcctcgtggacgactcttccagtgttggagaggtgaactttcggtctgaactcatgttcgtgaggaagctgctgtcggatttccctgtggtgccaaccgcaacccgcgtggcgattgtcaccttcagttccaaaaactatgtcgtaccgagggtggattacataagcacgcgcagggctcgtcagcacaagtgtgcactcttgctccaggagatcccggcaatatcctataggggcggtggcacctataccaaaggagctttccagcaagcggctcagattctgcttcatgctcgcgaaaattccaccaaagtggtgttccttataacagatggatactcaaacgggggagaccccaggcccattgcggcttctctcagagatagcggggtcgaaatcttcacctttggcatctggcagggaaatataagggagcttaatgatatggcctcaactcctaaagaggaacactgttatctcctacattctttcgaagagtttgaagcccttgccagaagggctctgcacgaggacctgccctccggcagcttcattcaggacgatatggtgcactgttcgtacctgtgcgacgagggaaaggactgttgtgaccgcatgggctcctgtaaatgcgggacgcatactggtcacttcgagtgtatatgtgaaaagggctactatggcaaggggctccaatatgaatgcaccgcttgcccttcaggaacttataagccagaggggagcccaggtggaatcagctcctgcatcccctgccccgatgagaatcatacaagccccccaggatcaactagccctgaggactgcgtctgccgcgagggttatcgggcaagtggtcagacctgtgaattagttcactgtcccgctctgaagcctcctgaaaacggctattttatccagaacacctgcaataatcatttcaacgctgcttgcggggtgcggtgtcacccagggtttgatttggttggctcctctataatcctttgtttacctaacggcctgtggagcggtagcgaatcctactgcagagtgcgaacatgccctcatctgcgccagcccaaacacgggcacatctcatgttctactagagaaatgctgtataagactacttgtttggtagcctgtgacgagggctataggttggagggtagcgataagcttacctgtcagggcaatagccagtgggatgggcctgaacctcgctgcgttgaacggcattgttccacattccagatgccaaaagacgtgatcattagccctcataattgtggcaaacaaccagctaaattcggaaccatctgctacgtgtcatgccgccagggcttcatcctctccggggtaaaggaaatgcttcgctgcactactagtggcaagtggaatgttggagtgcaagcggcagtttgtaaagatgtggaggcccctcagatcaactgccccaaggacatcgaggccaagactctggagcagcaggactccgccaatgtcacttggcagatcccaacggcaaaagacaattctggtgagaaggttagcgtacacgtacatcctgcctttactcctccatacctgttccccattggtgacgtcgcaattgtatatacagccacagacctgagcggtaaccaggccagttgtattttccacatcaaggtaattgacgcagagccccctgtcattgactggtgcaggagcccccctcctgtgcaggttagtgaaaaagtacacgctgccagctgggatgagccccagttctccgataacagcggtgctgaactagtcatcaccaggtcccacacccagggagatctatttccccagggggagactatagtccaatacactgccactgatccctccggtaataatagaacttgtgacatacatatcgttatcaaggggagtccctgcgagattcccttcacaccggtgaatggagatttcatctgtaccccagacaacaccggagttaactgtaccctgacgtgtctggagggatatgactttacagaaggctcaactgataagtactattgcgcatacgaagacggcgtctggaagccaacctacacaaccgagtggccagactgcgccaaaaaacggttcgcgaaccacggctttaaaagcttcgaaatgttctataaagccgctaggtgcgatgataccgacctgatgaagaaattcagtgaggcttttgagaccacactggggaagatggtgccgtcattctgctcagatgctgaggacatcgattgcaggctggaggagaacctgacaaagaagtactgtcttgaatataactacgattatgagaatggatttgccatcggtaattag

SEQ ID NO: 242923 - DNA, 1548 bp, synthetic construct
  misc_feature 1..1548: note = Description of Artificial Sequence: Synthetic coding sequence
  source 1..1548: mol_type = other DNA
ctggagaaccagcttgtccttaaagagcttaccacagaagttggcgtcgtaacgttctcttgtaaagaagggcacgtgctccagggccctagtgtgctcaagtgtctgccatcccagcaatggaacgattcctttcctgtgtgtaaaatagtgctgtgtactcctccgcctctcatttcctttggggtgcctataccgtcaagtgcacttcattttgggagcacagtcaaatactcatgtgtcggtggatttttcctgcgtggcaacagcacaaccctgtgtcaacccgacggtacctggtccagtcctctgcccgagtgtgtgcccgtcgagtgtccacagcccgaagagatcccgaatggtattatcgatgtgcaaggactggcatatctgtcaaccgcactgtatacctgcaaacctggatttgagctggtcggcaacacgactacattatgcggcgaaaacggccattggctcggaggtaaacctacctgcaaagctattgagtgcctcaagccaaaagagattctgaacggaaaattcagctacactgatctgcattacggacaaactgtcacttacagttgcaacaggggcttcagactcgagggcccatccgctctgacctgtcttgagaccggcgactgggatgtagacgccccttcctgcaacgctatacactgcgattccccacagcccatagagaacggctttgtggaaggcgctgattacagttacggggctatcattatctatagttgtttcccgggatttcaggtcgccggacacgccatgcagacttgcgaggaatcgggttggtccagcagcattccaacctgcatgccgatagattgcggcttgccgccacacatagattttggggattgcaccaaattgaaagacgatcagggttatttcgagcaggaagacgacatgatggaagtgccatatgtgaccccacatccaccataccatctgggagctgtggcaaagacttgggaaaatacaaaagaatcgcccgctacacattccagcaattttctgtacggaaccatggtgtcttatacctgcaatccaggctacgagcttctcgggaatccagttctgatttgccaggaagacggaacgtggaatggcagtgccccttcttgcatctcaattgagtgcgatctgcccaccgctccggagaatgggttcttacgctttacggaaacatccatggggagcgcagtccagtatagctgcaagccaggtcacattctggccggttctgatctgcgcctgtgcctcgaaaataggaaatggagtggtgcttcccctcgctgtgaggcgatcagctgtaagaagccaaatcctgtgatgaatggttccattaaagggtctaactacacatatctctccacgctgtactatgagtgcgacccagggtatgttttgaacggtaccgagcgaagaacctgtcaggatgacaaaactggaatgagaatgagccctttcgccttcttatggacagctgttcacccacagagtcagccaatggccaggtag

SEQ ID NO: 242924 - DNA, 10647 bp, synthetic construct
  misc_feature 1..10647: note = Description of Artificial Sequence: Synthetic coding sequence
  source 1..10647: mol_type = other DNA
atgtctccatcaaggaacttttcttttaggctcttccccgagactgcacctggggcacctggctccatccccgctcctcccgcaccgggagacgaggccgctggctctagagttgaaaggctgggccaggcatttcgtagaagggtacgcttattacgggagctgtccgaacggctagagttggtgtttctggttgatgactcctcatctgtgggggaggttaacttcaggagtgagctcatgttcgtgcgcaaactgctgagcgatttcccagtcgtcccaaccgccacccgcgtcgcaatagtcaccttttctagcaaaaattatgtggtgcctagagtcgattacatctcaaccaggagagcacgtcaacacaagtgcgccctactccttcaagagataccggctattagctacaggggaggaggaacgtatacgaagggtgcattccaacaagccgctcaaattctgctgcatgcccgagagaatagcacgaaggttgtatttctgatcacagacgggtattcaaatggtggcgaccctcgtccaatcgccgcaagcctgcgggacagcggcgtcgaaatctttacttttggcatctggcaaggaaacatcagagaattgaacgacatggccagcacccccaaggaagaacattgctacctcttgcattccttcgaggagtttgaggccctggcaaggagggcgctgcacgaggacctgcctagcggatcttttattcaggacgatatggtgcactgtagctatctctgtgatgaagggaaggattgttgcgaccgaatggggtcatgcaagtgcgggacacataccggccatttcgagtgtatatgcgaaaaaggctattatggtaagggtttacagtatgagtgtactgcttgtccaagcgggacctataaaccggaaggatctccagggggaattagcagttgtattccctgtcccgatgagaatcatactagccctcccggatcaaccagcccagaggactgcgtgtgtagggaggggtaccgggctagcggccagacctgcgaacttgtgcattgtcctgcactgaaaccccctgaaaacggatacttcatccagaatacctgtaacaaccatttcaatgccgcttgcggggtgagatgccacccaggcttcgacttggtggggtcaagtattattctgtgtcttccaaacggactttggtcagggagcgagagttattgcagggtacggacatgtccccatctgcgacaacccaagcatgggcatattagctgctcaactcgcgaaatgctgtataagacaacctgtctggtagcctgcgacgaggggtaccgactggaaggaagcgacaagctgacctgccagggaaattctcaatgggacggaccggagcccaggtgtgtcgaacgccactgctctacttttcagatgcccaaggacgtgatcatctcacctcacaactgcgggaaacaacccgcaaaattcggaactatttgctacgtgagctgcaggcagggttttatcttatcaggcgtcaaagaaatgctccgttgcacaacgtctggaaagtggaatgtgggggtgcaggcggcagtttgcaaggatgtggaagccccacagatcaactgccccaaggatatcgaagccaagacgctcgagcagcaggattcagcaaacgttacatggcaaattcctactgctaaagataacagtggggaaaaagtctcagtccatgtccatccagcttttactcccccttacctgttccccatcggggacgtggctatagtctataccgcaacagatctgtcagggaatcaggcaagttgtatctttcacatcaaggtcattgatgcagagccacctgtgattgactggtgtaggtctccccctcccgtgcaggtttccgaaaaagtacacgctgcaagttgggacgaaccacaattcagcgacaacagtggcgcagaattggtgatcactaggtcccacacccaaggtgatcttttcccccagggggagacaatcgtccagtacacagcaacagatccgtcaggtaacaacaggacctgtgacatacacatcgttattaaagggagcccttgtgagatccctttcacacccgttaacggcgactttatatgcacccctgacaacacgggggtcaattgcactctgacctgcctcgaaggctatgactttactgagggctctactgacaagtattattgcgcctacgaggacggggtttggaagccaacatacacaacagagtggccagactgcgctaagaaacgttttgccaaccacggctttaaatctttcgaaatgttctacaaggcagctaggtgcgacgatacagatctaatgaagaaattttcagaagcttttgagaccacactcgggaagatggtcccatccttttgctccgacgccgaggacatcgactgcaggctcgaggagaatctgactaaaaaatattgccttgaatataattatgactacgaaaacggattcgccataggaccaggcggatggggagccgcaaacagactggactatagctatgatgattttttggacactgtccaggaaaccgccacctccatagggaatgccaagagtagccgaatcaagcggagtgcacccctgtccgattacaagattaagctgatcttcaatatcacagcaagtgtgcccctgccggacgagagaaacgacaccctggaatgggagaatcagcagcggctgctacagactttggagaccatcacaaacaaactgaagcgaacacttaacaaggaccctatgtatagctttcaattggcttctgaaatcctcattgccgacagcaattccctggaaacaaagaaggccagccctttttgcaggccagggtcggttctccgtggacgcatgtgcgtaaactgccctttgggaacctactataatctggagcatttcacttgtgaatcatgcagaatcggctcctatcaggacgaagaaggacagttagagtgtaaattgtgcccaagcggcatgtataccgagtatattcactctaggaacattagcgattgtaaggcccagtgtaaacagggcacctattcatattccggcttggaaacatgtgaaagctgtccattaggtacataccagcctaagtttgggagcaggtcttgtctcagctgtccagagaacacctcaacagttaaaagaggcgctgtcaacataagcgcttgcggggtgccatgccccgaaggaaaattcagcagatccgggctgatgccttgtcacccatgcccccgagactattatcagcctaacgcagggaaggcgttttgtttggcgtgccccttttacggcacgactccatttgctggcagccgcagcattacagagtgtagctccttttcatcaacctttagcgcagcagaagagagtgtggtgcccccagcctcgctggggcatattaagaagaggcacgaaatctcatctcaggtcttccacgagtgctttttcaacccctgtcataacagcgggacatgtcagcagcttggcaggggatacgtgtgtctgtgccctctgggctacaccgggcttaagtgcgaaacggacattgacgaatgttcccccttgccttgcttgaataatggtgtttgtaaagatctcgtcggtgaattcatttgcgagtgtccatcggggtataccggacagcgctgtgaggagaacattaatgagtgttcatcctcaccatgcctgaataaaggcatatgcgtcgacggtgtggctggctaccggtgcacttgtgtgaaggggttcgtcggattgcactgcgagactgaggtaaacgagtgtcagagcaacccgtgtcttaacaacgctgtgtgtgaagatcaggtaggcggatttctctgtaaatgtcccccaggattcctggggacgagatgtggaaagaatgtcgacgaatgcctgagccagccgtgtaaaaatggcgctacctgcaaggatggagccaatagcttcaggtgcctgtgcgctgcagggtttactggttctcattgcgagctgaacattaatgagtgccagagtaatccgtgcagaaatcaggccacttgcgtggacgaactgaattcctattcctgcaagtgtcagccgggttttagcggtaagaggtgtgagaccgagcagagcactggcttcaacctcgactttgaggtgtctggaatttacggttatgtcatgctggatgggatgttgcccagcctacacgctctgacctgcacattttggatgaaaagttcagacgacatgaactatggaactcccatcagctacgctgtcgacaatggtagcgataatactctcttgctaaccgactataatggatgggtcctttatgtaaacggtcgcgagaaaattaccaattgcccgagcgtgaacgatggtaggtggcatcatatcgccataacctggacttcagccaatgggatttggaaggtatacattgacggcaagctatcagacggtggggctggtttgtcggtgggactgcctatcccgggaggaggcgcattagtcttagggcaggaacaagataagaaaggagaaggcttctctccagcagaatcctttgttggcagcatctctcaactgaatctctgggattacgtactgtcaccacagcaggtgaaatctcttgcaacctcttgtcctgaggagctgtctaaaggtaacgtcttggcctggccagattttttatctgggattgtgggtaaggtgaaaatagacagtaagagtattttctgttcagattgcccaagactcgggggatccgtgcctcacctaagaacagcctccgaggacctcaaacctggtagtaaggtgaacctgttctgcgatcccggttttcaactggtggggaacccagttcaatactgccttaatcagggccaatggacacagcccctgcctcattgtgagcgaattagttgtggcgtccccccacctctggaaaacgggtttcatagtgccgacgacttttacgccggttcaaccgtgacctaccagtgcaacaatgggtactaccttctgggggactccagaatgttttgcactgataacgggagttggaacggcgttagcccaagctgcctcgacgtagacgagtgcgctgtgggatcagactgtagtgagcatgcaagctgtcttaacgtggatggcagctatatatgctcttgtgtccctccctatacaggagatggtaagaattgtgcagagccaattaagtgcaaagctcccggtaatcccgagaatgggcactcttctggggagatctatacagtcggagccgaagttacctttagctgtcaggaaggataccagcttatgggtgttacaaaaattacatgccttgaaagcggagaatggaatcacctgatcccttattgtaaggcagtcagctgtggtaaacccgctattccagaaaacggttgtattgaggaacttgccttcactttcggtagcaaagtcacctatagatgtaataaggggtatacgctggctggtgataaagagtcttcctgtttggctaatagctcctggtctcacagcccccctgtctgcgaaccggtcaaatgttcatctcccgagaacatcaataatggaaagtacatccttagcggcctaacttacctcagcacagcaagctatagttgtgacaccgggtactccctccagggcccttctattatagagtgtacagcatcaggcatatgggaccgggctccgccagcttgccaccttgttttctgcggtgagccacctgctatcaaggatgccgtgataactggaaacaacttcacttttcgcaacacagtcacttatacatgcaaggaaggttacacactggccggtctcgataccatcgagtgcctcgctgacggtaaatggagtagaagcgaccaacagtgcctggccgtgtcttgtgacgaaccaccaatcgtggatcacgctagtccagagacagcacataggctgtttggggacattgccttttattactgctcggatggctactctctcgctgataattcacagttgctctgcaacgcccagggcaaatgggtacccccagagggtcaagatatgccccgatgcatcgcccatttctgcgaaaagcctccttccgttagttacagcatcctcgaatcagtgtcgaaagctaagttcgctgccggatccgtggtctcatttaaatgtatggaggggttcgtgcttaacacctcagctaagattgaatgcatgcgcggaggccagtggaatccctcgccaatgagcatccagtgcataccagtgagatgtggggagccgccatcaattatgaacggctatgcttccggtagtaactacagctttggcgctatggtcgcatatagttgcaataagggattttatattaagggcgagaagaaaagcacctgtgaagccacaggacagtggtcgtctccaatacccacttgtcatcctgtgagctgcggtgagccacctaaggtggaaaatggcttcctggagcataccaccggaaggatcttcgagtctgaggtacgttatcagtgtaaccccggttataagtcagtgggctcacccgtgtttgtctgtcaggccaatcgccactggcactctgaaagcccactgatgtgtgtgccactggactgtgggaaacctccccctatccagaacggtttcatgaaaggcgaaaactttgaggtggggagcaaagtccagtttttttgtaacgaagggtacgagctggtgggggactctagttggacatgtcaaaaaagcggtaaatggaacaagaaatccaatcctaaatgtatgcccgctaaatgtcctgaacctcccttgctggaaaatcagctcgtgttgaaagagctcacgaccgaagtaggtgtcgtgacattctcctgtaaggaaggacatgtcctacagggtccatccgtgctcaagtgcttgccttcacagcagtggaacgactcctttcctgtgtgcaagatcgtactgtgcacccctcccccactgatttcctttggagtgcccattccctccagcgcacttcactttggaagcacagtgaagtatagttgcgtgggcggattctttctccgagggaacagcacaaccctatgccagcctgacggcacgtggagctctcctctgcccgagtgcgttcctgttgagtgtccacaaccagaggaaattcctaatggtatcatagatgtccaggggctagcttaccttagcacagccctatatacgtgcaagcccggtttcgaactggtaggaaacactactacattgtgcggagaaaatggccactggcttgggggtaagcccacctgtaaggccattgagtgcctgaagcccaaggagattttgaatggaaaattcagctacactgacctgcattacgggcaaaccgttacttactcctgtaaccgcggattccgactggaaggcccttccgctctgacttgtctggagactggtgattgggatgttgatgctccctcatgtaatgcgatccactgcgacagccctcagccaattgaaaacggcttcgtggagggggctgactatagctatggagcaatcattatttactcatgctttccgggattccaggtggccggacacgccatgcaaacatgtgaagagagcggatggtccagtagcataccaacatgcatgccaatcgactgcgggctgccccctcatatcgattttggcgactgtacaaagctgaaagatgatcagggctattttgagcaagaggacgacatgatggaggtgccctatgtcactcctcatccaccgtaccatcttggagctgttgctaaaacgtgggagaatactaaggagtccccagccacccacagctccaatttcttatacggcaccatggtgtcctacacgtgtaaccccggatacgagttgctgggtaatcccgtactgatctgtcaggaggacggcacatggaatggctccgccccttcttgtatttctatcgaatgtgacctgcctactgccccagaaaatggatttctgcgctttacagagacatctatgggaagtgcggttcagtactcatgcaaacctggacatattctcgcaggaagcgatcttcggttatgtctagagaatagaaagtggtccggggcttccccacgctgcgaggctatcagttgtaagaagcccaatcccgtgatgaatgggagcattaaagggagtaactatacctacctatcaactctgtactatgaatgtgaccctggttatgtgttaaacgggacggaaagacggacatgccaagacgacaagaattgggacgaggacgaacccatttgcatccctgtggactgctcaagtccgcctgtgtccgctaacggccaggtgagaggggatgaatacactttccaaaaggagatcgagtacacatgtaacgagggatttctgctcgagggagcgcgtagccgggtgtgtctggccaacggcagctggagtggagccaccccggactgcgtacccgttcggtgtgcaactccacctcaacttgccaacggtgttaccgaaggactggattacggttttatgaaggaggtgacttttcactgtcatgaaggctacattttgcacggggctccaaagctgacatgccagtcagacggaaattgggatgctgaaatacctttgtgtaaacccgtcaattgcgggccaccagaggacctcgcgcacggtttcccaaacgggtttagctttattcatggaggacacatccagtaccagtgctttccaggctataagctccacgggaatagtagcagacggtgcctgtcaaatggctcctggtccggctccagcccttcatgtctcccctgcaggtgtagcacgcccgtgatagagtacggcaccgttaatggcacagattttgactgcggcaaggcagctaggatccaatgctttaaggggtttaagctactaggactgagtgaaatcacttgcgaggcagatggccagtggagcagcggtttcccccactgtgaacacacctcttgtggctcgctgcccatgattcctaacgccttcatctcagagacttcaagctggaaggaaaacgtcattacatatagctgccggtccggctatgtcatccaaggaagttctgaccttatctgtaccgagaagggcgtgtggagtcagccgtacccagtctgtgagcccctttcttgcggaagccccccatccgtggctaatgccgtcgcaacgggggaggcgcatacgtatgaaagcgaagtgaagctacgatgtctggaaggctacaccatggacactgataccgatactttcacttgtcaaaaagacgggaggtggttccctgaacggatttcatgttccccaaagaaatgcccgctaccggaaaacattactcacatcctggtacacggtgacgatttcagcgtgaaccgccaagtctctgttagctgtgcagagggatacactttcgaaggtgtgaatattagcgtttgtcaattggacggaacctgggagcccccattttccgatgagtcttgtagtccagtgtcctgcggtaaaccagagtctcctgagcacggctttgtggttggctccaaatacacctttgaatccacgataatctatcagtgtgagcctggatatgagctagagggcaatcgggaacgggtgtgccaggaaaatcgacagtggtctggtggagtggccatctgtaaagagacaaggtgtgaaacccctcttgaattcctcaatggaaaggccgatattgaaaaccgaacaaccggcccaaacgttgtgtattcttgtaatagggggtattctctggaaggacctagcgaggctcactgcacagagaacgggacctggtctcaccctgtacccctatgtaagccgaacccctgtccggtaccattcgtgatacccgagaatgccctgctgagtgaaaaagagttctacgtggatcagaacgtgtcgataaaatgtcgcgagggattcctgctgcagggtcacggaataattacctgcaaccctgacgaaacgtggacacagacgagcgcaaaatgcgaaaaaataagttgcggcccacccgctcacgtggagaacgcaattgctagaggcgtgcactatcagtatggtgatatgattacctactcttgctatagtggatatatgctggagggcttcctgcggtcggtctgtctggagaatggaacctggacatcacctcccatttgtagggctgtgtgccgctttccttgccaaaatggtggaatttgccagcggcctaacgcatgtagctgtccagaaggctggatgggacgactctgcgaggagcctatctgcatcctcccatgcctgaacggtggcaggtgtgtcgctccgtaccagtgtgactgtcccccaggatggaccgggtctagatgtcataccgccgtatgtcagtcaccctgtctcaacggaggaaagtgtgtgagacctaatcgttgccactgcttatcttcatggactgggcataactgctcccgaaaaaggagaacaggcttttaa

SEQ ID NO: 242925 - DNA, 10716 bp, synthetic construct
  misc_feature 1..10716: note = Description of Artificial Sequence: Synthetic coding sequence
  source 1..10716: mol_type = other DNA
atgtggccgaggctggctttttgctgctgggggctcgcactagtctcaggctgggcaacctttcaacagatgagcccttcccggaacttttcattcaggttgtttccggaaactgcacccggtgctcccggttcgattcccgcacctcccgctcccggagacgaggctgccggtagcagagtcgaaagacttggtcaagcatttcgtcggcgtgttcggcttctgcgagaactgtccgagcgtttggaacttgtgttcctggtcgatgattcatcttctgtgggtgaagtcaacttccggtccgagcttatgtttgtaaggaaactattaagtgactttccggtggtgccaacagcaacaagagtcgccatagttacttttagcagcaagaattatgtcgtccccagggttgactacataagcaccagacgggctcgccagcacaagtgtgccctcctgttgcaggagattcccgcaatttcctataggggtggtggcacatataccaagggggctttccaacaggctgcacagatattgctccacgctcgagaaaactctaccaaggtggtgtttctgattaccgatgggtacagcaatggtggggaccctaggcccattgcggcatccctgcgtgactcgggagtggaaatctttacttttggaatttggcaggggaacatccgggagctgaatgatatggcaagcacacctaaagaggagcactgttatctgctgcactctttcgaggagttcgaagcattggcacggcgtgcgctgcacgaagaccttccttccgggagtttcattcaggacgacatggttcattgtagctatttatgtgacgaaggcaaggactgttgtgatcgaatggggagctgcaaatgtggtactcacactgggcactttgagtgtatctgcgaaaaggggtactacggaaagggattacagtatgagtgcacagcctgcccatccggcacatacaaaccagaaggttctccaggtggcatcagcagttgcattccttgcccggacgaaaatcatactagccccccaggaagtacttcaccagaagattgtgtttgccgagaagggtatagagcctctggtcaaacatgcgagttggtccactgccccgcactgaagccgcctgaaaatgggtattttattcaaaatacctgtaataatcacttcaatgctgcatgcggggttaggtgtcaccccggtttcgacctcgtgggtagttctatcattctatgcttgcccaatggcctgtggtcaggaagcgagagttactgtagagtgaggacatgccctcacctgaggcaacctaagcacggacatatttcttgctccacaagagagatgttgtacaagactacctgtctcgtcgcctgtgatgagggatatcggttggagggatcagataagttaacctgccagggtaacagccaatgggacggcccagagcccagatgtgtggagcgccattgctctaccttccagatgcccaaagacgtgattattagccctcataactgcgggaagcagcccgctaagttcggtacaatctgctatgtcagttgcaggcagggatttatcctttcaggtgtgaaggagatgttacgatgcaccacatccgggaagtggaacgtgggggttcaagccgctgtgtgcaaggatgtagaagcaccacagatcaattgccccaaggatatagaggcaaagacccttgagcagcaggactccgccaacgtgacatggcagatccccaccgcaaaagacaactctggcgaaaaggtgtccgttcacgtccaccccgcattcacaccgccttatcttttccctattggggatgtcgcaatcgtctataccgccacggatctgagtggaaaccaagcctcgtgtattttccacattaaagtaatagacgccgagcctcctgtgatcgattggtgtaggagtcctccccctgttcaggtaagcgaaaaggtgcatgccgcatcctgggacgagccccagttctccgataatagcggtgccgaactagtcataacgcgctcccatacacagggagatttatttccacagggagagacaatcgtacaatacacagccacagacccaagcggcaacaatcgcacgtgcgatatccacatagtgatcaaaggttccccttgtgaaattcctttcacccctgtaaacggggacttcatatgcacaccagacaacaccggagtgaattgcaccctcacatgcctcgagggatacgacttcacggagggaagcacggataagtactactgcgcctacgaagatggggtgtggaagcccacttatactacggaatggcctgattgtgccaaaaagcggtttgcgaaccacggattcaaaagtttcgaaatgttttataaggcggcaagatgcgacgatactgacctcatgaagaagttctctgaagctttcgagacaaccctcggcaaaatggtcccctccttctgttctgatgccgaagatatagactgtcggctggaagaaaacttgactaaaaaatactgtctggagtacaattatgactacgaaaacgggtttgctattggacctggaggctggggcgcagcaaaccgattggactattcttacgatgactttttagataccgtgcaggagaccgctacctcaatagggaatgccaaatcaagtagaattaaacggagcgccccattatccgactataaaatcaagctcatatttaatattacagctagcgtgcctctacccgatgagaggaatgatacactggagtgggagaatcagcaacgcctgctacaaacactggagaccataaccaacaaactcaagaggacactcaacaaagacccaatgtatagtttccagcttgcttcagagattctcatcgcggactctaactccctagaaactaaaaaagcatcgcccttctgtagacccggatctgtgctgagaggcaggatgtgtgtaaactgccctcttggcacgtactacaatttagagcattttacctgtgaatcctgcagaataggaagttaccaggacgaagaaggacaactggaatgtaagctgtgtccatccggcatgtatactgaatatattcactcaaggaacatctctgattgcaaggcacaatgtaaacagggcacttacagttattccggactggaaacctgcgagagctgtcctttggggacctatcagcctaagttcggatcacgctcctgcttgtcctgccccgaaaacacgagcactgttaagcggggtgccgtaaatattagtgcatgtggtgtgccttgccccgaggggaagttcagcagatccggcctcatgccttgccatccttgccccagagattattaccagcccaatgccggaaaagcattctgtttggcttgccctttctatgggaccacgccatttgctgggtcacggtccattacagagtgctcatcattcagttctacatttagcgctgcggaggagtctgtcgtacccccagccagtctaggccacatcaagaagcgtcacgaaatcagtagccaggtgtttcacgaatgcttcttcaatccctgtcataacagcggaacatgccagcaactgggaagaggttatgtctgtctttgccctttggggtatacaggcctaaagtgcgaaaccgatattgatgagtgttcaccgttgccttgcctgaataacggcgtgtgtaaagatctggtgggggaattcatttgcgaatgccccagcgggtacactggccaaagatgcgaggagaacatcaacgagtgtagctccagtccatgtctgaacaagggtatttgtgttgacggagtagctgggtatcgttgtacctgcgtcaaggggttcgtgggtctgcactgcgaaaccgaggtgaatgagtgtcaaagcaatccttgccttaacaatgccgtgtgcgaggatcaggtgggagggtttctctgcaaatgcccccctggtttcttgggcacacggtgtgggaagaatgtggacgaatgtttgagccagccttgcaaaaatggcgctacctgtaaagacggcgcaaactcttttcgttgtctatgcgctgcgggattcacagggtctcactgtgagcttaacattaacgagtgccagagcaatccctgccggaaccaggctacatgcgtagacgaactaaatagttattcatgtaaatgccagccaggattctccggcaaacggtgtgaaacagaacagtccacgggatttaatctagatttcgaggtcagtgggatctatggttacgtcatgctggatggcatgctgccttcactccatgctctcacgtgtaccttttggatgaaatctagcgacgatatgaactacggtacaccgatctcctacgctgttgataatggttctgataacactctcttgctcacagactacaacggctgggtgctatatgtcaatggaagggagaagatcacaaactgcccctctgtaaacgatgggcgatggcaccacatcgcaatcacctggacatccgctaacggtatctggaaagtgtacattgatgggaagttgagtgacggtggcgctggcttgagcgtcgggcttcctattcctggcggaggagcccttgtattgggccaggagcaggacaagaagggcgaaggattcagccctgcagagtcttttgtaggctccatctcccagttaaacctctgggactacgtcttatcaccacagcaggtgaaatccctggcgacttcttgtccagaggagttgagcaaaggcaacgtgttagcttggccggatttcctgtcaggcatcgtaggaaaggtaaaaattgacagtaagagcattttttgctcagactgccctcgactgggaggaagtgtcccccacttgcgaaccgcctcagaagacttaaaacccggttccaaagttaatttgttctgcgatccaggattccagcttgttggcaaccccgttcagtactgccttaatcagggccaatggactcagccccttccacattgtgaacggatctcctgtggcgtgccacctcccctggagaatggctttcattctgccgacgatttttacgccggatccactgtaacctatcagtgcaacaatggatactatcttctgggtgattctaggatgttttgcacagacaacgggtcttggaacggcgtgtcccccagttgccttgacgtggacgaatgtgctgtcggtagcgactgcagtgagcatgcgtcttgcctgaatgtggatggctcctacatatgcagttgtgtcccaccatatactggcgacggaaagaattgtgccgagccaattaagtgcaaagcacctggaaatcctgagaacggccattcctcgggggagatctatactgtcggagccgaggtgacctttagttgtcaggaagggtatcagttaatgggcgttaccaaaatcacttgcctcgaaagcggggaatggaaccacctgattccttactgtaaggctgtctcttgcgggaaacctgctatcccagagaacggttgcatcgaggagctggcctttactttcggctccaaagtgacttaccgctgtaacaaaggatataccctcgcgggagacaaagaatcctcctgtctggctaattcttcgtggagccattcccctccagtgtgcgagccagtaaagtgttctagtcccgaaaacatcaacaatgggaagtatattctctcgggtctgacatatctttctacggcaagctatagctgcgataccgggtactcgttgcaggggcctagtattattgaatgcacagcaagcggcatctgggatcgggctccaccagcttgccacctggtcttctgcggggagccacccgcaataaaggacgccgtgataacgggcaacaacttcacctttcggaacacagtgacctacacctgtaaagagggctatactttagctggactggataccatcgagtgtctggccgacggtaaatggtcgaggagtgatcagcaatgcctggctgtgagctgtgacgagccaccaatcgtagatcatgcttctccagagacagcgcaccgcctcttcggggacatagctttttactactgttctgacggctacagcctggcagataacagccaactgctgtgcaacgcacaaggcaagtgggtgccccctgagggccaggatatgccacgttgcattgcccacttttgcgaaaaaccaccctctgtgtcctacagcatactggagtccgtgtccaaggctaagttcgccgcaggcagtgtcgtgtcttttaaatgcatggaaggctttgtgttgaacaccagtgcaaagatcgagtgtatgagggggggacaatggaacccctcaccaatgtcgatacagtgcattccggtgaggtgtggcgagcccccatctatcatgaatggctacgccagtggatcaaattactcatttggcgcaatggtggcttatagttgcaataagggcttttacattaaaggagagaagaaaagcacatgtgaagctacgggccagtggagttccccaattccaacctgccaccccgtcagttgcggggaaccgccaaaggtggaaaatggctttctcgagcacaccactggccgaattttcgaaagcgaagtaagatatcagtgcaacccaggttacaagtcagttggtagccccgttttcgtatgtcaggcaaatcggcactggcatagtgaatcccccctgatgtgtgtccctctcgattgcgggaaacccccaccaatccagaacggttttatgaagggagagaactttgaggtggggtccaaggtgcaatttttttgtaacgaaggttatgagttggtcggtgacagctcttggacctgtcagaagtccggtaagtggaacaaaaaatccaatccaaaatgtatgccagctaaatgtccagagcccccactacttgaaaaccaactggttctcaaggaacttaccacggaggttggggtcgtaacattcagctgtaaagaaggacacgtcctccaggggccttccgtgcttaagtgtctgccatctcaacagtggaacgattcatttcccgtttgtaagatcgtcctgtgcacccccccaccattgatcagtttcggagtgcctatccccagctccgctctgcactttggcagcacagtgaaatacagttgtgtcggcggtttcttcctccggggtaattcaacgaccttgtgccagcctgacggtacctggagtagtcccttaccagagtgtgttcctgtcgagtgccctcagccagaggagatccctaacggcatcattgacgtgcaggggcttgcctatctgtcaactgcactttatacatgtaaaccagggttcgaactggtaggcaataccaccacactgtgcggtgagaacgggcactggttagggggtaaaccaacatgcaaggcgatcgagtgtctcaaacctaaggaaatactgaacggcaaattcagttacactgatctacactatggacagaccgtgacctatagctgcaaccggggatttaggctggaggggccaagcgccctgacatgtctggagacaggtgactgggacgttgatgctccaagttgtaatgccattcactgcgattctccgcagccgatcgaaaatggctttgttgagggcgcagattattcctatggcgcaattattatctattcatgttttccgggattccaggtcgccggacacgcaatgcagacctgcgaagaaagcggctggtcgtcttccattcctacgtgcatgcccatagattgcgggcttcctccacacatcgactttggcgactgcactaagctaaaggacgaccagggctattttgagcaggaagatgatatgatggaggttccatacgtgacaccgcaccctccctatcacctgggcgcagttgccaagacatgggaaaataccaaggagtcccctgccacgcattcctcaaactttctgtatgggaccatggtgagctacacctgcaaccccggttatgagctcttagggaatccagttctgatctgtcaggaagatggcacgtggaacggaagcgcgccaagttgcatctctattgagtgcgatctgcctaccgccccagagaatggattcctgcggtttacagaaacatctatgggcagtgccgtccagtacagttgtaagccgggacatatattggccggatcagacctccggctatgcttggagaaccgtaagtggagtggcgctagcccaaggtgcgaggcgatcagctgtaaaaagcctaacccagtcatgaacggcagtattaaaggttccaattacacctacctgtcaaccctgtactatgaatgtgatccaggctacgttctgaatgggaccgaacggcgtacctgtcaggacgacaagaactgggatgaggatgaaccaatttgcatccccgtagactgttcctcacctccagtatctgccaacgggcaggttcggggagatgaatacacgttccagaaagaaatcgagtatacttgcaatgaaggatttctcctcgaaggggctagatctagggtgtgtctggccaacgggtcctggagcggggcaacaccagactgcgttccagtgcgttgtgccacacctccacaattagctaacggcgtgaccgaagggctggattatggttttatgaaggaagtgaccttccactgtcacgagggttacattctccatggtgctcccaaattaacctgccagtccgacggaaattgggacgccgagatccccctctgcaagccggtgaattgtgggccaccagaggacctcgcccacgggtttcccaatgggttctcattcattcatggagggcacatacaatatcagtgctttccaggttataagctgcacggcaattcatctcgtcgttgtctttctaacgggagctggtctggctcgtccccatcttgtctcccttgtagatgttccactcccgttatagaatacgggactgtgaacggtacagattttgattgcgggaaggccgcaagaattcaatgtttcaagggcttcaagttgcttggcctatcggagataacatgtgaagccgacggccagtggtcgtccggatttccacactgcgagcatacaagctgcggaagtctccccatgattccaaacgccttcatcagcgaaacgagcagttggaaggaaaatgtgataacttactcttgcaggagcggatacgttatccagggtagttccgacttaatttgcacggagaagggagtttggtcacagccttaccctgtgtgcgaacctctcagctgtggatctcctccaagcgttgccaatgctgttgctaccggcgaagctcacacatacgagtcagaagtgaagcttaggtgtctcgagggctataccatggatacagacaccgacacctttacttgccagaaggacggacgctggtttcccgagcggatctcctgttcccctaagaagtgccccctgcccgaaaacattacacacatcctggtacatggagacgacttctcagtcaacagacaagtgtccgtcagctgcgcagagggatatacattcgaaggtgtgaatataagtgtgtgccaactggacggtacgtgggaaccccctttcagtgacgaatcttgtagcccagtgagttgtggaaaacccgagagtcctgaacatggattcgttgtaggctccaaatacaccttcgaatcaaccatcatctaccaatgtgagcctggttatgaactggaaggcaatcgcgagagggtctgtcaggagaaccggcagtggagcggaggagtggcgatatgcaaggaaacacgctgtgagacacctttagagttcttgaacgggaaggctgatattgagaacagaactactggccctaacgtggtttatagttgcaatcgcggatacagcttagaggggcctagcgaggcccactgtaccgaaaatggcacctggtcacaccctgtgccactgtgcaagccaaacccctgtccagtcccattcgtcatccctgaaaacgccctgctgtccgagaaagaattttatgtggaccagaatgtctccatcaagtgtagagagggatttctcctgcagggccacggaataatcacttgcaatcccgatgaaacttggacccagaccagtgcaaagtgcgagaagatctcttgcgggcctccagcgcacgtggaaaacgccattgccaggggggttcattaccaatacggggacatgatcacgtactcatgctattcgggctacatgcttgaagggtttttgagaagtgtatgtttagagaacggtacttggacctcccctccgatatgtcgtgcagtctgccggttcccctgtcaaaacggtggcatttgccaacgaccaaacgcgtgtagttgccccgaaggttggatggggagactgtgtgaggagcctatctgtattctcccgtgtctgaacggagggcgatgtgttgccccatatcagtgcgattgtcctccagggtggaccggttctcggtgccacacagccgtctgtcaatctccatgtctgaacggaggcaaatgtgtgcgcccaaaccgctgtcattgtttaagctcctggaccgggcacaactgttcacgtaagcgacgtaccggattctaa

SEQ ID NO: 242926 - DNA, 1356 bp, synthetic construct
  misc_feature 1..1356: note = Description of Artificial Sequence: Synthetic coding sequence
  source 1..1356: mol_type = other DNA
atggatttcgatgtcgggcgtacaacacacctgagctcaagcccttgcagtgcatctaatggaggggagtcaggccaagtcagcaagcggcgatgtctaattggtgagtctggtcacgacaccccgtggtgttccccaatcaaggttaaatacggagacgtttactgccgagcacctcagggtggttactacaagacagctctcggtaccagatgtgacattcgctgccagaagggttacgagctgcatggcagcagcttgctgatctgccagagcaacaagagatggagcgacaaggtaatatgcaagcaaaaacgatgtcccacactagccatgcccgcaaacggaggattcaaatgcgtggacggcgcttacttcaacagccgctgtgagtactattgcagcccaggatacacattgaaaggtgaaaggacagttacgtgcatggataataaggcctggtctggccgaccagcatcttgtgtggatatggagccgccacggatcaaatgtcctagcgtgaaggagcgcatcgcagagcccaacaaactgacagtgcgcgtgagttgggagactcctgagggccgtgatactgcagacggcatattgacagatgtgattctaaagggcctcccaccgggatctaatttcccggaaggagatcacaagatccagtacacagtgtacgatcgcgctgagaataaaggaacttgtaaatttagggtgaaggtgagagtgaagcgctgcgggaagcttaacgcccctgagaacggttacatgaagtgctcttcggacggcgataattacggagcaacctgtgaattttcatgcatcggcggatatgagttgcagggctcaccagctagggtttgccagtcgaaccttgcttggagtgggacagaaccgacctgcgccgcaatgaatgttaacgttggcgtacgaaccgccgctgccctgctggaccagttttacgaaaagagaagactgctgatcgtgtcaacacctactgcacgcaacttgctgtaccggctgcagctgggcatgttacagcaggcccagtgcggactcgaccttaggcatattactgttgtggagctggttggcgtcttccccaccctcatcggccgtatcggcgctaagatcatgccaccggctctggctttgcagctccgcttgctgctgagaatccccctctactcattcagcatggttctggtcgacaaacatgggatggacaaagagcgatatgtctcactggtgatgccagttgcgctttttaatttaatcgacacctttccactacgcaaggaagagatggtactccaggcagaaatgtcgcagacctgcaacacctag

SEQ ID NO: 242927 - DNA, 1395 bp, synthetic construct
  misc_feature 1..1395: note = Description of Artificial Sequence: Synthetic coding sequence
  source 1..1395: mol_type = other DNA
atgggatctccagctcataggcccgcactgctgctgctgttacctcctcttttgctgctactgctccttagagtacccccttccaggagttttcctgggtcaggagactctcccctagaagacgatgaggtgggctactcacacccccgttacaaggacacaccctggtgtagtccgataaaagtcaaatatggcgacgtgtactgtagggctccccagggcggttattacaagactgctctgggaacacgatgcgatatcaggtgtcagaagggatatgagctacacggcagtagccttcttatttgtcaaagtaataagagatggagcgataaggtcatatgtaaacagaaaaggtgtcccaccctggcaatgcctgctaatggagggtttaagtgtgtggacggggcatactttaacagtcgctgtgaatactattgtagcccaggttatacgctcaagggtgaacggaccgttacctgtatggataacaaagcctggagtgggaggccagcctcttgcgtcgacatggagcctcctcgaattaaatgtccaagtgtgaaggagagaattgccgagcctaataaattgaccgtccgcgtaagctgggagacacccgaaggaagagataccgctgacggcatcttgaccgatgtaattctgaagggtttacccccaggttccaacttccccgagggcgatcacaaaattcagtatacagtgtatgaccgagcagagaacaaaggcacatgcaaatttagagtgaaggttagggtgaagaggtgcggaaagctgaatgctccggaaaatggctatatgaaatgctcttccgatggggataactacggcgctacctgcgaattctcctgtatcggcggttatgaactgcagggctcccctgctcgcgtgtgtcagagtaacctggcatggagcggtaccgagccaacatgcgcagccatgaacgtgaacgttggtgtccgcaccgctgccgcattattggatcagttctacgagaaacgcagactccttattgtatcaacaccaacggccaggaacctcttatacaggctgcagctgggcatgctgcagcaggcgcaatgcgggctcgatctccgccatatcactgttgtcgagctggtcggcgtgtttcctactctgattggccgaatcggagctaagataatgcctcccgctctcgcactccagcttagactcctgttgagaattcctctgtattccttcagcatggtgctggtggacaagcacggtatggacaaggagcggtacgtgtctctcgtgatgccggtggcactctttaacctaattgacacattcccccttcggaaggaagaaatggtgctccaggctgagatgtcccagacgtgcaacacttag

SEQ ID NO: 242928 - DNA, 1218 bp, synthetic construct
  misc_feature 1..1218: note = Description of Artificial Sequence: Synthetic coding sequence
  source 1..1218: mol_type = other DNA
atgggaagcccggctcacaggcctgccctcttactcctgctgcccccactgttgcttctgttgctgctgcgagtccccccatcacgctccttcccgggttcgggagattctcctctggaagacgatgaggtgggctactctcacccacgctataaggacactccttggtgctccccaatcaaagtgaaatatggcgacgtgtattgccgtgcccctcagggaggctactataagaccgctctaggaactagatgcgatataagatgtcaaaaagggtacgaattgcacggatcatcgctgttaatctgccagagtaacaagcggtggagcgataaggtaatctgcaaacacatggagcctccccgaatcaagtgccccagcgttaaagagcgcattgctgagcctaataagttaaccgtgagggttagctgggagactcccgaaggacgagataccgccgacgggattctcacagatgtcattctgaagggtctccctccagggtccaattttccggaaggggaccacaaaattcaatataccgtgtacgacagagccgaaaacaaaggaacatgtaagttccgggttaaggtccgagtgaagcgctgcggcaaactgaatgcccctgaaaacggatatatgaaatgctcctccgacggggacaactatggagccacctgtgagttctcttgtatcgggggatatgagctgcaagggtcaccagctcgcgtgtgccagtcaaatctggcttggagtggaacggagccaacttgcgctgccatgaatgtgaacgttggcgtgagaacagctgcagctttactcgatcagttctatgaaaagcggagactgctgatcgtctctacccccacagctcggaacttattgtatcggctacagttgggaatgctgcagcaggcccaatgcggtctggatctgcgtcatatcacggtcgtcgagttagttggcgttttccctacactgattggcaggattggcgcaaagattatgcctcctgcattagcattgcagctgaggctgctgctgcgcattccgctctacagctttagcatggtgctggtggacaagcatggcatggataaggaaagatacgttagcctggttatgcccgttgcccttttcaacctgatagacacatttcctctgagaaaagaggaaatggtgctccaggccgaaatgtctcaaacgtgtaatacttag

SEQ ID NO: 242929 - DNA, 1140 bp, synthetic construct
  misc_feature 1..1140: note = Description of Artificial Sequence: Synthetic coding sequence
  source 1..1140: mol_type = other DNA
atgggaagccccgctcaccgcccagcactgctcttactgcttcctcccctattgctcctgctcctgctaagggtgcccccatctagatcttttcctgggagcggagactctccacttgaggatgacgaggttgggtactcccaccctcgctataaggacaccccctggtgttctcccatcaaagtcaaatatggggatgtgtattgccgggctcctcagggcggttactacaaaacagccctcggaaccagatgtgacattcggtgccagaaggggtacgaattacatgggagtagcctccttatttgtcagtcaaataagagatggtcggacaaagtgatttgcaaacaaaagcggtgtccgacattagctatgcccgcaaacggcggtttcaagtgcgtggacggtgcctatttcaacagtcgatgtgagtactactgttcccctgggtacacactgaaaggcgaacggacagtcacctgcatggataataaggcctggtccggtcggcctgcctcatgtgtagatatggaacctccccgtataaaatgcccctccgtgaaagagagaattgctgaacccaacaagctaactgtgcgcgtgagctgggaaacccccgagggtcgcgatactgcagatggaattctgactgatgtgattttaaaggggttacctccaggatctaatttcccagagggggaccacaagatccaatacacagtgtatgatagagcagagaacaaggggacatgtaagtttcgggtgaaagtgagagtcaaacgttgtggaaagctcaacgccccagagaacggctacatgaagtgcagttcggatggagataattatggtgctacctgcgaattcagctgtatcggaggctacgagctgcagggtagcccagccagggtatgccagagcaacctggcatggagtggcaccgagcccacatgtgccgcaatgaacgtaaacgtcggtgtgcgcacagccgcagctctgttagatcagttctacgagaagcggcgactcctgattgtgagcacacctaccgccaggaatctgctttataggttgcagctaggtatgcttcaggcagtggcagccaacccaacgctgctgctccagtacggggcaagcggctag

SEQ ID NO: 242930 - DNA, 1335 bp, synthetic construct
  misc_feature 1..1335: note = Description of Artificial Sequence: Synthetic coding sequence
  source 1..1335: mol_type = other DNA
atgggtagccccgcacacagacctgccctgctgctgcttttaccacccctgttgcttttgctcctcctgcgagtccccccaagtagatcctttcctgatacaccttggtgcagccctattaaggtgaagtacggtgatgtgtactgccgggcaccacagggcggatactacaaaacggcactgggtactcggtgtgatataaggtgccagaagggatacgaactgcatggctcttctctgttaatctgccagtcgaataaaaggtggtccgacaaggtgatatgtaagcagaagcgttgccccacgctggctatgcccgcaaatggcggatttaagtgcgtggatggggcttacttcaactcgaggtgtgagtactattgctccccaggatacaccctgaaaggcgagagaacagtaacctgtatggacaataaggcttggtcaggccgaccggcatcctgtgtcgacatggaaccacccaggattaaatgcccctcagtaaaagaacgcatcgctgagcccaataagttgaccgttcgggtgtcttgggaaacaccagaagggcgtgacaccgccgatggcatcctcacagacgtgattttgaaaggcctgccccctggctcaaactttcccgagggcgatcacaagattcagtataccgtgtacgaccgagctgagaataagggtacctgcaagttcagagttaaagtcagggttaagagatgcggaaaactcaacgcacctgagaacggctatatgaagtgtagctccgacggcgacaactatggagctacctgcgagtttagttgcattggcggatatgaacttcagggaagtcctgctagggtctgtcaaagcaacttagcttggtccggaacagagccaacatgtgcagctatgaatgtcaacgtgggcgtgagaaccgctgcagcgctgctagaccaattctacgagaaaagacggttactgatagtctcaacacccaccgcgaggaacctactgtacaggctacagctgggcatgctccagcaggcccaatgcggcttggatctgcggcacatcaccgtagtggaactcgtcggagttttcccaacgctgatcggacgaatcggcgcaaaaatcatgccacccgctctggccctgcaactccgcctgttgctgcgcatacccctgtatagcttcagtatggttctggttgacaagcacgggatggataaagaacggtacgtttccttggtgatgcccgttgcactttttaacctgatcgacacatttcctctcaggaaagaggaaatggtcctccaggccgagatgagccagacttgcaatacatag

SEQ ID NO: 242931 - DNA, 1398 bp, synthetic construct
  misc_feature 1..1398: note = Description of Artificial Sequence: Synthetic coding sequence
  source 1..1398: mol_type = other DNA
atggcctcacagctgactcagagaggggcactttttcttctgttcttcctcactccggctgtcaccccaacctggtatgcaggttccggttactaccccgacgaaagttacaatgaagtttatgctgaggaggtcccacaggctcctgctctcgactacagagtgccacgctggtgctatactctcaatattcaggatggtgaagccacgtgctactcgcctaaaggaggaaattaccactcatccctaggaactagatgcgaactgtcctgtgacaggggcttccgattaatcggccgtaggtcagtgcaatgcctgccctccagacgctggtccggtaccgcctactgccggcagatgcgatgccatgcactccctttcatcacatctggaacttatacttgcacaaacggcgtgcttctggatagcagatgtgactactcttgcagctcaggttaccatctcgaaggggaccggtcgcggatctgtatggaggatggaaggtggtcagggggtgaacccgtatgtgtggatatagaccccccaaaaatccggtgcccgcattccagagagaagatggccgagccagaaaagcttaccgcacgtgtttattgggacccacctttggtcaaagattccgctgatggtactatcacaagggtaaccctacggggacctgagcctggtagccattttccggaaggtgagcacgtcatcaggtataccgcgtatgatcgagcctacaaccgagccagttgtaaatttatcgttaaggtgcaagtcagacggtgcccgaccctcaaaccccctcagcacggatatttaacctgtacaagtgccggagacaactacggtgctacctgcgagtatcattgcgatggaggctatgaccgccagggcactccgagccgggtgtgccagtccagcagacagtggagcggtagtcctccgatctgcgcgccaatgaaaattaatgtcaatgttaattcggccgctgggctgctagaccagttttatgagaaacaacggctgctcatcatcagcgctcctgacccttccaatcggtattataagatgcagatcagtatgctgcaacagagtacttgcggtttggacctgcgccacgtcacaatcatcgagctggttggacagccacctcaagaggttggacggatcagggaacagcaattatctgcgaacatcattgaggagctgcggcagttccaaaggctcacacgttcctatttcaatatggtgctaatcgacaaacaggggatcgaccgcgatcggtacatggagccagtcacacccgaagaaatatttacattcatcgatgattacctgctgagcaaccaagagctcactcagagacgcgaacagcgcgatatttgcgagtag

SEQ ID NO: 242932 - DNA, 1452 bp, synthetic construct
  misc_feature 1..1452: note = Description of Artificial Sequence: Synthetic coding sequence
  source 1..1452: mol_type = other DNA
taaacttttatggtagaagatgcagtcgaggctattggttttggcaagtttcagtggaagctgtccgtcctcacaggtctggcctggatggcggacgcgatggagatgatgatcctctctatactggcacctcaattacattgtgaatggagactccccagctggcaagtcgccctgttaacatccgtggtgttcgttggcatgatgtcatcctccactctttggggcaacatcagcgaccaatacggcaggaaaacgggcctgaagatttcggtactctggactctgtactacggcatactgagtgccttcgcaccagtgtactcttggatactcgttctgcggggacttgtcggcttcggcatcggaggcgtacctcaaagcgtcacactgtacgccgagtttctgccgatgaaggcccgagccaaatgcatcctactgatcgaggttttttgggctattggaactgtgttcgaggtcgtgctcgccgtattcgtgatgccttctctgggatggagatggctgctaatcttatcagctgtgcccttgctcttattcgccgtactgtgtttttggttgcctgagagcgctcggtacgacgtactttccggaaatcaggagaaggccattgctacattgaagcggatagctactgaaaatggcgctccgatgcctttaggaaaactgatcatttccagacaggaagatagaggcaagatgcgggatttgttcaccccacacttcagatggaccacacttctgctgtggttcatttggttcagcaacgccttttcttactacggactggtgttattgacaacagagttattccaggcaggagatgtgtgcggtatctccagtaggaagaaagcagttgaggctaaatgttcactggcctgcgagtacttaagcgaagaggattatatggatctcttgtggaccactttgtccgagtttcccggagtgctggtgactctgtggatcattgacagactgggacggaagaaaacaatggccctgtgtttcgtgatcttttctttttgtagtctcctgcttttcatatgcgtggggaggaacgtactgaccctgctgctgtttatagcacgggcattcattagcggcggattccaggccgcatacgtctacactccagaggtttacccaactgccacacgcgctctgggactgggtacctgcagcgggatggcacgtgtcggggctctcattactcctttcatcgcccaggttatgcttgaaagttctgtttaccttaccttggcagtttattccggatgttgcctgctggcggctctggcctcctgcttcctgcccatcgagaccaagggcagggggctgcaagagagcagtcatagagagtgggggcaggagatggtcggtcgcggaatgcacggagctggggtgacccgcagcaacagcggatcacaggagtag

SEQ ID NO: 242933 - DNA, 39 bp, synthetic construct
  misc_feature 1..39: note = Description of Artificial Sequence: Synthetic coding sequence
  source 1..39: mol_type = other DNA
atggaggaggatctgtttcagcttagacagctcccctag

SEQ ID NO: 242934 - DNA, 1023 bp, synthetic construct
  misc_feature 1..1023: note = Description of Artificial Sequence: Synthetic coding sequence
  source 1..1023: mol_type = other DNA
atggctgccggtagactgataatcaagacagaatttttgccgactaagtatagagggtatatgttgccgctgagtcaggtcttctggctggccggttccttattgatcataggcctcgccagcgtgataattccaacaattggctggcggtggttaattcgcgtggcctccatcccgggaatcatcttgattgtggccttcaagtttattcccgaaagtgcacgcttcaacgtgtcgacaggtaacactcgggcagccttggccacactagagagggttgccaaaatgaacaggagcgtgatgcccgagggtaagctagtggagccagtgctggaaaagaggggacgctttgccgacctcctggacgcaaagtacttgagaacaactctgcagatctgggtcatatggctgggaatttcttttgcctattacggggtcatcttggcttccgccgagctgcttgaaagggatctggtatgtggcagtaagtcagacagcgctgtagtggtgactggaggggactccggagaatcgcagtcaccgtgctactgtcacatgtttgcccctagtgactacaggacaatgatcatctctaccatcggagagattgcgttgaacccgctgaatatattggggattaacttcctgggacgtcgactgtctctgagcattacaatgggatgtaccgcactgtttttcctccttcttaacatttgcacatcttcagccggactcatcgggttccttttcatgctgcgcgctttggtggcagctaatttcaacacagtttacatctacacagcggaggtctatccaactactatgcgcgcacttggcatggggacatctggatcgctttgtagaatcggcgcaatggtcgcccctttcatctctcaggtgctcatgtccgcatccatcctgggggctttgtgtctcttttcctcggtatgtgtggtgtgtgctatctccgcgttcactctgcctattgagactaaaggtcgcgctcttcagcagatcaagtag

SEQ ID NO: 242935 - DNA, 1479 bp, synthetic construct
  misc_feature 1..1479: note = Description of Artificial Sequence: Synthetic coding sequence
  source 1..1479: mol_type = other DNA
atggccaccaagcctactgaacctgtgacgatcctttcactcaggaagttaagcctcggcaccgcggagccccaggttaaggagccaaaaaccttcactgtcgaggacgcagtggaaaccataggctttggccgattccatatcgcattatttcttattatgggctccactggcgtggtggaggctatggagataatgttgatcgccgtcgtgtcgccagttatcagatgcgagtggcagctggagaactggcaggtagctttggtcacaactatggtgtttttcggttacatggtgttcagtattcttttcggcctacttgccgatcgctacggaaggtggaaaatcttgctgattagcttcctgtggggagcctacttttctctccttacatcctttgcaccaagttacatctggtttgtctttctgcgaaccatggtcggctgtggcgtgtccggccactctcaggggcttatcatcaagactgaatttctgcctaccaaatatcgcggatatatgctgccgttaagccaggtattttggctcgccggtagtctgttaataatcggtctggcatctgttatcatacctacaattggatggagatggctgatccgtgtcgccagcatccctggaataatcctgatcgtcgccttcaagttcattcctgagagcgcacggttcaatgtttccacagggaacactagggcagcgctggctacattagagagggtggcaaagatgaacagatcagtgatgcccgaggggaagctcgtggagcccgtcctcgagaagaggggacggtttgctgacctcctagacgcaaagtatctgcgaactacactgcaaatttgggtcatttggctcggcatttccttcgcctactacggggtgatcctagcctcagccgagctgcttgaaagggaccttgtgtgcgggagcaaatctgattctgctgttgtcgtcaccggcggtgatagtggcgaatcccaatcgccgtgttactgccatatgtttgcacctagcgactataggactatgatcattagtactattggtgagatcgcactgaatcccttgaacatcctgggaattaactttttgggccgacggctcagtctgagcatcaccatgggatgtaccgctctgttctttttgctgctaaatatctgcacgtccagcgcgggtctgattggattcctctttatgctgcgggctctggttgctgccaatttcaacactgtttacatttatacagccgaggtatatccgactacgatgcgcgctctgggcatgggtaccagtggttctctctgtaggattggggctatggttgctccctttatttcccaggtgcttatgagcgcctcgatcctgggggcactttgtctctttagttccgtgtgcgtggtctgcgccatcagcgcgtttaccctccccattgaaacaaagggcagggcccttcagcagattaagtag

SEQ ID NO: 242936 - DNA, 1023 bp, synthetic construct
  misc_feature 1..1023: note = Description of Artificial Sequence: Synthetic coding sequence
  source 1..1023: mol_type = other DNA
atggctgccggaagactcatcatcaaaaccgaatttctgcccaccaagtatcggggatacatgctgcccctaagccaagtcttctggttagccggaagcctgctgattattgggttggcaagtgtcataatccccacaatcggctggcgatggttgatcagagtggcctctataccgggaatcattctcattgtcgctttcaagtttatacccgaatctgccagattcaatgtgtctaccggaaatacacgcgctgctctcgctacgctggaacgtgttgcaaaaatgaacagatctgttatgcctgaggggaaacttgtggagcccgtgttggagaagaggggcaggttcgctgatctactggatgccaagtacctgagaaccacgttacagatttgggtgatctggctgggaatttcctttgcctactatggcgttatacttgcctcagccgagctacttgagcgggacctcgtgtgcgggtccaaaagtgactctgccgtggttgtgaccggaggtgactcaggtgaatctcagtccccatgttattgccacatgtttgctccctccgattatcgtactatgattatctctaccataggcgagatagctctgaaccctctaaatattctgggcatcaattttctcggaagacgactgagcctcagcataaccatgggctgtactgcgctgtttttccttctgttgaatatctgtaccagttccgccggtcttatagggttcttgttcatgttgagggcacttgtggccgcaaactttaataccgtatatatctatacagcagaagtttaccccaccacaatgcgcgctcttggcatggggacaagtggaagtctgtgtaggatcggcgctatggtagctccatttatttctcaggtcctgatgtctgcttcaattctgggcgctctgtgtttattttccagcgtatgcgtggtctgcgccatttcagcctttactctgccaatcgagacgaagggaagagcgttgcagcagatcaagtag

SEQ ID NO: 242937 - DNA, 1758 bp, synthetic construct
  misc_feature 1..1758: note = Description of Artificial Sequence: Synthetic coding sequence
  source 1..1758: mol_type = other DNA
atggggagtctcaaagaggagcttctgaaagccatttggcacgcgttcacagcgctagaccaggatcatagcggcaaggtatcaaagtcccaactgaaggtgctgagtcataacctgtgtaccgtcttaaaagtaccacacgaccctgttgccctagaagaacatttcagagacgatgacgagggcccagtgtctaatcagggctacatgccctatttgaatcgcttcatcctggaaaaagttcaagataacttcgacaagatcgaatttaatcgcatgtgttggacgctgtgcgtgaaaaagaatctcacaaaaaatccattacttattacagaggaggatgcatttaagatctgggtcatcttcaactttctttctgaggataaataccctctcatcatcgtctctgaagagattgagtaccttctaaagaaattgacggaggccatgggcggaggctggcagcaagaacagtttgagcactacaaaataaacttcgacgattcgaagaacgggctcagcgcgtgggagctgatagagctcatcgggaacggacaattcagtaagggcatggatcgccagaccgtatcgatggctatcaacgaggtgtttaacgaactcattctcgacgtcctgaagcagggctacatgatgaagaagggacaccgacgaaaaaattggactgagagatggttcgtactgaaacccaatattatatcctactatgtatctgaagacctcaaggataaaaaaggggatatcctcctggatgaaaattgttgtgttgagagcctccccgataaggatggcaagaagtgtctcttcctggtgaaatgttttgataagaccttcgagatatccgcgagtgataagaagaagaagcaagagtggatccaggccatacactccactatacaccttttaaaactgggctcaccaccaccacacaaggaagcacggcagcggcgtaaggagcttagaaaaaagcagctcgccgagcaggaggagctggagcggcagatgaaggagttacaagcagcgaacgaatccaaacagcaggagctggaagccgtaaggaagaaattagaagaagcggctagccgcgcagccgaggaagaaaagaaacggttacagacccaggtggaactgcaggcgagattcagcactgaactcgagcgggagaaactgatcaggcaacagatggaggaacaggtcgcccagaaatcatccgagctggagcagtaccttcagagggtgcgtgaattggaggacatgtacctaaagctgcaggaggcactggaggatgaacgccaagctcggcaggacgaggaaactgtgcgcaaattacaagccagactgctcgaggaggagagctccaagcgagcagagttagaaaaatggcatctcgaacagcagcaagcgatacaaactacagaagccgagaaacaagagctcgagaaccagcgagtgctcaaggagcaggccctacaagaggctatggagcagctggagcaattagagctggagcggaagcaagcgctggagcagtatgaagaagtaaagaagaaactcgaaatggctaccaacaagacaaagtcatggaaggacaaggttgcccatcacgaagggctgattcgcttgatcgaacccggttccaagaaccctcatctcattacaaattggggtcctgcagctttcaccgaggctgaactcgaggaaagggagaagaactggaaggagaagaaaaccacggagtag

SEQ ID NO: 242938 - DNA, 3129 bp, synthetic construct
  misc_feature 1..3129: note = Description of Artificial Sequence: Synthetic coding sequence
  source 1..3129: mol_type = other DNA
atggaacaagatactgccgcagtagccgcaactgtggctgccgctgacgccaccgcaaccatcgtggtcatagaagacgaacagccaggccctagtacttctcaggaggagggtgcagccgctgctgctactgaggccaccgcagctactgagaagggggaaaaaaagaaggagaaaaatgtgagtagctttcagcttaaacttgcagccaaggcacctaaatctgagaaggagatggatcccgagtacgaggaaaagatgaaggccgatagagcaaagcggtttgagtttctgttaaagcagactgaactctttgctcatttcattcagcctagcgcacaaaagagccctacatcccctctcaacatgaagctcggccgtcctcgaattaaaaaggacgaaaaacagagtttgatatccgccggtgattacaggcatagacggactgagcaagaggaagacgaggaacttctgtccgagtccagaaagacttctaacgtatgtatcaggtttgaagtcagtccatcctacgtcaagggaggtccactgcgggattaccaaattagaggactgaactggcttattagcctctatgagaacggggtgaacggtatcctggccgacgaaatggggctcggaaagacgcttcagaccattgctttgctcggctatctaaagcattataggaacatccccggaccacacatggttctcgtgccaaaaagtactttgcacaactggatgaacgagttcaaaaggtgggtccccagccttagagtgatttgctttgtgggagacaaggacgccagagctgcctttatcagggacgagatgatgcctggggaatgggacgtctgtgtcactagctacgaaatggtcattaaggaaaagagtgtgtttaagaagttccattggcgatatctggtgatagacgaggcccaccgaataaaaaacgaaaaatcaaaactctctgaaatagtgcgagagttcaagagtacaaaccgccttctgctgactggaacacctctccaaaataatctacacgagctctgggctctgctcaatttcctgcttcctgatgtattcaatagcgccgacgacttcgactcctggtttgacacaaagaattgtttgggggatcagaagctggtcgaaaggctgcacgccgtcctgaagccctttctgcttcggcgtataaaaactgacgtggagaaaagcctgccacctaaaaaggagatcaaaatatacctgggactgagcaaaatgcagcgagagtggtatacaaagattctgatgaaggacattgacgttctgaattcctccggtaaaatggataagatgcggttgctaaatatcttgatgcagcttcggaagtgctgcaatcacccatatctgtttgatggcgcagaacccggacccccttacactacagacgaacatattgtgagtaattcaggaaaaatggtggttctggacaaactgctggccaaactcaaggaacaaggctccagggttctgatattctctcaaatgaccagactgctcgacatccttgaggactattgcatgtggcgcggttatgagtattgtcgcctcgacggacagacacctcatgaggagagggaggaagcgattgaggcctttaatgctcctaactctagtaaatttatattcatgttgagtaccagggctggcggtcttggtataaacctcgcaagcgcagacgttgtgatcctgtatgactcagactggaatcctcaagttgatctgcaggccatggacagagctcacaggatcggccagaagaagcctgtcagggtctttaggttaatcaccgataacaccgtggaggagcgcatagtcgagagagcagagattaaattaaggctggattccattgttattcagcaagggcgactgatcgaccagcagtccaacaagcttgctaaagaggagatgctccagatgatcaggcacggcgctacacacgtgtttgcaagtaaagagagcgaattgaccgatgaagacattaccaccatcctcgagaggggtgaaaagaagactgcagaaatgaatgagcgtctgcagaagatgggagaatcaagcctgaggaactttaggatggatatcgagcagtcactgtataagttcgagggggaagattacagggaaaagcagaaattggggatggtcgagtggatcgagccgcctaagcgcgagcgcaaggctaactatgccgtggacgcctactttagggaggctctgagggtatccgaacctaagattccgaaggctccgaggccaccaaaacaacctaatgtgcaggatttccaattttttcctccgcgactcttcgaattacttgagaaggagattttgtactaccgtaagaccatcggttataaggtgcccaggaaccccgatatccctaacccagctctcgcgcagcgagaggaacagaaaaagatcgacggtgctgaacccctgacccccgaggagacggaggaaaaggagaaactgctgactcagggtttcacaaattggacaaaacgggatttcaaccaatttattaaggctaatgagaagtatggtagggatgatatcgataacatcgccagggaggtcgaagggaaaagccccgaggaggttatggagtatagcgctgttttttgggagaggtgcaacgagttgcaagacatcgagaaaatcatggcccagatcgagcgaggggaggctcgaatccagcgccgaatctctattaagaaagctctggacgcaaaaatagctagatacaaggcgccattccaccagctgcgcatacagtacggaacctccaaaggcaagaactacactgaggaggaagatcggttcttgatttgtatgcttcacaaaatgggctttgaccgagagaatgtgtacgaggaactccgccagtgcgtcaggaacgcccctcagtttcggttcgattggttcatcaaatcgagaacggcaatggagtttcagcggagatgtaacacattgatttctttgatcgagaaagagaacatggagatagaggaacgcgaaagggctgagaaaaaaaaacgggctaccaaaacaccaatggtgaagtttagcgctttttcatag

SEQ ID NO: 242939 - DNA, 3165 bp, synthetic construct
  misc_feature 1..3165: note = Description of Artificial Sequence: Synthetic coding sequence
  source 1..3165: mol_type = other DNA
atggagcaggacacagcggcagttgcagccactgtggcagctgccgatgcaacagcaaccatcgttgtgatcgaggatgaacagcccggaccctccactagccaggaggaaggcgcagccgctgctgcgacagaggctacagcagcgacggagaagggtgagaaaaaaaaggagaagaacgtctcatcctttcaattaaaactcgctgccaaggctcccaagagcgagaaggagatggaccccgaatacgaggaaaaaatgaaagccgaccgcgctaagcgatttgaattcctgttgaaacaaacagagctcttcgcccacttcattcagcccagtgctcaaaagtctcctaccagccccctgaacatgaagctcgggaggcccagaatcaagaaggacgagaagcagagcctcatcagcgcgggagactacaggcatcgacgcactgagcaagaggaagatgaggagctgctctcggagtcccgcaaaacctccaatgtgtgcataaggttcgaagtgagcccctcctacgtgaagggaggccctctcagagactaccagatcagaggcttaaattggctcatttctctgtacgaaaacggagtgaatgggattctcgccgacgaaatggggctcggcaagacgctccaaacgattgcactgttgggatacctgaagcactatcgcaacataccagggcctcatatggtgctcgtaccgaagtccactctgcacaattggatgaacgaatttaagcgatgggtgccctccctgcgagtgatctgcttcgtcggggacaaggatgctagggcagctttcattcgcgatgaaatgatgccaggtgaatgggatgtatgcgtcacttcctatgaaatggtcattaaagagaaatcggtctttaaaaaattccattggcgctatttggtgattgacgaggcccaccgtattaagaatgagaagagcaagctgagtgagatagtgcgggaattcaaaagcaccaacagattattgttaacaggaacacccttgcagaacaacctccatgagttatgggctttgctaaattttctcttgcctgacgtattcaattctgctgatgattttgacagctggttcgacacgaaaaactgcctgggagaccaaaagttggtcgagaggcttcacgctgtcctaaaacccttcctgctccggagaattaagaccgacgtggagaaatcattacctccaaaaaaggaaatcaaaatctacctcggactgagtaaaatgcaacgggagtggtacacaaaaatcttaatgaaagacatcgatgtcctgaattccagcggaaagatggacaaaatgaggctccttaacatactcatgcagctacgtaagtgctgtaatcacccctacctcttcgatggagccgagcccggtccgccatatactaccgatgagcatatcgtgtctaattctggcaagatggtagtactggacaagctcctggcgaagttgaaagaacaaggcagtcgagtgcttattttctcccagatgacccgattgctcgacatcctagaagattattgtatgtggcggggatacgaatactgtcgtctggacggccaaaccccccatgaggagcgcgaggataaatttttggaagtcgaatttctcggacagcgggaagccattgaggccttcaatgcccctaattcaagcaagtttatcttcatgctgagtactagggccggagggttggggattaatctggcaagcgccgatgtggtgattctctatgatagcgattggaaccctcaggttgatttacaggccatggaccgggctcatcggattggccagaaaaagcccgtccgcgtgtttagactgattaccgataacaccgtggaggaacgcattgttgagcgagctgagattaaactccgccttgactctatcgtgattcagcaggggaggcttattgaccaacagtcaaataaactcgcgaaggaagagatgttacagatgattcgacacggagctacacacgtctttgcatccaaggagtcagaacttaccgacgaggatatcactaccatattggagagaggggagaaaaaaaccgcagaaatgaatgaacggctgcagaagatgggtgaaagctccttgcgaaactttcgaatggacatcgagcagtccctgtataagttcgaaggtgaggactatagggagaagcagaaattggggatggtcgagtggatcgagcctcccaagagggagcggaaagccaattatgcggtggacgcctattttcgcgaagcactgcgcgtgtcagagccgaaaatacctaaggccccaaggcctcccaaacaacccaacgttcaggactttcagtttttcccccctcgcctttttgaactgcttgagaaggaaatcctctactaccgtaaaaccatcggttacaaggtccctaggaacccagatattcccaatcctgccctggctcagagggaggagcagaaaaaaattgacggagcggaaccactaacacccgaagaaaccgaggaaaaagaaaaacttctgactcaaggcttcactaattggaccaaacgggatttcaatcagttcataaaggcgaacgagaaatacggacgggacgatattgataatattgcccgagaggtcgagggtaaatcaccagaagaggtcatggaatattcagccgttttttgggagcgttgcaatgagctgcaggatattgagaaaattatggcccaaatcgagcggggagaggcgcgtattcagagacgaatttcgattaaaaaagctttggacgccaagattgccagatacaaggctcctttccaccagctgaggattcagtatggtacatctaagggcaagaattatactgaggaagaggatagattcctgatatgcatgctgcataagatgggattcgatcgggagaacgtgtatgaagagctgaggcaatgtgtgcgcaacgcccctcaatttaggtttgactggttcatcaagtccaggacagctatggaattccagaggcgctgcaacactttaatttcattaatcgagaaagagaacatggagatcgaagaacgggaacgcgcagaaaaaaaaaagcgcgcaaccaagactccaatggttaagttttctgctttttcttag

SEQ ID NO: 242940 - DNA, 3129 bp, synthetic construct
  misc_feature 1..3129: note = Description of Artificial Sequence: Synthetic coding sequence
  source 1..3129: mol_type = other DNA
atggagcaggataccgctgcagtagccgctactgtggctgccgctgatgctactgccactattgtggtaattgaggatgaacagccaggaccttctacatcccaggaggagggcgctgccgctgccgctaccgaagcgacagcggctaccgaaaagggagagaaaaaaaaagaaaagaacgtgagcagcttccaactaaaactggccgctaaagctcccaagtccgagaaggaaatggacccggagtacgaggaaaagatgaaggctgacagggcaaaacgatttgaatttctgctgaagcagaccgagctgtttgcccattttatccagccttcagcgcagaagtctcctacgtctccacttaatatgaaactcggcagacctaggataaagaaggatgaaaaacagtctttgatcagcgctggcgactataggcaccgtaggacagaacaggaggaagatgaggagctcttgagcgagtctcgtaagacctctaacgtttgcatccgcttcgaagttagcccctcttatgtgaagggaggaccactgcgcgattaccagatccggggtctaaattggctgatttccttatatgaaaatggggtgaacgggatcctggccgacgaaatgggtctgggtaaaactctccaaactatagctctgctcggctacctgaaacactaccgtaacatccccggaccacacatggtgctggtccccaagtccaccttacataattggatgaacgagtttaaaagatgggtcccatctctccgagtgatatgtttcgttggagataaagacgctcgagcagccttcatcagagacgagatgatgccaggtgaatgggacgtttgtgtgacttcatacgagatggtcatcaaagagaagtctgtatttaagaaatttcattggaggtatcttgtcatagacgaggctcaccgtatcaagaatgaaaagagtaagctgtccgaaatcgtgcgcgaatttaaatccactaaccgtttactgcttaccgggactcccttgcagaacaatctgcacgagctgtgggcactgcttaacttcttgctccccgatgtattcaatagtgctgacgattttgactcctggttcgacactaaaaactgcctgggagaccagaaactggtggaacggctgcacgcggtcctgaaaccgtttctgcttcgccgtatcaagactgacgtcgagaaatccctccccccaaaaaaggagattaagatctatcttggcttgtctaagatgcagcgcgagtggtatacaaaaatcctcatgaaagacattgacgttttgaacagctccggtaaaatggacaaaatgagacttctaaacattctcatgcagctccgtaagtgctgcaaccacccttatctcttcgacggggcagagcctggccctccctacacgacagacgaacacatcgtgtctaattctggaaaaatggtggtgctggacaagctcctggccaaactgaaggaacagggtagtcgcgtactcattttttcacagatgacgcggctcctggatatcctggaagattattgtatgtggagaggttacgagtattgtcgactcgatggccagaccccgcatgaggaaagagaggaagctatcgaggccttcaacgcccctaactcgtctaaatttatcttcatgctttcaacaagagccggaggtctcggcataaacctcgcctctgccgatgttgtgatcctgtatgattctgattggaatccccaggtggacctccaagcgatggatcgggcacacaggataggacagaaaaaaccggtacgcgtcttccggctcattacagataacacagtagaggaacggattgtggaacgagccgaaattaaactccgtttggattcaattgtcatacagcaaggtcggctgatagatcagcagagcaataaattggctaaggaagaaatgctccagatgattcggcatggggctacacacgtgtttgcttcaaaggagagtgagctaaccgacgaggatattaccactattctcgaaagaggagagaaaaaaacagccgagatgaacgagaggctgcaaaagatgggggaaagttcccttcgaaattttaggatggacattgaacagagtctatataaattcgaaggggaagattacagggaaaagcaaaagcttgggatggtggagtggatagaaccacctaagagagagagaaaagccaactacgctgttgacgcctacttccgagaggctcttcgcgtcagcgaacccaagattcctaaagcacctcgtccacctaagcagcccaatgtgcaggattttcaattctttccaccacggttgttcgagctgttggaaaaagagatcttgtactacaggaagacaatcgggtataaggtcccacggaatccagacattcccaatccagccctcgcccagcgagaggaacagaaaaaaattgatggagccgagcctctgaccccagaggaaactgaagaaaaggagaagctgctgacacagggctttaccaattggaccaagagagatttcaatcaatttataaaggccaacgagaagtatggcagggacgacattgataacatagccagagaagtggaaggtaaatcccctgaggaggtgatggagtattcagctgtattttgggagcggtgtaacgagcttcaggacatcgagaaaattatggcacagattgagagaggcgaggcgcgaatccagcggaggatttccattaaaaaggccctcgatgctaagattgcacggtacaaagctccattccaccaactgcgaattcagtacgggacctccaagggcaaaaattacacagaggaagaagatcggtttctgatatgtatgctgcataagatgggcttcgatcgtgagaatgtttacgaagaactacggcaatgcgtccgcaatgccccacagtttagattcgattggttcataaagtcccggactgccatggagtttcaacgcaggtgcaacacactgataagtttgatcgagaaggagaacatggaaatcgaggagcgagaacgcgctgagaagaagaagcgggcaactaagacacccatggtaaagttcagtgccttcagctag

SEQ ID NO: 242941 - DNA, 3018 bp, synthetic construct
  misc_feature 1..3018: note = Description of Artificial Sequence: Synthetic coding sequence
  source 1..3018: mol_type = other DNA
atggagcaggatacggcagccgtggccgcaacggttgcagctgcggacgctactgccaccattgtggtcattgaagacgagcaacccggtccctccacctcccaggaagagaagaacgtctcgtctttccagcttaagcttgcagccaaagctccgaagagcgagaaggagatggaccctgagtatgaagaaaagatgaaagccgaccgagcaaaaaggttcgaattcttactaaaacagacagagttgttcgcgcatttcatccagccatccgcgcagaaatctcccacaagcccactgaacatgaaactcggaaggccaagaatcaagaaagacgagaagcagtccttgatctccgccggtgattaccgccacaggcggacggagcaagaagaggatgaggaacttttgtctgaaagcagaaagacaagtaatgtgtgcataagatttgaggtttcaccttcctacgtcaagggtggacccctgcgcgattatcagatccgcggactgaattggttgatcagtctttatgagaatggggtaaacgggatcctggctgacgagatgggtctgggcaagactctgcagaccatagcactgctgggctatctcaaacactaccggaacatccctggaccccatatggtgctcgtccccaagagcacactgcataactggatgaatgaatttaaacggtgggtccccagtcttagggtcatctgcttcgtcggagataaggacgcgagggccgcttttattcgcgacgaaatgatgccgggtgaatgggacgtgtgcgtgacttcatatgagatggtgattaaggagaagagcgtatttaagaagtttcattggagatatctagtcattgatgaagctcaccgtatcaagaatgagaagtctaagttgtcagaaattgtgagggagtttaaaagcaccaatcggctattgctgactggcaccccactgcagaacaacctccacgagctgtgggcgctgctaaactttctgttgcctgatgtgttcaattctgccgacgatttcgattcatggttcgacaccaaaaactgtctgggcgaccagaagttagtggaaagattgcacgcagtgttgaagccgttccttcttaggcgtatcaaaactgatgtcgagaagagtcttcccccaaaaaaagagatcaagatctacctgggccttagcaaaatgcagcgtgagtggtataccaaaattctcatgaaggacatcgacgtactcaactcctcagggaagatggacaagatgcggctgttaaacatcctgatgcagctgcggaaatgttgcaaccatccatacctttttgatggcgctgaaccgggacccccatacacaaccgacgagcacattgtctccaactccggtaaaatggtggtgctcgataagcttctggctaaactgaaggagcaggggtcacgcgtcctcatctttagccaaatgaccaggctgctcgatatccttgaagactactgcatgtggagggggtacgagtattgccggctcgacgggcagacgccccatgaagaaagggaggataagttcttggaggtcgagttcctgggtcagcgggaggcaatagaggctttcaacgcccctaatagctcgaaatttattttcatgctctccaccagggccggaggactcggaatcaacctggcatcggctgacgtggtgatcctgtacgatagcgactggaacccgcaggtggatctgcaggccatggacagggcgcaccgcatagggcaaaagaagccggttcgagtgttccgcctgattacagacaacacagtcgaggagcgcatagtggagcgcgctgaaattaaattgcgtctggacagcatcgtaatccagcaggggagattgattgaccagcagtctaacaaacttgccaaagaagaaatgctccagatgatcaggcacggcgcaacacacgtctttgcgagcaaggagtcggagctgacagacgaggacatcacaacgatcctggagaggggtgaaaagaaaacagccgagatgaacgagcgactccaaaaaatgggtgaatctagtctaaggaactttagaatggacatagaacagagtttgtataaattcgaaggtgaagattaccgggagaaacagaaactgggcatggtggagtggatcgaaccgcctaagcgggagagaaaggcaaactacgccgtggatgcatactttcgggaagccttacgggtgtccgagccgaaaatccccaaagccccaagaccgcctaagcagcctaacgtgcaggacttccagttcttcccaccccgattgtttgagctcctcgagaaggagatcttgtattaccgaaagacaattggctacaaggttccgagaaatccggatatacctaacccagcgctcgcacagcgagaagaacagaagaaaattgatggggctgaacccctgacacctgaggagacagaggaaaaagaaaaattactgactcaaggcttcaccaactggacaaagagagactttaaccaatttattaaggcaaatgagaagtacggcagagatgacatagataacatcgcacgtgaggtcgaaggaaagtccccagaagaggttatggagtatagcgctgttttttgggaacggtgcaacgagttgcaagacatcgagaaaattatggcacagatagaacgtggggaagccagaatccagagacgcattagcatcaagaaagcgctcgacgcaaaaatcgcgaggtataaagctccgttccaccagctgcggatccagtacgggacttccaagggcaagaactacaccgaagaggaagatcgattcttgatttgtatgcttcataaaatgggctttgatagggagaacgtatacgaggagctgcgacaatgtgtcagaaacgccccacagttccgctttgactggtttatcaaatcacggaccgccatggagtttcagcgacggtgtaacactctgatttcactgatcgagaaggagtag

SEQ ID NO: 242942 - DNA, 837 bp, synthetic construct
  misc_feature 1..837: note = Description of Artificial Sequence: Synthetic coding sequence
  source 1..837: mol_type = other DNA
atgctgatgaaacggctcgccgcacgatgttttgcaggcctgctgatcctctcacccctcacagtcatcagcgattcaagacctgcggactcaggaaaagcgatagaagacggaaacttagaggagatggaggaggaggtccgtttgaagaaacggaagaggcgccgaaacgttgacaaggacccagcgaaagaagacgtggaaaaggctaaaaaacggagaggcagacctccagccgagaagttgagtccgaacccccctaagctgaccaaacagatgaacgctataatcgacacagtgatcaattacaaagactcaagcggacggcagttgagcgaggtgttcatacaactcccatctcgcaaagaattacccgagtattatgagctcattcgaaaacccgttgacttcaaaaagatcaaggagcggattcgaaatcacaaatatcgtagcctgggagaccttgaaaaggatgtcatgctgttgtgccacaatgcccagaccttcaatctcgaaggctcccaaatctacgaagatagtatcgtgttacagagcgttttcaagagcgcaaggcagaaaatagccaaggaggaggagagcgaggacgaatctaacgaagaagaagaggaagaagacgaggaagagtctgaatcggaggcaaaatccgtcaaagtgaagatcaagcttaacaaaaaggatgataaaggtcgcgacaaagggaaaggtaagaaaagacctaaccggggtaaagcaaaaccagtggtcagtgacttcgactccgacgaggaacaggacgaaagggaacagtctgaggggagcggaaccgatgacgaatag

SEQ ID NO: 242943 - DNA, 711 bp, synthetic construct
  misc_feature 1..711: note = Description of Artificial Sequence: Synthetic coding sequence
  source 1..711: mol_type = other DNA
atggaggaagaggtgcgacttaaaaagaggaaaaggcgaagaaacgtggataaggaccctgccaaggaggacgtggaaaaggctaaaaagagaagaggccgaccacctgctgagaagctgtcacccaaccctcctaaacttactaaacaaatgaacgcgattatcgatacggttatcaactataaggattcttccgggcgacaactctctgaggtttttattcagttgccgtccagaaaggaactgcccgaatattacgagttgatccgcaaaccagtcgattttaagaaaatcaaagaaaggatccggaatcacaagtatcgctccctgggagatttggagaaagatgtgatgctgttgtgtcacaacgcccagactttcaacctggaaggtagtcagatctacgaagactcaattgttttgcagtcagtgttcaaaagcgcaagacagaagattgccaaagaagaggaaagtgaagacgagagcaatgaagaggaggaagaggaagacgaggaggaaagcgaaagtgaggccaaatcagtcaaggttaaaattaaactgaacaagaaggatgataaaggcagggacaagggaaaagggaagaagcggcctaatcgaggtaaggccaagcccgtggtcagcgatttcgattcagatgaggagcaggacgagagggagcaatctgaaggcagcggaacggatgacgagtag

SEQ ID NO: 242944 - DNA, 4773 bp, synthetic construct
  misc_feature 1..4773: note = Description of Artificial Sequence: Synthetic coding sequence
  source 1..4773: mol_type = other DNA
atgagtacccctaccgacccaggagccatgccccaccccggaccttcccctggacccggtccttcgccaggtccgatcctcggcccttctcctgggccaggtccctctccaggctcagtgcactccatgatggggccatcacccggaccaccttccgtgtcccacccaatgcccacaatgggatcaacagatttcccacaggagggcatgcaccaaatgcacaagccgattgatggtatccacgacaaaggtattgtcgaagatattcattgtggttcaatgaagggtacagggatgagacctccacacccaggtatgggccctccccagtcccctatggatcagcactcccagggctacatgagccctcatccttcacccctgggggcacctgagcatgtcagttcccctatgtccggcggtgggcctacaccaccgcagatgcccccatcacaacccggagcgctgattcccggagatccccaggccatgagtcaaccaaaccgtgggccatcacctttttcccctgtgcagttgcaccagctacgcgcacagattctggcctataaaatgctagctagaggtcagcctctccccgaaacccttcagctcgcggtgcaaggaaagagaacccttcccggactacagcagcagcagcagcagcagcagcagcaacagcaacaacagcaacagcagcagcagcagcagcaacaaccccagcaacagcctcctcagccccaaacacagcaacagcagcagccagccctggtgaactacaaccggccatcaggccctgggcctgagctgagtgggccatctactccccagaagcttcctgtgccagctccaggtgggagacctagccccgcaccacccgctgccgctcagccaccggcagcagctgtacccggtccatcagtgccacagcctgcacctggccagccatccccagtgctgcagctgcagcagaagcagtccagaatctcaccaatccagaagccccagggtctggatccggtggaaatcttgcaggaacgcgagtataggcttcaagcccgtatcgctcacagaatacaggagctggagaatctccccggatctctcccgccagatctgcggactaaagctactgtcgagctgaaagccttgcggctgcttaactttcaacggcagcttagacaggaagtggtagcctgtatgaggcgagacaccaccctggagacagcactgaattccaaagcctacaagaggtcaaagaggcagacacttcgggaagctcgaatgaccgagaagcttgagaagcaacagaagatcgaacaagaacggaaacgacggcagaaacaccaagaatatttaaacagtatcttacaacacgccaaagatttcaaggaatatcatcggtccgttgcaggaaagatacaaaaactcagcaaggccgtggctacttggcacgcaaatactgagcgcgaacaaaaaaaagagactgaacggattgaaaaggagaggatgcggaggctgatggcagaagacgaagaaggttacagaaaactgatcgatcaaaagaaggaccgcagactggcgtacctactacagcagaccgatgagtacgtggctaacttgacaaacctcgtttgggaacataagcaagcgcaggctgccaaagaaaaaaagaagcgtcgccgtaggaaaaagaaagctgaggagaatgccgagggcggagaatcagccctggggcctgatggcgaacctatagacgagtcctctcaaatgtcagacctcccagttaaagtcacacataccgagactggcaaggtactgttcggaccagaggctccgaaggcctcacaactggatgcctggcttgaaatgaatccaggctacgaggtggctcccaggagtgattccgaggagtcagattccgattacgaggaggaggacgaggaggaggaaagtagcagacaggaaactgaagaaaagatcctgctggaccccaactccgaagaggttagtgagaaggatgctaagcagattattgagaccgctaagcaggatgtcgatgatgaatactcaatgcagtactctgccagaggaagtcagagctattacacagtggcccatgccatcagtgaacgggtggagaaacagtcagccctactgatcaacggcaccctgaaacactaccagttgcaaggcctcgagtggatggtgagcttgtacaacaataaccttaacggaatcctcgccgatgaaatgggcctcggcaaaaccattcaaaccatcgccctcattacctatctgatggaacacaaaaggttaaacggtccatatcttattatcgtaccactcagcactttgagcaattggacatacgaatttgataaatgggctcccagcgttgtgaagatcagttataagggcaccccagccatgaggaggtccttggtgccccaactcaggtccggcaaatttaacgtgctcctgacaacgtacgagtacattatcaaagacaagcatatcctggctaagatcaggtggaagtacatgattgttgacgaggggcacagaatgaagaatcatcactgcaagttaacccaggtgctaaatacccattatgtagcgccacgaaggatactcttgacaggtacacctctgcagaataagctgccagagctttgggcccttctcaactttctgctaccaaccattttcaagtcttgcagtacttttgaacagtggttcaacgctccatttgcaatgacaggagagcgggtggacctgaatgaagaggagacgatcctgatcattcgccgtcttcataaggtgctacggccttttctgctgcggagacttaaaaaggaggttgaaagccagctccctgagaaggtcgagtacgtgatcaagtgcgatatgagcgccttacagaaaatactttaccggcacatgcaggcaaaaggaattctgcttacagacggctccgagaaggataaaaaggggaagggcggtgcaaagactctcatgaatacaataatgcagctgaggaaaatctgtaatcatccttacatgtttcagcatatcgaggagtcctttgccgagcatctggggtatagcaatggggtgataaatggcgctgaactgtatagggctagcggaaagtttgaattattggacagaatacttccaaaactgagagctacaaaccacagggtcctgctgttttgtcagatgacatcactgatgacaattatggaagactatttcgctttcagaaactttctctacctgcgcttggacggcacgaccaagagcgaggacagagccgcacttctcaaaaagttcaatgaaccagggtcccagtacttcatattcttgttgagtacgagagcaggcggactcggtctgaatctgcaagcagccgacacagtcgtgatattcgattcagattggaacccccatcaagaccttcaggctcaagacagggcccaccgaattggacagcagaatgaagtgagggtccttcggttatgtacagtgaatagcgtggaagagaagattcttgccgctgcaaaatataaactcaacgtggaccagaaggtcattcaagcaggcatgtttgaccagaagtcctcctcacatgaacgcagggcctttttgcaggcaattctcgagcatgaggaagagaatgaggaggaggacgaagtgcctgatgatgaaaccctcaatcaaatgatagcaaggcgtgaggaggaattcgatttgttcatgcgcatggacatggaccgtcgccgagaggatgcgaggaatcccaagagaaagccacgcctaatggaggaagacgagctgccttcatggatcattaaggatgacgctgaagtggaacggctgacctgcgaggaggaggaagagaagatcttcgggagaggttctaggcagaggcgagacgttgactacagcgatgcacttacagagaaacagtggctgagggccattgaggatggtaatcttgaagagatggaggaagaggtgagattgaagaagagaaagagaaggagaaatgtcgataaggatcctgctaaggaagacgttgaaaaggccaagaagcggaggggcaggccacccgcagagaagctttcacctaacccgcctaaacttaccaaacaaatgaacgctattattgacacagttatcaactataaggataggtgcaatgtggagaaggtgcccagtaattcacagttagaaattgaagggaactcatccggacgacagctgagcgaggtgtttattcagcttcccagccgcaaagagctccctgagtactacgaactgatacggaagcctgtagatttcaaaaaaattaaggaacgtatcaggaatcacaaatacagaagcctgggggacctggagaaggatgtgatgctgttatgccacaacgcccagacattcaatctagaagggagccaaatctacgaggatagcatcgttttacagtcggtgttcaagtctgctcgccagaagatcgccaaggaggaagagtcggaagatgaatcgaatgaggaggaggaagaagaggacgaagaggaatcagaatccgaagctaagtcagttaaggttaagatcaaattgaacaagaaagacgacaagggtagagacaaaggaaaaggcaagaagcgacctaatcggggtaaggccaagcccgttgtaagcgattttgattctgatgaggagcaagatgagcgcgaacagtccgagggctctggcacagatgacgagtag

SEQ ID NO: 242945 - DNA, 4719 bp, synthetic construct
  misc_feature 1..4719: note = Description of Artificial Sequence: Synthetic coding sequence
  source 1..4719: mol_type = other DNA
atgtcaacaccaacggatcccggtgctatgccccatcccggaccatcccccggaccgggtccatccccagggccaatcctggggccaagccctggaccaggcccttccccgggttccgtgcactccatgatgggcccaagtcccggacccccaagtgtgagtcaccctatgccaacgatgggctctacggatttcccacaggaaggaatgcaccagatgcacaaaccaattgatgggattcatgacaagggtatcgtggaggacattcattgcgggtccatgaagggcacaggcatgcggccaccacaccctggtatgggaccgcctcagagccccatggatcaacactcccaggggtacatgtccccacaccccagcccactcggagctccagagcatgtgtcctctcccatgtcgggcggaggtccaacccccccacaaatgcctccatcccagccaggtgccctcatccccggagatccccaagccatgtcacagcccaataggggaccatctcctttctcccccgtccaactccatcagctgagggcacaaatcctcgcctacaaaatgctggcccgtgggcagccgctccctgagaccctgcagctggccgtccagggaaagcggactttacctggtctgcagcagcagcagcagcagcagcagcagcagcaacaacagcaacagcagcaacagcagcaacaacagcagcctcagcagcagccgcctcagcctcagacccagcagcagcagcagcctgctttggtcaattacaaccgcccatcaggtcccggacctgagttaagcgggccaagcactccacaaaagctgcctgtaccagcccctggcggacggccatctcccgctcccccagccgctgcacagccaccagcagccgcagtgcccggtcccagtgtgccacagccagccccaggccaaccaagccctgtgttacagttgcagcagaaacagtcccgtatctcaccaattcagaaaccccaaggactggaccctgtagaaattcttcaggaacgggaatatcggcttcaggcacgaatcgcgcatcggattcaggaactggaaaacctccctggcagtcttccaccagatctcagaacaaaagcgacagtcgaattaaaggcccttagactgcttaattttcagcgacaactgagacaggaagtggttgcatgcatgcgcagagacactacactcgagacagcactgaacagcaaggcctataaacgaagcaaacgccagacactaagggaagcgcgtatgacagagaaacttgagaagcaacagaaaattgagcaagagcggaaacgacgacagaagcaccaggagtatctcaactcaatactgcagcatgccaaagactttaaagaatatcatcgctctgtggctggcaaaattcagaagctctctaaggccgtagctacatggcacgctaatacggaacgtgagcagaaaaaggagacggaacgcatcgagaaagagcgtatgcggagattgatggctgaagatgaagagggctatagaaagctgatcgatcaaaagaaggaccgcagattagcctacctgttgcaacagacagatgagtacgttgcaaatctgacaaacttggtttgggaacacaaacaggcgcaggccgcaaaggagaagaagaaaagaaggaggagaaaaaagaaagctgaggagaatgctgaaggaggcgagagtgcactgggccctgacggtgagcccattgatgagtcatcccagatgtcggatctccccgtaaaagtgacccacacggaaaccggaaaggtgttatttggtcctgaggcacccaaggcttcacaattagatgcgtggttggaaatgaaccccggatacgaggtcgcccctaggtctgactcagaggagtccgactcagactatgaagaggaggacgaagaggaggaatcctccaggcaggagaccgaggagaagatcctcctagatccaaatagcgaggaggtctccgaaaaggacgcgaagcagattatcgaaacggctaagcaggatgtagacgatgaatactccatgcagtatagcgctcgcggtagtcagagctattacactgtagcacatgccatctccgagagagtcgaaaaacagtccgctctcctgatcaacggcacattaaagcactatcagcttcaggggcttgaatggatggtgagtctttataacaataaccttaacgggattttggccgatgagatgggactcgggaaaacaatacagacaatcgcactaatcacatacctcatggagcataagcgactcaatggcccttacttaattattgttcctctgagtactctctccaattggacctacgaattcgacaaatgggccccttctgtcgtgaagatctcttacaaaggtacaccggcaatgaggcgtagtctcgtgccacagctcagaagtggcaaatttaatgtgctgctgacaacgtacgagtatatcattaaagataaacacattctcgccaagattcggtggaagtacatgatcgttgacgaagggcaccggatgaagaatcaccactgcaaactgactcaggtgcttaacacacactacgtggcgcctcggcgtattctcctgactggcacccccttgcagaataagcttccagaactgtgggcactgcttaatttcctacttcccactatcttcaagagttgctctacattcgagcagtggttcaatgctccatttgctatgacgggtgagcgtgtcgatcttaatgaagaggagaccatccttattattaggagattgcacaaagtgctgcggccattcttactaagaaggctcaagaaagaggtggaatcacagctcccagaaaaggtggagtatgtcataaagtgtgatatgagtgccttgcaaaagatcctctataggcacatgcaggccaaggggattctgctgacggacggatctgagaaggacaaaaagggaaaaggcggagcaaagaccctgatgaacactatcatgcaactgaggaagatttgtaaccacccctatatgttccagcacattgaggagtcttttgcagagcatctgggatactctaacggagttataaacggtgccgaactgtacagggccagtggtaaatttgagctactggaccggattctccccaaattgcgagcaaccaatcaccgggttctcctattctgtcagatgactagcctgatgactatcatggaggactacttcgcattcaggaattttctctacctgcgcttagacggcaccacaaaaagtgaggatcgcgcagccctgctcaaaaaattcaacgagcccggaagccaatacttcatcttcctcctctctacccgggctggtggacttggtctgaacctgcaggccgctgatactgtggttatttttgattctgattggaacccccaccaagatcttcaggcccaagaccgggcacatcgcattggccagcagaacgaggtgagagtcttgcgactctgcactgtgaacagcgtcgaagagaagattcttgcagcggctaaatataagttgaacgtcgatcagaaggtaatccaggctgggatgttcgaccagaagagcagttcccatgagcgccgtgcattcttgcaggctatactcgaacatgaagaagagaacgaggaggaggatgaggtcccagacgacgagacacttaatcagatgattgcccgaagggaagaggaattcgacctctttatgcgcatggatatggaccggagaagagaggacgcaaggaaccccaagaggaaaccaagattgatggaggaggacgagttaccctcctggatcatcaaggacgacgctgaggttgagagactgacctgtgaggaggaggaggagaaaattttcgggagagggtcacgtcagcgacgtgacgtcgattacagcgatgctcttaccgagaaacagtggttgagagctatcgaggatggaaatctggaagagatggaagaggaggtgagactgaaaaaaaggaaacggaggcgcaacgtggacaaggatcccgctaaagaagatgtggaaaaagcaaagaagcgtaggggcagaccacccgcagagaagctgtcccccaacccccctaaactgaccaaacagatgaacgcaataatagacacagttatcaactacaaggattccagtggaaggcagctttctgaggtctttatacagttgccctcacgcaaagaactaccagaatattacgaacttatcaggaaacccgtagatttcaaaaaaatcaaagagagaatcagaaatcataaatataggtctcttggcgatcttgaaaaggatgtgatgctcctgtgtcataatgctcagaccttcaacctagaaggctctcagatctacgaggactctattgtacttcagagtgtctttaaatccgccaggcagaaaattgcaaaggaagaggagtccgaggacgaaagcaacgaagaagaagaggaggaggacgaggaagaaagcgaatctgaggcaaagagcgttaaggtgaaaattaaactgaacaaaaaggacgacaaaggccgtgataagggaaaagggaagaagaggccaaaccggggtaaagcgaagcctgtcgtttctgacttcgactcagatgaagaacaggacgaaagagaacagagcgagggtagcggcacggacgatgaatag

SEQ ID NO: 242946 - DNA, 360 bp, synthetic construct
  misc_feature 1..360: note = Description of Artificial Sequence: Synthetic coding sequence
  source 1..360: mol_type = other DNA
atgttactgtgccataatgcccaaacattcaatctggaaggctcacagatatacgaagattctattgtcctgcagagcgtgtttaaaagtgcaagacagaaaatcgctaaggaagaggaaagtgaggacgaatctaatgaagaggaggaagaggaagatgaagaagaatctgagtctgaggccaaatccgtaaaagtgaagattaaactcaacaaaaaggacgataaaggtcgagataaaggtaagggaaaaaaaagaccaaaccggggaaaggctaaacccgtcgtctccgactttgacagcgacgaggaacaggatgagagggagcagtcagaagggagcggcactgatgatgaatag

SEQ ID NO: 242947 - DNA, 711 bp, synthetic construct
  misc_feature 1..711: note = Description of Artificial Sequence: Synthetic coding sequence
  source 1..711: mol_type = other DNA
atggaagaggaagtgagactgaaaaagaggaagcgcaggcgcaacgtcgacaaggaccctgccaaggaagacgtggagaaggccaagaaaagacgtggcaggccccctgcagagaaactgagccccaatccgcctaaactaaccaagcaaatgaatgctatcatcgacaccgtgataaactataaggactcaagtggaaggcaactctccgaggtcttcattcaactgccctctaggaaggaactacctgaatattatgaactaattcgaaaacctgtcgattttaaaaagattaaagaacggatacgcaaccacaagtatcgtagtctgggcgacttagaaaaagacgttatgctgctgtgccacaacgctcaaacgttcaaccttgagggcagtcagatctacgaggacagtatagtgttgcagtccgttttcaagagcgctcggcagaagatcgctaaagaggaggagtccgaggatgaatcaaatgaagaggaagaggaagaagacgaggaagaaagcgaaagtgaggcgaagtcagtcaaagtcaagatcaagctgaacaagaaagatgacaaaggccgtgataagggcaaaggtaaaaaaagacccaaccggggtaaggcaaaacccgtggttagtgactttgactcagacgaagagcaggatgagagagagcagagcgaaggttccggtactgacgatgagtag

SEQ ID NO: 242948 - DNA, 711 bp, synthetic construct
  misc_feature 1..711: note = Description of Artificial Sequence: Synthetic coding sequence
  source 1..711: mol_type = other DNA
atggaggaggaggtccgcctcaagaagcgaaaaagacgcagaaatgtggataaggaccccgcaaaagaggatgtggaaaaggcaaaaaaaagacggggaaggccccctgcggagaaactgtcacctaatccacccaagctgacaaaacaaatgaatgccataattgataccgtcattaattacaaggattcatccgggcgtcagctcagcgaggtgttcattcaactcccctcacgtaaagagcttcctgaatattatgagctcatcagaaagccagtggacttcaagaagataaaagagcgcatcaggaaccataaataccgcagtctgggggacttggaaaaggacgtgatgctcctttgccacaatgcacaaacattcaacctggaaggctcgcagatttacgaggattcaatcgtgctgcaatccgtctttaagtcagcgaggcaaaaaatcgccaaagaagaggagagcgaagatgagtccaatgaggaagaagaagaagaggatgaggaggagtctgaatcagaggctaagtctgtaaaagtgaagatcaaactgaataagaaggacgacaagggaagagacaaaggaaaaggcaagaaaaggccaaataggggaaaagccaagcccgtggtgagtgactttgacagcgacgaggaacaagatgagcgagagcagtcagagggttcaggaaccgatgatgagtag

SEQ ID NO: 242949 - DNA, 765 bp, synthetic construct
  misc_feature 1..765: note = Description of Artificial Sequence: Synthetic coding sequence
  source 1..765: mol_type = other DNA
atggaggaggaggttcgactcaagaaaaggaagcgacgcaggaatgtcgacaaagaccccgcaaaggaggatgtggagaaggccaaaaagaggcggggacgcccacctgcagaaaagctttcgcctaaccctcctaagctgactaagcaaatgaatgccatcatcgacaccgtgatcaattataaagaccgctgcaatgtagagaaggtccccagtaacagtcaattggagatagagggaaactctagcgggagacagctttccgaagtctttattcaactgccatctagaaaggaactccccgagtactatgaattaatcaggaaaccagtggacttcaagaaaattaaagaacgtatcagaaaccacaagtatcggagtttaggcgacttggaaaaagatgtgatgttgctatgccacaatgcccagacgttcaatttagaaggttcccaaatctacgaagacagcatcgtcctccagagcgtgttcaaatccgctcgtcaaaagatcgccaaggaagaggagagcgaagacgagtctaacgaggaggaagaggaagaggacgaagaggagtccgagtcagaggctaagagcgtcaaagtgaagataaagttgaacaagaaagatgacaaagggagggataaaggaaaggggaaaaagcgcccaaatcggggtaaagccaagccagttgttagcgactttgattctgacgaagagcaggatgagcgcgagcaaagtgagggctctggcacagacgacgagtag

SEQ ID NO: 242950 - DNA, 4719 bp, synthetic construct
  misc_feature 1..4719: note = Description of Artificial Sequence: Synthetic coding sequence
  source 1..4719: mol_type = other DNA
atgtcaacacctacagatcctggagctatgccccatccgggaccaagtcccggacctggtccgtcccccggtccaatcctgggacctagccccggtcccggtccaagccccggaagtgtgcacagcatgatgggaccctctccaggccctccttccgtgtcacatcccatgcctactatgggatccactgactttccacaggaagggatgcatcagatgcataaacccatcgacggtattcacgataagggaatcgtggaggacatacactgcgggtccatgaagggaacagggatgcggcctcctcaccctggcatggggccacctcagtcaccaatggatcagcactctcagggctacatgtctccacacccctccccactcggtgcacccgagcacgtgtcatcaccaatgagtggcggaggaccgacgccgccacagatgccaccttctcagccaggcgctctgattccgggtgacccccaagctatgtcccagccaaacagaggtccaagtccattcagccctgtgcagctacaccaactgagggcgcaaattctagcctacaagatgctggcacgtgggcagccactccctgagaccctccaattggccgtgcaggggaagcggaccctcccaggcctgcagcagcaacagcagcagcagcagcaacaacagcagcaacagcagcagcagcagcagcagcaacagcagccccagcaacagccccctcagccccagacacagcaacagcaacaaccagcgctggtgaattacaaccgcccttcaggtccaggacccgagctgtcaggcccatccacccctcagaagctgcccgtcccagcacccggaggcagaccttctcctgccccacctgccgcagcacaacctcccgctgccgcagttcccggacccagcgtcccgcaacctgccccagggcaaccctcccctgttctacagcttcagcaaaaacagtcaaggatcagtcccattcaaaagccgcagggtttggatccagtagagatcctgcaagagcgggagtaccgcttacaggcacggattgctcatcggatacaggagctcgaaaatctgccgggtagcctgcctccagacctgcggactaaagccactgtcgagctgaaggcccttaggctgcttaacttccaacgccagctgaggcaggaggttgttgcctgcatgcggagggacacaacgttggagaccgccctcaactcaaaggcctacaagagatccaaacgccagacattgcgagaggcccgaatgacagaaaagctcgaaaagcaacagaaaatagaacaggagaggaaaaggcgccaaaagcaccaggagtacctgaattctatccttcagcatgctaaggattttaaggagtaccatcgtagcgtggctggcaagattcagaaactgtctaaagccgtggcaacatggcacgcaaacaccgagagagagcagaagaaggagactgagcggatcgagaaggagcgaatgcgaaggttaatggctgaggatgaggagggatatcggaagttaatcgaccagaaaaaggacaggcggctcgcctacctgctgcagcagacagatgagtatgtggctaacctgaccaacctcgtgtgggagcataagcaagcccaggctgccaaggaaaaaaaaaagagaaggagaagaaagaaaaaagctgaagagaatgcggagggcggtgaaagcgccttggggcctgacggcgaacctatcgatgagtcctcacaaatgagcgatttaccagtgaaggtaactcacactgagacaggtaaagtgctgttcggacccgaagcaccaaaagccagtcagttggacgcctggttggagatgaatcccggatacgaggttgctccgaggtcagacagcgaagagtccgatagtgattacgaggaggaggacgaggaggaggaatcctcgcgccaagagacagaagagaaaatactgctggaccctaacagtgaggaagtgagcgaaaaggacgctaaacaaatcatcgaaaccgccaagcaggacgtcgatgacgaatacagcatgcaatattccgcccgaggttcccagtcatactataccgtagcccatgccatttcagagcgtgtcgagaaacaatcagctctgctcatcaatggcaccctcaaacactatcagctgcagggtttggaatggatggtgtctctttacaacaacaatctgaacggaatcctagccgatgagatgggactggggaagacgatccaaacaatcgccctgatcacatatctgatggaacacaagagactgaatggaccttatctaattattgtgcctctaagcacactcagcaactggacttacgaatttgacaaatgggcgccatcagttgttaaaatttcttataagggaacccccgctatgcgaagaagcctggtgccacagctgagatctggcaagttcaatgtacttttgacaacatatgagtacatcatcaaggacaagcatattcttgcgaaaatcagatggaagtatatgattgtagatgaagggcatagaatgaagaaccaccactgtaaattaacacaggtactgaacacacactacgtggccccaaggaggatcctgttgaccgggacgcctctgcagaacaaactgccagagttatgggctctcctgaacttcctgctccctacaattttcaagtcctgtagtacatttgagcagtggttcaacgcgccattcgcgatgaccggcgaacgagtcgaccttaacgaagaagagaccatcctgatcatccgcaggctacataaggtgctgcgtccttttctcctgcggcgactaaagaaagaggtcgagtcacaactgcccgagaaagtcgagtacgtaattaagtgcgatatgagcgcactgcagaagatcttatacaggcacatgcaggctaagggaatcctcctgacagacggcagcgaaaaggacaagaaaggcaaagggggagctaaaaccttgatgaatacgatcatgcaactgagaaaaatctgtaatcatccatatatgttccagcatatcgaagaatcctttgccgaacacctcggctactctaacggggtaattaacggtgctgagctgtatagggctagtggaaaattcgagcttctcgacagaattttaccaaagttgagagcaacgaatcacagagtgctgttattctgtcaaatgacatcacttatgactataatggaagattatttcgcctttcggaattttctgtacctccgtctcgacggaactacaaagtcagaggatagagcggcattgttgaagaagtttaatgagccagggagccaatactttatatttctcctttccaccagggccggtggacttgggttgaatctgcaggctgcagacacggtggtcatatttgattctgattggaatccccatcaggatctgcaggcccaggatcgtgcccatcggattgggcagcagaacgaagtgcgggtgctgcgattatgtaccgtgaattccgtggaggaaaagatcctcgccgctgctaaatataagttgaatgtggaccagaaagtgatacaagccggtatgttcgaccagaagtccagtagtcacgaaaggagggcctttttgcaggctatactggagcacgaagaagaaaatgaagaagaagatgaggtgcctgacgacgagacgcttaatcagatgattgcgagaagggaggaggagtttgatttgtttatgcggatggatatggatcggaggcgagaggacgctcggaatcctaaaagaaaacctcgcctcatggaagaggacgagctgccttcctggatcataaaagatgacgccgaggtggagaggttaacttgtgaggaggaggaggagaagattttcggaaggggatcgcggcaaagacgcgatgtggattatagcgatgctttaactgagaaacaatggttgcgggcaattgaagacggcaatctcgaagaaatggaagaggaagtgagactgaagaagcggaagcgtaggagaaacgtggacaaagaccccgctaaggaagacgtggagaaagccaagaagcggaggggacgccctccggctgagaagctgtcccccaatcctccgaagctgaccaagcagatgaatgctatcattgacacagtcattaactataaagactccagcggccgacaactttctgaagtttttattcagctgccgtcccgaaaggaactccctgaatactacgagttaattcggaaaccagtggactttaaaaaaataaaagaaagaatacggaatcacaaatatagaagtctaggagacctggagaaagacgtcatgcttctgtgtcataatgctcagacattcaacctcgaagggtctcaaatatacgaagactccattgtgctccagtctgtcttcaagagtgctcgccagaaaatcgcgaaggaagaggagagcgaggacgaaagtaacgaagaagaggaggaagaggacgaggaggaatctgagtctgaggctaagagcgtaaaagttaaaattaaactgaacaagaaagacgacaaggggagggataaggggaagggcaaaaaacgacctaatcgcggtaaggcaaaacccgtggtatccgattttgactcagacgaagaacaggacgaacgggagcagtccgagggctccgggacagacgatgagtag

SEQ ID NO: 242951 - DNA, 4773 bp, synthetic construct
  misc_feature 1..4773: note = Description of Artificial Sequence: Synthetic coding sequence
  source 1..4773: mol_type = other DNA
atgtccacaccaacagatcctggcgcaatgccccaccctggtccgtcccctggtcctggacccagccctgggcctatcttgggtccatcccctggcccaggaccttctcccggttcagttcatagtatgatgggacctagcccagggcctcccagcgtgtcacatccgatgccaacaatgggctcaaccgattttcctcaggagggaatgcaccagatgcataagcccatcgacgggatccatgataaaggcatcgtggaggatattcactgtggatcaatgaaaggaactggtatgcggcctccacaccctggcatgggcccaccgcagtctccaatggatcaacacagtcagggatacatgtcccctcacccgtcccccctgggcgctccagaacatgtcagctcacctatgtcaggaggaggtcctacccctccacagatgcctccttcgcagcctggcgctcttattccaggcgatcctcaggccatgtctcagccaaatcggggaccttcccctttttctcccgtccagttgcaccaactcagggctcagattcttgcatacaaaatgctagccaggggacaacccttgcccgagacgttgcagttggccgtgcaaggtaagcggacacttcccggtcttcaacaacaacagcagcagcagcagcagcagcagcagcaacaacagcaacaacagcagcaacagcagcagccccagcaacagccgccacagcctcagacccaacagcagcagcaacctgcactggtgaactacaacagaccatccggtccaggacctgagctgtcggggccttctacccctcagaagctaccagtgccagctcccggtggccgtccgtcacccgcacccccagcggcagcacagccgccagctgctgccgtcccaggcccatctgtcccccagccggcacccggacagccctccccggtactccagctgcaacagaagcagagtagaattagtcccatccagaagccacagggactggatcccgtagagatcttgcaagaaagagaatacaggctgcaggccagaatagcgcatcgcatacaggaactcgagaatctgccgggatctctgccaccggacctacgcaccaaagctactgtcgagctgaaggccctgaggctcttgaactttcaaagacagttgcgtcaggaggtagtggcctgcatgagacgcgatactacgctggaaaccgcgcttaactctaaagcctacaagaggtcaaaacggcagacgttgagggaagcccgaatgaccgagaagctggaaaagcagcagaagattgagcaggagcgtaagcggaggcaaaagcatcaggagtacttaaatagtatcttgcagcatgccaaggactttaaggaatatcaccgtagcgtggcaggtaaaatccagaaactgtccaaggccgtcgcgacatggcatgcgaatacagaacgggagcagaaaaaagaaacggaacgcattgaaaaggagcgcatgcgcagactgatggccgaagatgaggaggggtatcggaagctgatagaccaaaaaaaggaccggagactggcatatcttctgcagcaaaccgacgagtacgtagctaacctgactaatctcgtctgggaacacaaacaagcccaagcggctaaggagaagaaaaaacgcagacgtagaaaaaagaaagctgaggagaatgccgagggtggcgaatctgctctcggccctgacggcgaaccgatcgatgaatcaagtcagatgtcagatctgcccgtgaaagtgactcacacagagaccggaaaagtcctctttggacctgaagccccaaaagcaagccaacttgacgcatggctggaaatgaacccaggttacgaggtggcgcctcggagtgacagcgaagaatcagatagtgactacgaagaagaagatgaggaagaagaaagctcaagacaagagacagaagagaaaatactgctcgaccctaattccgaagaagtgagcgaaaaagacgccaagcagatcattgaaaccgccaagcaggatgtggatgatgagtactctatgcaatatagtgctcgaggaagtcagagctactacacagtagcccatgcgattagcgagagagtcgaaaaacagtcagcactgctcataaatggcacgcttaagcattatcagctgcagggtctggagtggatggttagtctgtacaacaacaatcttaatggtatcctagccgacgaaatggggttagggaagaccattcagactattgccctgattacctatctgatggagcataaaagattaaatggcccttacctcatcattgtgcccctgtccactctcagcaactggacatacgagttcgataaatgggctccctccgtggtcaagatcagttataaaggtaccccagcaatgagaaggagtttagtgccgcagctcagatcagggaaatttaatgtccttttaactacctacgagtacattatcaaagataagcacatactggcaaaaatacgctggaaatacatgattgtggatgaaggccacagaatgaagaatcaccattgtaaactcactcaagtgctcaacacccactacgttgcccctaggagaattttgttgactggcacgccactgcagaataaacttcccgagctgtgggcactactgaactttctcctgcccacaatcttcaagtcttgtagtaccttcgagcaatggtttaacgccccttttgctatgaccggagagagggtggacctgaacgaggaggaaactatactgataatccgcaggctgcacaaagtccttcgaccttttctcttaagacgtctcaagaaagaagttgagtcacagctcccagaaaaagtggaatacgtcattaagtgtgacatgtccgcactccagaagatcctgtaccgccatatgcaggcgaaggggattcttttgacagacggttccgagaaggataagaaggggaagggtggcgcaaaaacccttatgaacactatcatgcaactacgcaagatctgtaatcacccttacatgttccagcacatcgaggaatcttttgccgaacatctcggctacagtaatggcgtcatcaacggcgctgagctctaccgggcatctggaaagttcgagctgctggatcgaattttgccaaagctgagggcgacaaatcaccgggtgctcctgttctgccagatgaccagtctgatgaccattatggaggattatttcgcctttcgcaatttcctgtacttgcgcctcgacgggaccactaaatctgaagacagggctgctttactgaagaagtttaacgaacctggctcccaatacttcattttcctgctcagcacccgggctgggggactgggtttgaacctgcaggctgccgacactgtggtgatatttgatagcgattggaatcctcaccaggacctgcaggcacaggacagagcacaccggatcggtcaacagaatgaagtgcgggttctccgcctgtgtacagtaaattcagtagaagagaagattctcgcagctgccaaatacaaattgaacgtggaccagaaggtgatccaagccggaatgtttgaccagaagtcttcatcgcacgagcggagggcattcctgcaagctatactcgaacatgaggaggaaaatgaggaggaggatgaggtaccggacgatgaaactttaaatcaaatgattgcccgacgggaggaggagttcgatctcttcatgagaatggatatggacagaagaagagaagatgccagaaatcctaagcgtaaaccccgtctcatggaggaggatgagctcccgagctggatcattaaagatgatgccgaggtagagagactgacttgcgaagaggaagaggagaaaattttcggtcgtggcagtaggcaacgcagggatgtggactattctgacgcacttaccgagaagcagtggcttagggctatcgaggacggcaacttggaggaaatggaagaggaagtccgcctcaaaaagcggaagcgaagaaggaatgtggacaaggaccccgcaaaggaggacgtcgagaaagctaagaaaagacgtggcaggccccctgcagagaagcttagccctaatcctcccaaactaaccaaacagatgaatgcgatcattgacacggtaatcaattacaaggacaggtgcaacgtggagaaagtgccaagtaacagccaactggagattgaaggaaatagcagtggccgtcagttgagtgaggtgtttatccagctgccttctcgcaaggagctgcccgagtactacgagttaatccgaaagcccgtggatttcaagaagatcaaagaaagaatccggaaccataaataccggtccctgggtgacttggagaaggacgtgatgcttctttgccataatgcgcagacatttaacttagaggggagccagatttatgaggatagtatcgtccttcagagcgtttttaaaagtgccagacagaagatcgcaaaggaagaggaaagcgaggacgaatccaacgaggaggaggaagaggaagatgaagaagagtctgagtctgaagcaaagtctgtgaaggttaaaatcaagctcaataagaaagacgataaggggcgagacaaaggaaagggaaagaaaagacctaaccggggtaaggccaagcccgtagtttctgattttgattctgatgaggaacaggatgaacgggagcagtcagaagggagcgggaccgacgacgagtag

SEQ ID NO: 242952 - DNA, 534 bp, synthetic construct
  misc_feature 1..534: note = Description of Artificial Sequence: Synthetic coding sequence
  source 1..534: mol_type = other DNA
atggaggaagaggtacgcctcaagaagcgaaaaagacgcaggaacgtcgacaaggacccagccaaggaggacgtagaaaaagccaagaagcgccgaggcaggcctcctgcagaaaagctgagtccgaatccaccgaaactcactaaacagatgaatgctattatcgataccgtgatcaactacaaggatagctccgggaggcagctgagcgaagtttttattcagctgccttcccgtaaagaacttcccgagtattacgagttgatcaggaagcccgtggatttcaaaaagatcaaagagaggatcagaaatcacaagtatcgcagtcttggcgatctcgagaaagacgtgatgttattgtgccataatgctcaaactttcaacctagaggggagtcagatttacgaagatagcattgttctccagtccgtcttcaagagcgcacgacagaaaatagccaaggaggaagagtctgaagatgagagtaatgaggaagaggaggaggaggatgaggaggagagtgaatctgagtag

SEQ ID NO: 242953 - DNA, 816 bp, synthetic construct
  misc_feature 1..816: note = Description of Artificial Sequence: Synthetic coding sequence
  source 1..816: mol_type = other DNA
atgaagcggttggcagcccgttgctttgctggcctgctaattctgagcccattgactgtgatttctgactctcggcctgcagactcaggcaaggccatcgaggacgggaaccttgaagagatggaggaagaggtgcgtctcaagaagaggaagaggcgtcgtaatgtggacaaggacccagcaaaggaggatgtcgaaaaagctaagaaacgccgtggacgaccccctgccgagaagctcagtcctaaccccccaaaacttactaagcagatgaatgcgataatagacactgtgattaattataaagattcgtccggacgccagttatctgaggtgttcattcaacttcccagcaggaaggaactccccgagtattatgaacttattaggaagcctgttgattttaaaaagatcaaggagcggataagaaatcataaataccgaagtctgggagaccttgaaaaggatgttatgttgctgtgtcacaatgcacagaccttcaacctggaaggatcccaaatctacgaggattcaattgttctgcagtccgtatttaagagcgcgcgtcaaaagatcgcgaaggaggaggagtccgaggacgaatccaatgaagaggaagaggaggaagacgaagaggaatctgagtctgaggccaagagcgttaaggtgaaaatcaagctcaacaaaaaggatgacaagggtagggacaagggcaagggcaaaaagcgtccaaatcgcggaaaagcaaagcccgtcgttagcgacttcgattctgacgaagaacaggacgaacgcgtgagcgtggctgactggtag

SEQ ID NO: 242954 - DNA, 462 bp, synthetic construct
  misc_feature 1..462: note = Description of Artificial Sequence: Synthetic coding sequence
  source 1..462: mol_type = other DNA
atgaagaggctggccgcaagatgctttgccggtctgctaatcctcagtcccctgacagtgatcagcgatagccgcccagcagactcagggaaggccattgaggatggcaatttggaagagatggaggaggaagtccggttgaaaaagaggaaaagacggcgtaatgttgacaaggatcctgcgaaggaagacgtggagaaggcaaagaagcggaggggcaggcctcctgcagagaagctctccccaaatccgcctaagctcacaaagcagatgaatgctatcatcgacaccgtgataaactataaggactcttccggtcgccagctgtctgaggtcttcatccagctaccgtctcggaaagagctgcccgaatattatgagctcatccgtaagcccgtcgattttaagaaaataaaggagaggatcagaaatcacaaataccgcagcttgggagacttgtag

SEQ ID NO: 242955 - DNA, 468 bp, synthetic construct
  misc_feature 1..468: note = Description of Artificial Sequence: Synthetic coding sequence
  source 1..468: mol_type = other DNA
atgtccacccccacagaccctggagccatgccccatcctgggccttctcctggtccaggcccatcccccggtcccatcctgggccctagcccaggacccggaccctcgccaggcagcgttcacagcatgatggggccatcacctggacccccttcagtcagtcatcccatgcctaccatgggtagcaccgacttcccccaggagggtatgcatcagatgcacaagccgatcgatgggattcacgacaagggtatcgtagaggacattcattgcggtagcatgaagggcaccggcatgagaccccctcacccaggtatgggcccacctcagtcccctatggaccagcacagtcaggggtacatgagccctcacccgtccccgctgggagcgcctgaacatgtcagctcacccatgtcgggcggagggcctacacctccccaaatgcccccatcccaaccgggagcatag

SEQ ID NO: 242956 - DNA, 1680 bp, synthetic construct
  misc_feature 1..1680: note = Description of Artificial Sequence: Synthetic coding sequence
  source 1..1680: mol_type = other DNA
atgagcacaccaacggacccaggggctatgccacacccgggaccaagccctgggcctggtccctccccagggccaatcttaggtccctctccaggccctggcccttctcctggctccgtacactcaatgatggggccttctcctggtccgcctagcgtctcacaccccatgcccactatgggcagtacagactttccacaggaggggatgcaccagatgcacaagccaattgatggcatccatgataaaggtatcgtggaggacatccattgcggaagcatgaaaggcaccggcatgaggccgcctcacccagggatgggcccaccacagagcccaatggaccagcatagtcagggctacatgtcaccacatccaagcccactgggggcaccggaacacgtttcctcgccgatgagtgggggtgggcctacccctccgcagatgccccctagccagccaggagcgctcatcccgggtgaccctcaagccatgtctcaacccaatagaggcccatctcccttttcccccgtacaactgcaccagttgagggcacagatattagcctacaaaatgctggccaggggccagccgctgcccgaaaccttgcaactagcagtgcaagggaagagaactcttcctggactacagcagcaacagcagcagcagcaacaacagcaacagcagcagcagcagcagcagcaacagcaacagcaaccacagcagcagccccctcagcctcagacccaacaacagcagcagcctgccctagtcaattataaccggccttctggtcctggcccagaactgagcggtccttctaccccacagaagttgcccgtgcccgctcctggcggaaggccatctcccgctccgcctgctgcagcacagccacctgcagccgctgtccctgggcctagcgttccccagccagctcctggacagccaagccccgttctgcagctgcaacagaagcagtcaaggatcagtcctatccagaagccccagggtctcgaccccgtcgaaatattgcaggagcgggaataccggttacaggcgcgtatagcacatcgcattcaggagcttgaaaatctccctggcagcttgcctcccgacctgaggactaaagcgactgtggagctcaaggcgctgcgcctacttaacttccagcggcagcttagacaggaagtggttgcgtgcatgcgacgagacactaccctggagaccgccctcaattcaaaggcatataagcgttctaaacgccagactctgagagaggccagaatgacagaaaaactggagaaacaacaaaaaatagagcaagagcggaagaggagacaaaaacatcaggagtacctgaattccattctgcagcatgctaaagacttcaaggaataccatcggagcgttgccggtaagattcaaaagctgtcaaaggccgtcgcaacctggcacgccaataccgagcgggaacagaagaaggagacagagcgtattgagaaagagcgaatgagacggctaatggcggaggacgaagaaggatacagaaagctcattgaccagaagaaggatcgccgtttagcatacctactacagcagacagacgagtacgtggcaaatctgaccaacctggtatgggaacacaagcaggcccaggctgccaaggaaaagaaaaaacgctag

SEQ ID NO: 242957 - DNA, 516 bp, synthetic construct
  misc_feature 1..516: note = Description of Artificial Sequence: Synthetic coding sequence
  source 1..516: mol_type = other DNA
atggaggaagaggtcagattaaagaaaagaaaacgccgaaggaacgtcgacaaggatcccgctaaagaagatgtggagaaagctaaaaagcgccgaggtagacccccagccgagaaactgtcgcccaaccccccaaagcttactaaacagatgaatgctatcattgatactgtgatcaactacaaggacagatgtaacgtcgaaaaggtgcctagtaattcccaactcgagattgagggtaacagcagtggaaggcagctttccgaggtatttattcagttgccatctaggaaagagctccccgaatactacgaactgatccgaaagcccgtggatttcaagaaaatcaaagagagaataagaaaccataagtatcgcagcctgggggatcttgaaaaagacgtcatgctgctgtgtcataacgcacagactttcaacctcgaggggagccagatctacgaggacagcatcgtactgcagtcggtgttcaaatctgctcggcaaaaaattgcctag

SEQ ID NO: 242958 - DNA, 201 bp, synthetic construct
  misc_feature 1..201: note = Description of Artificial Sequence: Synthetic coding sequence
  source 1..201: mol_type = other DNA
atgtcaacccccacagaccctggtgccatgcctcacccaggtccaagccctggcccagggccaagtccgggtcccatcctgggtccatccccagggcctgggccatctcccggtagcgttcatagtatgatgggaccctctcccggtcctccatccgtttcgcacccaatgccgacaatggggtccaccgatttcccctag

SEQ ID NO: 242959 - DNA, 4944 bp, synthetic construct
  misc_feature 1..4944: note = Description of Artificial Sequence: Synthetic coding sequence
  source 1..4944: mol_type = other DNA
atgtccacacctgatcctccactaggaggtaccccaagaccagggccatcaccaggccctgggcctagcccaggcgctatgctcggaccgtcgcccggaccttccccaggttccgcccatagcatgatggggccatcaccagggccacccagcgcaggacacccaatccctacccaggggcctggaggttatccccaagataatatgcatcagatgcacaaacccatggaaagcatgcatgaaaaaggcatgtccgatgaccccaggtataatcaaatgaaaggtatgggcatgaggagcggaggacacgccggaatgggtcccccaccctccccgatggaccagcactctcaggggtacccatcacccctgggcggaagtgaacatgcttcaagtcccgtgccggcatccggcccaagttcggggccacaaatgagctcaggacctggaggcgcacccctggacggagctgatccccaggcgttgggtcagcaaaacagagggccaacccctttcaatcagaatcagttacatcagcttagggcccagatcatggcttataagatgctggctagaggccagcccctgcccgatcacttgcagatggctgttcagggaaagcggcctatgcctggtatgcaacagcagatgcctactctgcctccgcctagtgtcagcgccacaggtccgggaccgggacccggtcctgggcctgggcctggccctggcccagccccaccaaattattcacgcccacatgggatgggaggccctaacatgccgccacccggtccatccggagtgcccccagggatgcccggacaaccaccgggagggccacctaaaccctggccagaaggtcctatggctaacgcggcagctcccacttctactccacagaagctcattcctccccagccaacaggcaggccatcgcctgcgccaccagccgtcccacctgctgcttctcccgtcatgccaccgcagacccaatccccaggacaacctgcacagcctgctcctatggtcccacttcatcagaagcagtcaaggattacacccattcagaaacctcgcggactcgaccctgtagagattctgcaagaacgggagtatagactccaggcacgaatcgcacacaggattcaggagctcgaaaacctcccaggttcactggccggagacttgcggactaaagccactatagagctgaaggccctgcggcttttaaatttccagagacaattgagacaagaggttgtcgtgtgcatgcggcgtgacacggcattggaaactgcactgaatgctaaggcgtacaaaaggagtaaacgtcagtcccttcgcgaagctaggatcactgaaaaactagagaagcagcagaaaatcgaacaggagcgtaagcgaaggcaaaaacaccaggagtacctcaactctatattgcagcacgccaaagattttaaggaataccatcgcagtgtaaccggtaaaatacaaaaattgaccaaggcagtggctacttaccacgctaacactgaaagggagcagaaaaaggaaaatgaaagaattgaaaaggaaaggatgcgacggctgatggcagaggatgaagagggatatcggaaattaatcgatcagaagaaggacaagcgtctcgcttatctcttacagcagaccgatgaatatgtggccaatctgactgagctggtccgacaacacaaggcagctcaagttgccaaagaaaagaaaaagaaaaaaaaaaagaaaaaggcagagaacgctgagggccagacacccgctatcggaccagatggggaaccgctcgacgagactagccagatgagtgatcttcccgtaaaggtcattcatgtggaaagtggcaagattctcaccggtacagatgcaccaaaggcagggcaactggaggcgtggttggagatgaatcccggttatgaggtggccccacgatctgacagtgaagaatccgggtctgaggaagaagaggaggaggaagaagaagaacaaccccaggccgcacagcctcctaccttgcctgtggaggagaagaaaaagatacccgaccctgatagcgatgacgtgtcggaagtggacgccaggcacattatcgaaaacgccaagcaagatgtggatgatgagtacggagtctcgcaggcattggcaaggggtttgcagtcatactacgccgtggcccacgccgtgactgagcgggtggataagcaatccgccctgatggtaaatggcgtactgaaacagtaccagataaaaggactggaatggctcgtttccctatataacaacaatctcaatgggattctcgctgacgagatgggcctggggaagactatccagacaattgcacttataacctatctaatggagcacaaacggattaacggccctttcctaatcatcgtgccactgtcgacactgagcaattgggcctacgagtttgacaaatgggcgccttctgtggtgaaggtgtcttataagggcagtcctgcagcccgaagggcattcgtccctcagttgcggtccggcaaattcaacgtcttactgaccacctacgaatacattatcaaggataagcatattctcgccaaaattaggtggaagtacatgatcgtggacgaggggcacagaatgaaaaatcaccattgcaaactgacacaggtgcttaacacccactacgtcgcgcctagacggctgctactgacaggcacacctttacagaacaaactgccagaactatgggctttgctcaacttcttactgcctaccatctttaaatcatgcagcactttcgaacagtggttcaatgccccattcgccatgacaggggagaaggtggacctaaatgaggaagagactatcctgataattcgccgactccataaggtgcttcggccttttctgttgcgacgcctcaaaaaggaggttgaggcccagctgcctgagaaggtggaatatgtgattaaatgcgatatgtctgcactccagcgcgtcttgtacaggcatatgcaggccaagggcgtactacttaccgacggttctgaaaaggacaagaagggaaagggcggaacaaagaccctaatgaacaccatcatgcaactgaggaagatttgcaaccatccctatatgtttcaacacattgaggaaagtttctcagagcatctgggctttactggcggtatcgtgcaagggttggatctgtacagggctagcggtaaattcgagctgctcgaccggattctgcctaagctgcgagccaccaaccataaggttttgctgttttgccagatgactagcctcatgaccatcatggaggattacttcgcctatcgaggatttaaatatttacgtctggacggcaccaccaaggcggaggacagggggatgttgctgaagactttcaatgaacccggatcagagtacttcatcttcttactgagcactcgagccggtggattaggccttaatttgcaatctgctgatactgtaattatctttgatagcgattggaatccccaccaagaccttcaagctcaagatcgcgctcaccgcatcgggcagcagaacgaagtcagagtacttcgactgtgcacagtcaacagcgtagaagagaagatcctcgccgcagctaaatataaactcaacgtggatcaaaaagtcatccaagcaggcatgttcgatcagaagtcgtcgtctcatgagcggcgtgcctttctgcaggcaatcctagaacatgaagagcaagatgaatcacggcactgctccactggatcaggcagtgccagcttcgctcacacagccccaccaccagcgggtgtgaatcccgacctcgaggagcctccgctgaaggaggaggatgaggtgcccgacgatgagacggtgaatcaaatgattgcaaggcacgaggaagagttcgatctgttcatgcgtatggacctcgacaggaggcgagaggaggctcgcaaccctaaacgcaaacctcggcttatggaggaggacgaattaccttcatggattattaaagacgacgcagaagtggaacggttaacttgtgaggaggaggaagagaagatgtttggacggggtagcaggcaccgaaaggaggtcgactactcagattctctgaccgagaagcagtggcttaaggctatcgaggagggaacccttgaagaaattgaggaggaagtaaggcagaaaaagtctagccgaaaaagaaagcgggactcagacgccggatcgtccacccccacaacttccacgaggagtcgtgacaaagatgacgagagtaaaaaacaaaaaaaacggggacgaccccctgccgagaagctgagtcccaatccaccgaacctgaccaagaagatgaaaaagattgttgacgccgtgatcaagtacaaagactcctcctctggtagacagctgtccgaggtcttcattcagctgccatcacgcaaggaacttcccgagtactatgagctcataagaaaaccagtcgatttcaagaagattaaagagcgtattcgtaaccataagtataggtccttgaacgatcttgagaaagatgtaatgctgctgtgtcagaacgcgcaaacgttcaacctggagggcagtctgatctatgaagattcaatcgtgctgcagtctgtctttacctctgtgcggcagaagattgaaaaggaggacgactctgagggcgaagaaagtgaagaggaagaggagggcgaggaagaggggtcggagagcgagtcaagatcagtgaaggttaagatcaagctgggacgtaaggaaaaggcccaagatcgcctgaaaggcggacgcaggcgcccatccagggggagccgggctaagccggtggtctcagacgatgacagtgaagaagagcaagaggaagatcggtccggaagcggaagtgaagaagattag

SEQ ID NO: 242960 - DNA, 5039 bp, synthetic construct
  misc_feature 1..5039: note = Description of Artificial Sequence: Synthetic coding sequence
  source 1..5039: mol_type = other DNA
atgtccacccccgatcctccgttgggaggaacacccagacctggccctagtccaggccctggtcccagccctggcgctatgctcgggccttcccctggcccatcacccggtagcgctcattcaatgatggggccaagccccggtcctccgagcgccggacacccaatccccacccaagggccaggcggatatccgcaggacaacatgcatcaaatgcacaaaccaatggagtctatgcacgagaagggaatgtcagatgaccccagatacaatcagatgaaaggaatgggaatgagatcaggcggtcatgccggaatgggccctccgccttcgccaatggatcagcactcccagggttacccatcgcccctcggcggatccgagcatgccagtagtcccgttcctgcgtctggaccctcttcaggccctcaaatgtctagcggccctggcggagccccactggatggtgccgatccacaggctctgggacagcagaacaggggtcccacccccttcaaccagaatcagttgcatcagcttcgcgctcagataatggcttataaaatgctagcaagagggcagcccttaccggatcatctgcagatggcggtccagggtaagaggcctatgcccggaatgcaacagcagatgcccaccttgccccctccttcagtaagcgccaccggcccaggaccaggacctgggccaggacccggaccaggcccagggccagcgcctcccaattacagtcgtccccacgggatgggaggtcccaacatgcccccacccggaccctccggtgttcctcccggtatgcccggacagccccctggcggacccccaaaaccttggcctgagggacctatggccaacgccgctgcaccaacctctacaccccagaaattaatcccccctcagcctactggcaggccttctcctgcaccccctgctgtgccccctgcagcttctcccgttatgccacctcagactcagtctcccggacagccagcccagccagcaccaatggtgccgctgcatcagaaacagtctaggatcactcctatacagaagcccagaggtctggatcccgttgaaattcttcaagaaagagagtatcgcttacaggctcgaatcgcccatcggattcaggaattggagaatctccccggaagcctggccggagacctgcgcacgaaagccacaattgagctcaaggctctcaggctgcttaatttccaaagacagcttcgccaggaagttgtggtttgcatgcgacgagatactgcactggagactgcactgaacgctaaagcgtacaaacggagcaaaagacagtcccttagggaagccaggatcaccgagaagctagaaaagcagcagaagatcgagcaagagcgcaaacgtcggcagaagcaccaagaatacttaaatagcatccttcagcatgcaaaagatttcaaggaatatcatcggagtgtgaccgggaaaattcaaaagttaaccaaagccgtggctacctaccacgccaatactgagagagaacagaaaaaagaaaatgagagaatcgagaaggaacgcatgaggaggttgatggccgaggacgaagagggataccggaagttaatcgaccagaagaaggataaaaggctagcttatctgctgcagcagactgacgagtacgtggccaatctaacagaactggtgcgccagcataaggctgctcaggtggccaaagaaaagaaaaaaaagaaaaagaagaagaaagccgagaatgcagaaggacagacccctgccatcggcccagacggggaacccctcgatgaaacttcccagatgagtgacttgccggtgaaggtaattcatgtcgagagcggtaaaatcctgaccggcacggacgccccaaaggctggtcagttggaggcctggctggaaatgaacccaggatacgaagtggccccaagatccgatagcgaggagtcgggctcagaagaggaagaggaagaagaggaggaggagcaacctcaggccgcacaaccacccaccctgccagtggaggagaagaaaaagatccccgatcccgatagcgatgacgtctccgaagttgatgccaggcacattattgaaaacgcgaagcaggacgttgatgatgaatatggggtgtcccaggcactggccagaggcctccagagttactatgccgtggctcatgccgtaacggagcgcgtggataaacagagtgcactgatggttaatggcgtgctgaaacagtatcaaatcaagggtttagaatggttggtgagcctgtacaataataatctgaacggcattttggcagatgaaatgggcttgggcaagacaatccagaccatcgctctaatcacgtatttgatggaacataagcgcattaatggaccctttctaattatcgtgccattgagcactttatccaactgggcgtatgaattcgacaagtgggctccgagcgtcgtaaaagtttcctataaaggtagtcccgctgctcgcagggcattcgtgccgcagctgcggagcggcaagttcaatgtcctgctcaccacctacgagtatatcataaaggataagcacatcctggcaaaaataagatggaagtacatgattgtggatgaagggcatcgcatgaaaaatcatcactgtaaactgacccaggtcctgaatacccactatgtagccccacggagacttctgttaactggtacaccgctccaaaacaaactgcccgaactctgggctctgctcaatttcttactaccaacgatattcaaatcttgtagcacctttgagcagtggttcaatgccccattcgccatgaccggcgagaaagtggacctgaatgaagaagaaaccatactgataatccgtcgtttgcacaaagtcctgaggccattcctgcttcggcgacttaaaaaggaggtcgaggcccagctgcccgagaaagtggaatacgtgataaagtgtgatatgtctgcactccagagagtcctgtaccgccacatgcaggcgaaaggagtcttacttacagatggcagcgagaaggacaaaaaagggaaaggaggcaccaaaacacttatgaacacaatcatgcagttaagaaaaatctgtaaccatccgtatatgttccagcatatagaggagtcctttagcgagcacctgggattcaccggtggaattgtgcagggcttagatctgtaccgcgctagtggaaagtttgagctgctggatcgcattcttccaaagctccgggctaccaatcacaaagtgctgctgttctgtcagatgaccagccttatgaccattatggaagactacttcgcataccggggattcaagtatctgagactggacggaaccacaaaagcagaggatcgcggaatgttactcaaaaccttcaatgagcccggttcggagtacttcatttttctgttgagcacccgagctggcggacttggacttaacttgcaatctgcagatactgttatcatctttgactctgactggaatcctcatcaggaccttcaggcacaggaccgcgctcatcgcatcggacagcagaacgaagtcagggtgctgaggctatgtactgtcaactcagttgaggagaagatattggccgcagccaaatataagctgaacgttgaccagaaggtaattcaagctggtatgttcgaccagaaatcgtcttcccatgaacgtcgcgcatttctgcaggccatcctagaacacgaagagcaggacgagtctcgtcattgctccacgggttccggatctgcgtcatttgcacatacggccccacctccggcaggcgtgaacccagatctggaggagccgcctctgaaggaggaggacgaggttcctgatgatgaaacagttaaccaaatgattgctaggcatgaagaggagttcgacctttttatgaggatggatttagacagacggagagaggaagcccgaaacccaaaaagaaagccaagacttatggaggaagatgagctcccaagctggatcatcaaagatgatgcagaagtcgagcggttgacttgtgaagaagaagaggaaaagatgtttgggcgagggagccggcaccgcaaagaagtagactacagcgattcccttaccgaaaagcagtggttaaagaagatcaccggcaaagacattcacgacacggcttcatccgtagcgaggggactgcaatttcaaaggggactgcaattctgtacacgagcttccaaggcgattgaagaagggaccctggaagagattgaggaagaggttcggcaaaaaaagagttcacgtaaacgcaaaagagattctgacgccggatccagtactccgaccacgtcgacgcggtcccgggataaggacgacgagtctaagaagcaaaagaaacggggaaggccaccagcagagaagctgtcccccaatcccccaaatctgactaaaaagatgaagaaaattgtcgacgccgtcatcaagtataaggacagctcatcggggaggcagttgtccgaggtgttcattcagctgccatccaggaaggagctgcccgaatactacgaactgattcgcaagccggtagattttaagaagattaaagagcgcatcagaaatcacaagtatcggtctctgaacgacctcgaaaaggatgtgatgctgctatgccagaatgcacagacattcaacctggaaggctcccttatttatgaggattccattgtgctccagtctgtgttcacaagtgttaggcaaaaaatcgagaaggaggatgactctgaaggggaagaatcggaagaggaagaggaaggagaagaagaaggttcagagtcagaaagcagatccgtcaaagtcaagatcaaactgggtagaaaggagaaagcacaggacaggctgaagggagggaggagaagaccttcccgcggttcaagagcaaagcccgtggtgagcgacgacgattctgaggaggagcaggaggaggacagatccggatctgggtccgaagaagatta

SEQ ID NO: 242961 - DNA, 4854 bp, synthetic construct
  misc_feature 1..4854: note = Description of Artificial Sequence: Synthetic coding sequence
  source 1..4854: mol_type = other DNA
atgtccaccccagaccctcctctggggggaacccctaggcccggaccaagtcccggacctggccctagccctggagctatgttaggacctagccccggtcccagtcccggaagtgctcatagtatgatgggcccatcacctgggccaccctctgcaggacacccaatacccacccagggaccgggagggtatccccaagataacatgcaccagatgcataaacctatggaatctatgcatgagaagggaatgtccgatgatcccaggtataaccagatgaaggggatgggcatgcgcagtggtggtcacgccggaatgggccctccccctagccccatggaccagcattcccaggggtacccttcccccttgggcggaagtgagcatgcttcctctcccgtcccagcctctggaccgagcagcgggcctcaaatgagttcgggacccggtggagctcccctagatggggcagatccacaagccctgggccaacagaaccggggacccacaccattcaatcagaatcagctgcaccagcttagggctcagataatggcttataaaatgttggccaggggacagcctttgcccgaccacctgcagatggcagtacagggtaagagacctatgccaggcatgcagcagcagatgcctacgcttcctcctccatcagtgtctgctactggtccaggccctggccctgggcctggcccagggcctgggcctggtcccgcacctccgaactacagcaggccacatgggatgggcggacctaacatgcctcctccgggacccagtggtgtccctccgggaatgcccggacagcccccagggggtccacccaaaccttggcccgaggggccaatggcgaatgccgctgccccaaccagcacaccccagaaactgatcccacctcaacctaccggcaggccatcgcctgcacctcccgctgtgcccccagcagcctcgcctgtcatgcccccacaaacacagtcaccgggtcagccagcccagccggcacccatggtccctcttcaccagaaacagtcccggattacgcctatccaaaagcccagaggcctcgatccagtggagatcctccaagagagagaatacaggctccaggcccgaattgcccataggattcaggagctggaaaacctgcctggaagtttggctggagacctgcggacgaaagccacaatagaactaaaggcccttcggctgctgaactttcagagacagctccgacaggaggttgtggtgtgtatgaggagggacacagccctcgaaacagcactgaatgctaaagcttacaagagatccaagcgccagtctctgagggaggcacgcattaccgaaaaattagaaaagcaacagaagatcgagcaggagcggaaaaggagacagaaacatcaagagtatctgaattctattctgcaacacgcaaaagatttcaaggagtaccaccgttctgtaactggcaagattcaaaaactgacaaaagccgtggccacatatcacgcgaatacggagcgcgagcagaaaaaggagaacgagcggatcgagaaagagaggatgaggcgacttatggctgaggacgaagagggctaccgaaaactgatcgaccagaaaaaggataaacgcctggcataccttttgcagcagactgacgaatacgtcgctaatctgacagaactcgtacggcagcacaaagctgcacaggtcgcgaaagagaaaaagaagaaaaaaaagaagaagaaagctgagaatgctgaggggcaaacaccagcgatcggtcctgatggagaacctctggacgagacttctcagatgtctgacctccccgttaaggttatacacgttgaatcagggaagattctgacaggcacagatgctcctaaagctggccagctggaagcctggttagagatgaatcccggttacgaagttgcccctaggtccgacagcgaggaaagcgggtctgaggaagaagaagaggaggaagaggaggagcaaccgcaagccgcacaacctcccaccctgcctgtggaggagaaaaagaaaatcccggatccagactctgatgatgtgtctgaggtggatgcaagacacatcattgaaaacgctaaacaagacgtcgacgacgagtatggagtaagtcaggctctagcccgaggcttacagtcctactacgccgtcgctcatgctgtgacggagagagtggataagcaaagcgcgctgatggtgaatggggttttaaagcaatatcagattaagggcctggagtggctggtgtcgctctacaataataacttgaatggaattctggctgatgagatgggcttgggtaagacaatccagacgattgccctaattacctatttgatggaacataagcggatcaatggaccctttctgatcatcgttccactgtcaacactgtccaactgggcctacgagttcgataaatgggctcctagtgtagtgaaagtatcctacaagggaagcccggcagcgaggcgggcttttgtaccacagctgcgatccgggaaatttaatgtgctgctcacgacttacgaatacattatcaaggacaagcacattctagccaagatcagatggaagtacatgatagtggacgagggccatcggatgaaaaatcaccactgtaagttaacccaggtgctgaatactcactatgtggcccctaggaggctgttacttacaggtacaccattgcaaaacaaacttcctgaactgtgggctctgctaaattttctgttgcctacaatcttcaaatcgtgtagtacattcgagcaatggtttaatgctccattcgccatgacaggagagaaggtggatctaaacgaggaagaaacaattctgattatccgtcggctacataaggtgctcagacccttccttctccgcagattgaagaaggaggttgaggctcagctgcccgagaaagtggagtatgtgattaaatgtgacatgagcgctctccagagagtactgtacaggcacatgcaggccaaaggggtgctgctgacagacgggtcagagaaagataagaaaggtaaaggtggcaccaagactctcatgaacacgattatgcagttgaggaaaatctgcaaccacccttacatgttccagcatattgaggagtccttttcagaacatctgggcttcaccggcggtatagtccagggcttagacctgtaccgggcttccggaaaatttgaattgctggatcgaatactgcccaagctcagggcaaccaatcacaaagtgttactgttttgtcagatgaccagcctgatgacaataatggaggactactttgcatacagaggtttcaaatacttgcgtcttgacggaacaacaaaggccgaggatcggggtatgctgctaaagacattcaacgagccgggatctgagtactttatttttctcctgtccacaagagcaggcggactcgggctcaacctccagagtgcggatactgtgatcatttttgacagcgactggaaccctcatcaagatctccaggcccaggaccgcgcacaccgtatcgggcagcagaatgaggttcgggtgctgcggctctgcaccgtgaactctgtagaagagaagattttggctgcagcaaagtataaactgaacgtagaccagaaagtaatccaggccggtatgttcgatcaaaagtcttccagtcatgagaggagggccttcttgcaagccatcttggaacatgaggagcaagacgaggaggaggatgaagtgcctgatgatgaaaccgtgaaccaaatgatcgctaggcacgaggaagaattcgacctctttatgcggatggatttggatagaagacgggaggaggcccgtaatcccaaacgcaagcctaggctgatggaggaagatgagcttcccagttggatcattaaggacgatgccgaggttgaaagactcacctgtgaggaagaggaagagaagatgttcggcagagggtcaagacacagaaaagaggtggattatagtgattctctcaccgaaaagcagtggctaaagaccctgaaggctattgaggaaggaactttggaagaaatagaggaagaggtgcgtcagaagaagtcctcccgcaaacggaagagagactctgacgccggttcctcgacccccacaaccagtacaagatcccgggacaaagacgacgaatccaaaaagcagaagaaaagagggaggccccctgccgaaaagttgagccccaacccacctaatttgaccaagaaaatgaagaagatagtcgacgcagtcattaaatataaggactcctccagtggccgacagctctccgaagtgtttattcagctgccgagtaggaaggagcttccggaatattatgagctgatcaggaaacccgtagacttcaaaaaaattaaggagcggattaggaaccataagtatcgctccctgaacgacttggagaaggatgtgatgttgctgtgccaaaatgctcagacctttaatctggaggggtcccttatatatgaggattctatcgtgcttcagtctgtgttcacatctgtgcggcagaaaatagaaaaggaagatgactccgagggagaagagagcgaagaagaagaagagggagaagaggagggctccgagagcgaatcacgctccgttaaagtaaaaatcaagctcggacgaaaagaaaaagcccaagaccgtctcaaaggcggacgtcgtaggccttctcgaggctctagagccaaacccgttgttagcgacgacgattcagaggaggagcaggaagaagaccggtctggatccggatctgaagaggactag

SEQ ID NO: 242962 - DNA, 5045 bp, synthetic construct
  misc_feature 1..5045: note = Description of Artificial Sequence: Synthetic coding sequence
  source 1..5045: mol_type = other DNA
atgtccacgcccgaccccccattaggtggaacaccaaggccagggccttcacctggaccgggtccttcccccggagcgatgctgggacctagtcccggtcctagtcccggatcagcacactcaatgatggggcctagtcctgggccacccagcgccggtcaccccatccccacacagggccctggcggatatccccaggataatatgcatcagatgcataagcccatggaatctatgcatgaaaaaggtatgtcagatgatcctagatacaaccagatgaaaggcatggggatgcggtccggagggcatgctgggatgggcccaccacccagtcctatggaccaacactctcagggttacccctctcctctcggtgggtccgaacacgcatcctcaccagtgcctgccagtgggcctagttcagggcctcaaatgagcagcggccctggtggagcaccgttggatggggctgatccacaagcactggggcaacaaaatcgcggtcctacaccattcaaccagaaccaattacatcagcttcgagcacagatcatggcctacaagatgctggccaggggccagcctctgcctgatcaccttcagatggccgtccaggggaagcggcctatgccagggatgcaacagcagatgccgaccttgcctccgccttccgttagtgccacggggcctgggcctggcccagggcctggcccaggacccggacctgggccagcacctccaaactactctcggcctcacggtatggggggacccaatatgcccccaccgggaccttcaggtgtgccacccggtatgccaggtcagcctccgggtggcccaccgaagccttggcccgagggccctatggctaacgctgctgcgccaacaagcacaccacagaagctgattcctccccagcccaccggcagaccttcacctgccccaccagccgtaccaccagccgcaagcccagtgatgcctccacaaacacagtctcctggtcagccagcgcagcccgcaccgatggttccactccatcaaaagcaaagccggattacgcctatccaaaagcccaggggtctcgatccagtggagatccttcaggaacgcgagtatcgcctgcaggcgagaatcgctcaccgaatccaggaattggagaatctacctggttccctggccggtgacctcaggacaaaagccacaattgaacttaaggcactgcggcttctgaacttccagaggcaactcaggcaggaagttgtcgtgtgcatgcgcagagacacggccttggagactgccctgaacgcaaaggcgtacaaacgctctaagcgccagtctctgcgggaggcacgaatcaccgagaaattagaaaagcagcaaaagatagagcaggaaagaaagcgcaggcagaaacatcaggaataccttaattcaatcttgcaacacgcaaaggattttaaagagtatcacaggtccgtaacaggcaaaatccagaaactcaccaaagctgtagccacatatcatgcgaataccgagcgagagcaaaagaaagagaatgaaagaattgagaaggagcgcatgagacgtcttatgggccagagggaaaaatcccgccgaggtctgggatctcagagctgggccaggatcttcgccgaccttagcgaccaccaaaatgattgcgtcacgagtgtcaccgaaagcctggttggtcagattctagcggcttgctcaggagaagagggtgaggtcgagtggaagggacgagatagagtcagacggctcagggccgaagacgaggagggataccgaaaactgattgatcaaaaaaaggataaacggctcgcctatcttctgcagcaaaccgatgagtatgtggctaacctgactgagctcgtccggcaacacaaagctgcacaagtggccaaggaaaaaaaaaagaagaaaaagaaaaagaaagccgaaaacgccgagggccaaactcccgcaataggaccagacggagagccgctggatgaaaccagccagatgtctgacctgcctgtaaaagtgatacatgttgagtccggcaagatacttacaggaacagacgctccgaaggccggacagctcgaggcctggttggagatgaatccaggctacgaggtggcacctagatctgattctgaggagtccgggtcagaagaggaggaagaagaggaagaggaagaacagccccaggccgcacaaccgccaacactgccagtcgaggagaagaagaaaatcccggatcctgatagtgatgacgtgagcgaggttgatgcacggcacataatcgaaaacgctaaacaggatgtagacgatgagtatggagtgagccaggcactggctcgtggcctgcaaagctactacgcagtggctcatgccgttacagagcgcgtagacaaacaatccgccttaatggtcaacggtgtcctgaagcagtaccaaattaaaggactggaatggctggtaagcctctacaataataacttaaacgggattcttgccgacgagatgggcctgggcaaaacaatacagactatcgccctcattacttacctgatggagcataagaggatcaacgggccttttctcatcatcgttccactgagtaccctcagcaactgggcttacgagttcgataagtgggctcctagcgtcgtgaaagtatcatataaaggttctcccgctgctagaagagcattcgtgccccagttgagatcgggaaaatttaacgtactgcttaccacatatgagtatatcattaaggataaacacatcttggctaagatacggtggaaatatatgatcgttgacgaaggccaccgaatgaagaaccaccactgtaagctgacacaagtccttaatacacactacgtcgctccacgccgactattgcttaccggtaccccgctccagaacaagcttcctgaactctgggctctactgaactttctgctcccgactatttttaaatcttgcagtacattcgagcagtggtttaacgctccctttgcaatgaccggcgaaaaggtagacctcaacgaagaggaaaccatccttatcatccgaagactccacaaggtactgaggcctttccttctcaggcgtctcaagaaggaagtagaggcgcaattgcctgagaaggtggagtacgtgatcaagtgcgatatgagcgccctgcaacgcgtactctacaggcatatgcaggccaaaggagtcctgcttacagatggttctgagaaagataagaagggtaagggtgggacaaagacccttatgaacacaatcatgcaactccggaaaatctgtaaccatccttatatgtttcagcacatcgaagagtccttctctgagcacctcggtttcaccggcggaatcgtccagggtcttgacctatatcgcgcaagcggaaaattcgaactgttagaccggattctgcctaaactgcgggcaacgaaccacaaggtccttctcttttgccagatgacgagtctgatgaccatcatggaggactacttcgcctatcgaggatttaaatacttgcgcttggatggcacaaccaaggctgaggataggggcatgcttctcaaaacattcaacgagcccggttcggagtactttatttttctcctgtcaacacgagcaggcggattgggcctcaacttacagtcagccgatacagtcataatcttcgatagtgactggaacccacatcaggatctccaagctcaagatagagctcaccggattgggcaacagaacgaagtgcgcgtccttcgcctctgtacggtcaattccgttgaagaaaagatcctggcagctgccaaatacaagcttaacgtggaccaaaaggtaattcaagctggcatgttcgatcagaagagtagcagccacgagcgcagagccttccttcaggccatactcgaacacgaagaacaggatgaggaagaagacgaagtacctgatgatgaaacagtgaaccagatgattgctcgccatgaagaggaatttgatctgtttatgcgcatggacctggataggagacgcgaggaagcaaggaatcccaagcgtaaaccccgactgatggaggaagatgaactgccaagctggatcataaaggatgatgctgaagttgagcgactaacatgtgaggaggaggaggaaaagatgtttggaagaggttctcgtcataggaaggaggttgactactcggactctttaacggagaagcagtggctgaagaccctcaaagctattgaagaggggacgctggaagaaattgaggaagaggttcgccagaagaaaagctccaggaaacgtaagcgagattctgacgctgggagcagcacccctaccacctccacccggtctcgagacaaagatgacgagtccaagaagcagaagaaaagaggcaggccgcctgccgagaaactctcgccaaatccacccaatcttaccaagaagatgaaaaagatagtagacgctgtgatcaagtacaaggatagcagcagcggcaggcaacttagtgaagtattcatccaattacctagcaggaaagagctgccagaatattacgaactcatcagaaagccagtcgatttcaagaaaattaaggaacgcatccgcaatcataaataccgcagcctcaacgatctggagaaagatgtgatgcttttgtgccaaaacgctcagacttttaaccttgaaggtagcctgatctatgaagatagcatcgtactccagtctgttttcacatcggtccgccagaaaattgagaaggaggatgacagtgagggagaagagagcgaggaagaagaggagggcgaagaagagggcagcgaatccgagtcccgatccgtgaaagtgaaaataaagctaggcaggaaagagaaggctcaagaccgcctcaaaggcggacgaaggcggccttcgagagggagtagagctaagccagtggtctcagatgacgatagcgaagaagagcaggaggaggatagatccgggagtggaagtgaggaggatta

SEQ ID NO: 242963 - DNA, 4944 bp, synthetic construct
  misc_feature 1..4944: note = Description of Artificial Sequence: Synthetic coding sequence
  source 1..4944: mol_type = other DNA
atgagtacacccgacccacccttgggtgggaccccgaggcctggtccaagtccaggtcctgggcctagccctggcgctatgcttggccctagccctggaccgagcccgggtagtgcccattccatgatgggtccatcacccggacccccatctgccggtcaccctatccccactcaggggccagggggatatccgcaagataatatgcaccagatgcataaacctatggagagcatgcacgaaaaggggatgtcagacgaccccaggtataaccagatgaaaggcatgggcatgcgcagtgggggtcacgcaggcatgggtcccccacccagtccaatggatcagcactcccagggatatccatcacccttaggaggatccgagcacgcgtcgagtcctgttccagccagcggcccttcaagtggtccacagatgtcttccgggccaggcggagccccactggacggagccgatccccaagcacttggccagcaaaatagagggcctacaccatttaatcagaaccaactccaccaattaagagcacagatcatggcatataagatgctcgcacgaggccagcctttgcctgatcacctccagatggccgtccaaggtaaaagacctatgcctgggatgcagcagcagatgcccaccctgcccccaccatctgtgtctgctacaggaccgggacctggaccaggacctggaccgggtccgggacctgggccagctcctcccaattatagcagaccgcacggcatgggcggtccaaacatgcctccacccggtccatctggcgttccacctgggatgccgggacagccacccggaggacccccaaagccgtggccagagggtccgatggccaatgcagcagcccctacttccactcctcaaaagctgattccaccacagcccaccgggcgaccatcaccggcaccacctgctgtgcccccagcagctagtccggtcatgccaccacagacccagtccccaggacagcccgctcagccagcccctatggtccctctacatcaaaaacagtctaggatcacccctatacagaaacccagggggcttgacccagtggagattctgcaggagcgggaatatagactccaagctaggatcgctcatagaattcaggagctcgaaaatctcccagggagtctggctggtgaccttaggaccaaagccactattgagctcaaagccctcaggcttctgaactttcaacgccagttgcgccaggaggtagtggtttgtatgcggcgtgacactgccctggagaccgctttaaatgcaaaggcttacaagcggtctaagcgtcagtctctccgagaggctcgcatcacagagaaactagagaagcagcagaagatcgagcaagaacgcaaaaggcgccaaaaacaccaggaatatctgaacagcatcctgcaacacgcaaaggattttaaagagtatcacagatctgtgacagggaaaatccagaaacttaccaaggcagtggcaacttatcacgcgaatacagaacgagagcagaagaaggaaaacgagcgtattgagaaggagcgcatgaggaggcttatggctgaggacgaagaaggctatcgaaagctgatcgatcaaaaaaaggataagcggctggcataccttttgcagcaaaccgacgagtacgtggcaaacttgactgagctggtgcgtcagcacaaagcagcccaagttgccaaggagaagaagaaaaagaaaaaaaagaaaaaagccgagaacgccgaagggcaaacgcccgcaattggcccagacggggaacccctagacgagacatcacaaatgagcgacttgcctgtgaaggtaatccacgttgaatcaggaaagatcttgacaggcacagatgcgcctaaggctggccaactggaagcttggctggagatgaatcctggctatgaagtagcgcctcggtccgattcagaggagtcagggtcagaagaagaggaggaggaggaagaggaggaacaacctcaggcagcgcagccccctaccctccctgtggaggagaaaaagaagatcccagatccggactctgacgatgtgtctgaggtggacgccagacacattattgagaacgccaagcaggacgtggacgatgaatacggcgtctctcaggctttggcgagaggtttacagagctactacgccgtggcccatgctgttacagagcgggtagacaaacaatccgccctgatggtgaatggtgtcctgaagcagtatcagattaagggtctggagtggttagtatctctatacaacaataatctgaacgggatcctcgcagacgaaatgggattggggaagaccattcaaacaatcgccttaattacttacttgatggagcacaagcgcataaacggcccttttctgataatagtccccttaagcacgctctccaattgggcatacgagttcgataaatgggctccttcggtcgtgaaagtttcttataaggggtcaccggcagcgaggcgcgctttcgttccccagttaagatcaggtaaatttaatgtcctgttaaccacatacgaatacattatcaaagataaacacatactggcaaaaattaggtggaaatacatgatcgtggatgaaggccaccggatgaagaaccatcattgcaagctgactcaggtactcaatacgcactacgtggctccgagaaggctgctgctgaccggtactccactgcaaaataagctgcccgagctctgggccttgttgaatttcttgttaccaaccattttcaagagctgctcaacattcgaacagtggttcaacgcgccatttgccatgacaggcgagaaagttgacctgaacgaagaggaaacaatcctaataatacgtcgtctccacaaagtattgagaccgtttctgctgcggagattaaagaaagaagttgaggctcagctccccgagaaagtcgaatatgtgattaagtgtgatatgtcagcattacagagagttctgtacagacacatgcaggctaagggggtgctgttaaccgatggatcagaaaaagataaaaaaggcaagggcggtacaaaaacactgatgaacacaattatgcagttgcgtaaaatctgcaaccacccctacatgttccagcacatcgaggaaagctttagtgagcacctcgggttcacggggggaattgtgcagggcctagatctctaccgggcaagtggcaagtttgagctgctggacaggattctgccgaagcttcgagccactaaccacaaagtgctcctgttctgtcaaatgacgtcattgatgacaataatggaggactatttcgcctacagaggcttcaagtatctaaggttggacggaactacgaaggccgaggaccggggtatgcttttaaagaccttcaatgaacccggatctgagtacttcatcttcctgctctcaacgcgcgcagggggactgggactaaacctgcagtcggccgacacagtcattatcttcgacagcgattggaaccctcaccaagatctgcaggcgcaagatagggcacacaggattgggcagcagaatgaggttagggtgcttcggctgtgtaccgtcaactcagtagaagaaaagattctggctgctgcaaaatataaactgaatgtggatcagaaagtgatacaggcgggaatgtttgaccagaaatcctctagccacgagcgcagggcatttctccaggctattctggagcacgaagaacaggatgagtcacggcactgctcaaccggctccgggtctgcgtccttcgcccacactgcccctccacccgctggagtgaatcccgacctcgaagagcctccgctcaaggaggaagatgaggtccccgatgatgaaacagtcaaccagatgatcgcacgccatgaggaggagtttgacttattcatgcgaatggatctcgacaggcgacgagaagaggctcggaatcctaagaggaaaccacgactgatggaagaagacgagcttccctcttggattatcaaagacgacgcggaggttgagagactgacctgcgaagaagaagaggaaaaaatgtttggacgcggatctcgtcacaggaaagaggtggattattctgattcccttacagagaagcagtggctcaaggccattgaagaaggcaccttggaggaaatcgaagaagaggtgagacagaaaaaaagcagcagaaaaagaaaaagagacagcgacgcaggtagttctaccccaaccacctctacaagatcacgggataaggatgacgagagcaaaaaacagaagaaaagaggccgacctccggctgaaaaacttagtcctaacccccctaacctcaccaagaaaatgaaaaaaattgttgacgcggtgattaaatataaggatagttcatccggtcgccagctctctgaggtatttatacagctaccaagtagaaaagagctccctgagtattacgagttgatcagaaaacctgtggactttaaaaaaatcaaagagcggataagaaaccacaagtataggagcttgaacgatctggagaaggatgtcatgttactatgtcagaatgcccagacctttaatctggaaggatcgctcatctacgaagactccattgtgttgcagagtgttttcacaagtgtccgccagaagatcgagaaggaagacgattctgagggcgaggaatcagaggaagaggaggagggcgaagaggaaggatctgaatctgaatcgaggagtgttaaggtcaaaatcaagctgggcaggaaagaaaaggcccaggaccgtctgaagggcggacggagaagaccctctagaggctctcgcgctaaacccgtggtcagtgacgatgactctgaggaggaacaggaagaagatcggagcggatctggcagcgaagaggactag

SEQ ID NO: 242964 - DNA, 4842 bp, synthetic construct
  misc_feature 1..4842: note = Description of Artificial Sequence: Synthetic coding sequence
  source 1..4842: mol_type = other DNA
atgtcaacaccagaccctccgcttggcggaacaccaaggcctggcccttcacctgggcctgggccttcgccaggcgcaatgttgggacccagtccaggaccttcccctgggagtgcgcactccatgatgggcccttctcctggtccaccctccgcaggtcatcccattccgacacagggcccaggcggatacccccaggacaacatgcaccaaatgcataaacctatggaatcaatgcatgagaaaggcatgagtgatgacccgcgttataatcaaatgaaaggcatgggaatgagatcaggcggacatgccggaatggggcctccaccaagcccaatggaccagcatagccagggctacccttcccccttagggggttctgaacacgccagcagcccagttcccgctagcggcccaagctcgggcccacagatgagctctggacccggtggagcccctctagacggtgccgaccctcaagcactgggccagcagaatagaggcccaactccttttaaccaaaatcagcttcatcagcttagggcgcagatcatggcttacaagatgctcgccagagggcagcccttacctgaccacctgcagatggcagtgcaaggaaagcggccaatgccaggaatgcagcaacagatgccgactctgccccctccctccgtatccgctactggcccaggcccaggtcctggccctggacccggaccaggtcctgggccagcgccaccaaattacagtcgtcctcacggtatgggcggtcctaacatgccgccacccggtccctctggcgtaccccctggaatgcccggtcagcctcccggaggacctccaaagccgtggcctgagggacccatggccaatgcggctgcccctacctctacccctcaaaagttgattcctcctcaacctacaggacgcccttcacctgcgccacccgctgtaccccctgctgcctcccctgtgatgccaccccagacccagtcacccggacagccagcgcagcctgctcctatggttcctctgcatcagaagcaaagccgcataacccccattcagaaaccacgcggtcttgaccccgtcgagattctgcaggagagagaatataggttacaagcccgtatagcgcaccggattcaagagctagagaatctgccgggatcccttgcaggcgatctcaggaccaaggccaccatcgaacttaaggctcttcgcctgctcaacttccagcgccaactgcgccaagaggtcgtggtctgcatgcgacgggacactgccctggagacagccttgaacgccaaagcttataagagatcgaagcgccaaagcctgcgggaggcccgtataactgaaaagctggaaaagcagcagaaaatagagcaggagagaaaacgcaggcagaagcatcaggagtacctgaacagcattctacagcacgctaaggatttcaaagagtaccaccggagcgtgacggggaagattcagaaactcacaaaagctgtcgccacctaccatgccaatactgaaagggaacagaagaaagagaatgaacgcattgagaaggagagaatgagacgccttatggccgaagacgaggaagggtaccgcaaactcatcgaccagaaaaaagataaacgcctggcatatctgctgcagcagaccgatgaatatgtagcgaatctgactgagctagttcgccagcacaaggctgcacaggtggccaaggagaagaagaagaagaaaaagaagaagaaagccgaaaatgccgagggccagacccccgctattggacctgacggcgagcctcttgacgagacgagccagatgagcgacctgccagtgaaggtgattcatgtggaatcaggcaagatccttactggcacagacgctcccaaggccggacagcttgaggcatggctcgagatgaaccccggatacgaggtggcaccgaggtccgattccgaagaatctggcagtgaggaagaggaggaggaagaagaggaagagcagcctcaggccgctcaaccccctactctgcctgttgaagagaaaaaaaagatcccagacccagattccgacgatgttagcgaggtggatgccagacacatcattgaaaacgccaagcaggacgtggacgatgagtacggcgtgtcccaggccttagccaggggcctccagtcctattacgcagttgcccacgctgtcacagagagagtcgataaacagtctgcactcatggtcaatggcgtattgaagcagtatcagattaaaggactggaatggcttgttagcctgtataacaacaacctgaacggcatcctcgccgacgagatgggtctggggaagactatccagaccattgcattaataacctacctcatggaacacaagcgaatcaacggccctttcctgattatcgtgccgctatcaactcttagcaattgggcctacgagtttgataaatgggctccttctgttgtgaaggtgtcctacaagggaagtccagcagcccgacgcgcattcgtgccgcagcttaggtccggcaagttcaacgtgctcctgacgacttatgagtacatcattaaagacaagcatattcttgcaaagattcggtggaagtacatgattgtcgacgaagggcatcggatgaaaaatcaccactgtaagctaacacaggtgctcaacacacactatgtggcccctcggaggttgctacttacaggcacacctctgcaaaataagctgcctgagctgtgggccttgctgaatttcctactcccgacaatctttaagtcctgttctacattcgaacaatggtttaatgcgccattcgcgatgacaggagagaaagtggacttgaatgaggaggaaaccatcctaatcatccgccgattgcacaaggtactgcgcccatttcttctgcgcaggctcaaaaaagaggtagaggcacagctacccgaaaaggtcgagtacgtgattaaatgcgatatgtcagctctacaacgtgtattgtatagacatatgcaggcaaagggggtcctgctcacagatggctcagagaaagacaagaaggggaaagggggaacgaaaacactgatgaatacaattatgcaacttcgcaagatatgcaaccatccctatatgtttcagcatattgaggaaagcttctctgaacacctgggcttcactgggggtattgtacaaggcctggatttgtacagagcctctggtaagttcgaattgctggatcgcattctccctaagttgagggctaccaaccacaaggtccttctgttttgccagatgacgtcgttgatgaccattatggaagactacttcgcttaccgtggttttaaatacctccgcttggatggtaccaccaaagctgaggaccgagggatgctgttgaagactttcaatgagcccggatctgagtactttatctttctgttaagcactcgagcgggaggcctcggactcaaccttcagagcgctgatactgtgattatatttgactctgattggaacccgcaccaggatctgcaggcccaggacagggcccatcgcattgggcagcagaatgaagtgagggttcttcgcctttgtacggttaacagtgttgaggaaaaaatcctagccgcagctaagtacaaactcaatgtggaccagaaggtgatccaagctggcatgttcgatcagaagagctcttcccacgagcgccgagcgttcctgcaagccatcctagaacacgaagaacaggacgaagaagaggacgaagtgcctgatgatgaaaccgtgaaccaaatgattgcacggcatgaagaagaatttgacctgttcatgaggatggatctggaccgcagacgcgaagaagcaaggaaccctaaaaggaagcctcggctgatggaagaggatgaacttccaagctggattatcaaagatgatgctgaggttgaaagactcacttgcgaggaggaagaggaaaaaatgttcggtagaggaagtaggcatcggaaggaggtcgactattctgattctttaacagaaaaacagtggctcaaggctatagaagagggcacactcgaggagattgaggaggaggtacggcagaaaaagagctctagaaagcgcaagcgtgattccgatgccggatccagcacgccgacaacttctacccgtagtcgcgataaggatgacgagtctaaaaagcagaagaaacggggacggccaccagccgagaagctctcccccaaccctcctaacttgacgaaaaagatgaaaaaaatagtagacgcagttatcaaatataaggactcaagcggcagacaactgtctgaggtgttcatccagctgccttctagaaaggagctgcccgaatattatgagctaatccgaaaacctgtcgactttaaaaagatcaaggaacggattcgcaaccacaagtatagaagtttaaacgacctggagaaggatgtgatgttgttatgccagaatgcccagacatttaacctggagggcagtctaatttacgaagacagtatcgtgctccagagcgtgttcaccagtgtcagacagaagatagaaaaagaggacgatagtgagggcgaggagtccgaggaagaagaggagggagaggaggaggggtctgaatcagagtcccgtagcgtgaaagtgaagattaagttagggagaaaggagaaggctcaggatcgtctgaagggcggtagacgccgaccctcccggggatcaagagcgaagcccgtggtgtcagacgacgactcggaagaagagcaggaggaagatcgctccgggtcagggtcggaggaagactag

SEQ ID NO: 242965 - DNA, 4851 bp, synthetic construct
  misc_feature 1..4851: note = Description of Artificial Sequence: Synthetic coding sequence
  source 1..4851: mol_type = other DNA
atgtcgacccctgacccgccactcggcggaacccctcggccaggaccgtctcccggaccaggtcctagccctggagccatgctgggaccctccccaggtccgagccccggttctgctcacagtatgatgggaccttcgccaggaccaccctccgccggtcaccccattccaactcagggccctggcggatacccacaggacaatatgcaccagatgcacaagcctatggaaagcatgcacgaaaaaggcatgtctgacgacccgaggtataaccaaatgaagggcatgggtatgcgctcagggggacatgccggtatgggccctcccccaagtcccatggaccagcactcacaggggtacccatctcctctggggggatcggagcacgcatcgtcccccgtgcctgcctctggacctagtagcgggccacagatgtcctcgggtcccggtggcgcaccattggacggagccgacccacaagctctggggcagcaaaatcggggaccaactccattcaaccagaatcagctacaccagctgagggcccagattatggcctacaaaatgctcgctcgaggtcagccactgcccgatcatttacaaatggcggtccaaggaaagagacctatgcccggaatgcagcaacagatgccgactctccccccaccgagtgtgagcgcgactggtcctggtcctggcccagggcctgggccaggacccggaccagggccagcaccacctaactactccaggccacatggcatggggggacctaacatgcccccaccaggcccatcgggtgttccccctggcatgccagggcagccgcctggtgggccacccaaaccctggcccgaagggcctatggccaacgcggctgcccctacgtccacgcctcagaagctgatccccccacagccaactgggaggccgtcccccgctcctccagcagtaccacccgctgcatctcctgtcatgcctccacagacccagagtccgggacaacctgcccagccagcccctatggtgcctttacatcagaagcagtcaaggataacccccattcagaagcctaggggtctcgaccccgtcgaaatcctgcaggagcgggaatatcggctccaagcacgcattgcacatcggatccaggagctggagaacctgcctggctccctggctggagatttgagaacaaaggctaccattgagcttaaggcgcttagactgctgaacttccagcggcaactgaggcaagaagttgtggtgtgcatgcgtcgtgatacagcgctggaaacagcgctcaatgcaaaggcatacaagcggtcaaagagacagtcacttcgggaagccaggattacagaaaaactcgagaagcaacaaaaaattgagcaagaacggaaaaggcggcagaaacaccaggagtacctgaatagtatccttcagcatgctaaagattttaaggagtaccacaggtctgtgaccggcaaaattcaaaagctaaccaaggctgtcgccacatatcacgcaaacactgaacgcgagcagaagaaagagaatgagagaatcgagaaggagcgtatgcggaggctcatggccgaggacgaggaggggtacaggaagttgatcgaccagaaaaaagacaaacgcctcgcctatctgctgcagcaaacagatgaatatgttgcgaatctgactgagctcgtccgccagcataaggcagcccaggtcgcaaaagagaagaaaaagaagaaaaagaagaaaaaggccgaaaatgctgaaggccagactcccgcaatcggaccagacggagagccactggacgagacctctcaaatgagtgatttgccagtgaaggtgatacacgtcgagagtgggaagatcctcaccggcaccgacgcgccaaaagctggacagctggaggcttggttggagatgaaccctgggtatgaggtggccccaagaagcgattctgaggaatccggcagtgaagaagaagaggaggaggaagaggaggagcaaccgcaagcagctcagccaccaaccctacccgttgaggaaaaaaaaaagatacccgacccagactctgacgacgtgtcagaggttgatgctcggcatattatcgagaatgctaagcaggatgtagacgatgagtatggcgtgtcacaagccttagcccgaggcctgcagtcctactacgccgtggcccacgccgtcactgagagggtggacaagcagtccgccctgatggtgaatggtgttctgaaacaatatcagatcaagggattagaatggcttgtctcgctatacaacaataatctgaatggcatcctggcagatgaaatggggctgggaaagacaattcagacgatcgcattgatcacatacttgatggagcacaagaggatcaatgggccatttctgatcatcgtgcccctgagtacactgagcaactgggcgtatgagttcgacaagtgggctcccagtgtggtcaaagtgtcatataaagggtcccccgctgctcgacgagcattcgtcccccagctccgctctgggaagtttaacgtcttgttaacgacttacgagtatattatcaaggacaagcacatactggccaagatacgctggaagtacatgatagtcgatgaggggcatagaatgaagaaccaccactgcaaactgactcaagtgctcaatactcactacgtggcaccaagacgactcctgctcaccggcacacctctacaaaacaaactgccagagctgtgggccctgctaaatttcctcctgcccacaattttcaagagctgctccacattcgagcagtggttcaacgcaccatttgcaatgactggcgaaaaggtagatctaaatgaggaagaaaccatcctgatcatcagacgcttacataaggtcctgaggcctttccttttgcgcagacttaagaaggaagtggaagcacagctgccagagaaggtcgagtacgtgattaaatgtgacatgtccgcattgcagagagttctttacagacacatgcaggccaaaggcgtgctgctcacagacggatccgagaaagataaaaaagggaagggaggtacaaagactctaatgaatacaattatgcagctcaggaaaatttgtaatcacccatatatgttccagcacattgaggagagtttcagcgaacacctcgggttcacgggcggtatcgtccagggactggatctgtaccgggcatccgggaaatttgagctgctggacagaatccttcctaaactcagagctaccaatcacaaggtgttgcttttctgccagatgacttcgttgatgaccatcatggaggattacttcgcttacagaggctttaagtatctgaggttggatggcaccaccaaggccgaggatagagggatgctacttaaaacgttcaacgagccagggagcgagtattttatcttcctgctcagcaccagagccggaggattgggattgaacctacaatctgccgacaccgtgatcatctttgactccgactggaatccccaccaagacttacaggctcaggatcgagcgcaccgcatcgggcagcagaatgaggtccgagttctacgcctctgcacagtgaattccgtcgaagagaagatcttggccgcagctaagtacaagctcaacgttgatcagaaagtcattcaggcaggaatgtttgatcagaagtccagcagccacgaacgacgagcctttctgcaagccatactagagcatgaggagcaagacgaggaggaggatgaggtcccagacgacgagaccgttaatcagatgatagcgcgacacgaagaggaattcgaccttttcatgcgcatggatctggataggcgccgtgaggaggccagaaatccaaaacgtaagccacgcctgatggaagaagacgagttgccgtcgtggataatcaaggacgatgccgaggtagaaagactgacatgcgaggaggaagaggagaaaatgttcggcagaggctcccgccatcgtaaggaagtagattactccgattccctaaccgaaaagcagtggctgaagacgctgaaggctatagaagaggggacactcgaggagattgaggaggaagtgcgccaaaaaaaatccagcaggaagagaaaaagagacagcgatgccggtagctccacacccactacatcaaccaggtcgagagacaaagacgacgaatccaagaagcaaaagaagagagggaggccccctgccgagaaactgtcccccaatccgccaaatctaacaaagaagatgaaaaaaattgtcgatgccgtcatcaagtataaggactcgtcaggacgccagctttcagaggtcttcattcagttgccctcccgcaaggagttgccagaatattacgaactgatcaggaagcccgtggatttcaagaagatcaaggaacgcatccgcaatcacaaatacagatctctgaacgatttggaaaaagatgtaatgctgctgtgtcaaaacgctcagacattcaacctggaaggaagcctaatttacgaggattcgatagtactgcagagtgtcttcactagcgttaggcagaagatagagaaggaagatgacagcgagggcgaggaatctgaagaagaagaggaaggggaggaggagggctccgagtccgaatctcgatctgttaaagtgaagatcaagttaggcagaaaggagaaggcccaggatcggctgaaaggaggacgcaggcgcccttcaagaggttctagggccaaaccagtcgtgagcgacgatgacagtgaagaagaacaagaagaggaccgatccggttcaggatctgaggaggattag

SEQ ID NO: 242966 - DNA, 4845 bp, synthetic construct
  misc_feature 1..4845: note = Description of Artificial Sequence: Synthetic coding sequence
  source 1..4845: mol_type = other DNA
atgagtacccccgatcccccactgggtggtacgcctcgacccggaccctcacccggacccggacccagccccggagccatgctgggaccatccccgggtcctagtccagggagtgcccatagcatgatggggccttccccgggacccccaagtgccggacaccctatcccaacacagggtcccggtggataccctcaggacaatatgcaccagatgcataagccaatggagagcatgcatgagaaggggatgtcagatgatccacgatacaaccagatgaagggaatggggatgcgcagtggtggccacgctgggatgggccctcctccatctcctatggaccaacacagtcagggataccccagtcccttggggggatccgagcacgcgtcttcacctgtgcccgcttctggtcccagctctggccctcagatgagtagcggtcctggaggagctccgctggacggggcagatccacaagcactgggccagcagaacaggggtccgacccccttcaatcagaaccagctgcaccaactccgagcccaaatcatggcctacaagatgctcgctagaggtcagcccctcccagatcacctccaaatggccgtgcaggggaaacggccaatgcccggaatgcagcaacagatgccgactttgccaccccctagcgtatctgccacaggccctggacccggacccggacctggaccaggcccaggtccaggcccagcccctcccaattactcaagaccccatggaatgggtggcccaaatatgcccccacccggaccttcgggagtcccccctggaatgcccggacagcccccaggcggacccccaaagccatggcccgaaggacctatggccaatgcggctgctccaacttctacaccacagaagttgatccctccacagccgactggacgtccgtcccctgcacccccagctgtgcctccagctgcatcccccgtcatgccaccccagactcagtcccccggacagccagcacagccagcaccaatggtgcctctacatcaaaagcagtcccggattacccctattcagaagccgaggggattggatcccgtcgagattctccaggagagggagtataggctccaagctaggattgcccacagaatccaagagctggagaatctccccggaagtctggccggtgacctgcgcaccaaagccacaatcgagctgaaagccttacggctgttgaactttcagaggcagctgcgccaggaggtggtagtctgtatgcgtagagacaccgctctggagacagccttaaatgctaaagcttataagcggagcaagcgccaaagccttcgagaagctcggattaccgagaagctcgagaagcagcaaaagattgagcaggaaaggaagcgcaggcagaagcatcaagaatacctgaacagtattctccaacacgccaaagatttcaaagagtatcacagatctgtaaccggcaaaattcagaaactgactaaggccgtggccacttatcacgccaatactgaaagagagcagaagaaggagaatgaacgtatcgaaaaggaacgcatgcgtcgtctcatggcagaggacgaggagggataccgcaaactcattgaccaaaaaaaagataaaaggctggcatacttactgcagcagacggacgagtacgtcgccaatctgacggagctcgttcgccagcataaagcagcacaggtggcgaaggaaaagaagaagaaaaaaaaaaagaaaaaggcagagaacgctgaaggacagacgcccgcaattgggcctgacggcgagcctttggacgaaaccagtcaaatgtccgacctgccggtcaaggtgatccacgtggagtccgggaagatactgactggtacagatgccccaaaggccggacaattggaagcctggcttgagatgaatcccggttacgaggtggcgcctaggtcagactctgaagaatctgggtcagaggaggaagaggaagaggaagaagaggagcagcctcaggcggctcaaccaccgacattgcccgtggaggagaaaaagaagatccccgacccggattctgacgatgttagcgaggtcgacgcaaggcatataatcgagaacgcgaaacaggacgttgacgatgaatatggggtgagccaggccctcgcaagagggcttcaatcatattatgcagtggctcatgccgtaacagaaagagtggataagcaatctgctcttatggtgaatggcgttctgaagcagtatcagatcaagggcctggagtggttggtgagcctgtataataataatcttaatggaatattggctgacgagatgggtctgggaaaaaccatccagaccatcgcactgatcacctacctgatggagcacaagcgaattaatgggccttttctcatcatcgtacccctgagcaccttatctaattgggcctatgagtttgacaagtgggcaccctcagtggtgaaggtcagttacaagggatctcccgctgccagaagagcattcgtgcctcagctgagatcaggcaagtttaatgtccttctcaccacctatgagtatattattaaggataaacacattctcgcgaaaatcagatggaaatacatgattgtggacgaaggacatcgcatgaaaaatcatcattgcaaattgacacaggtgctgaatactcattatgtcgcccctcgtcgccttctcctgaccggtacccctttgcagaacaagctgcctgagttatgggctctgttgaactttctgctgcccaccatttttaaatcctgcagcacctttgagcagtggtttaatgccccattcgccatgaccggcgaaaaggttgatcttaatgaagaggagaccattctaattattaggcgtctccacaaggtgctacggcctttcctcctgcggagacttaaaaaggaagtcgaggcccagttgcccgagaaagttgagtatgtgatcaagtgtgacatgagtgcccttcagagagttctgtatcggcatatgcaagccaagggagtgcttcttacagatgggtcagaaaaggacaagaaaggcaagggcggaacaaagacactgatgaacacgattatgcagctccgcaagatctgtaaccatccctacatgtttcagcatattgaagagtccttctctgagcatcttgggtttaccggcggaattgttcagggactcgacctttaccgggcttcaggcaaattcgagcttctcgataggatattacctaagctgagggcaaccaatcataaggtgctcttattctgccagatgacctcactgatgacaatcatggaggattatttcgcctacaggggcttcaagtatctgagattggacggtaccaccaaggctgaggacagagggatgctgctcaagactttcaacgaacctggctcggagtatttcatatttctcctaagcacccgcgctggcggtctgggtctcaatcttcagagcgccgatactgtgataatctttgacagtgattggaacccgcatcaagatctgcaagctcaggacagggcccacagaatcggccaacagaatgaagttcgggtgctgcgcttgtgtaccgtgaactctgttgaggaaaaaattctggcagccgcaaaatacaagctcaacgtggaccagaaagtgatccaggcaggcatgttcgaccagaaatcttcatcccatgaaagaagagcctttcttcaggctatcctagaacatgaagaacaggatgaggaggaagacgaggtgcccgacgatgaaaccgtcaatcagatgatcgcccgtcacgaagaggaattcgacctgtttatgcgcatggatctcgatagacggcgagaggaggctcgtaatcccaaacgcaagcctcggcttatggaagaggacgaactcccgtcttggattatcaaggatgacgccgaagtggagcgtttgacttgcgaagaggaagaggaaaagatgttcggacgcggaagtagacatcgcaaagaggtggattattccgatagtctgaccgagaaacagtggcttaaggcaattgaagagggaaccctggaggagatagaggaagaagttcgccagaaaaaaagctctagaaagcgaaaaagggattccgatgccggtagttccacaccgaccacatccaccaggagtcgtgataaggacgatgagtcaaaaaagcaaaaaaagcgcggtagaccccctgccgaaaagctgtcccccaatcctcccaacctgacaaagaagatgaaaaaaattgttgatgccgtcatcaaatataaagacagctcttcagggcgacagctctcagaagtattcatccagctccccagccggaaagagctgccggaatattacgagctgattagaaaacctgtggatttcaaaaagatcaaagagcggatccgaaatcataagtaccgaagcttgaatgatctggagaaagacgtgatgttactgtgccagaacgcccagaccttcaacctcgagggttccctaatctatgaggacagcatagttttgcaatcggtttttacctcagtcaggcagaagatcgagaaggaggatgactcagagggggaggagagcgaggaggaggaggaaggcgaggaagaaggcagcgagtccgagagccgcagcgtgaaggttaagatcaagctcggcaggaaggagaaggctcaggataggctgaaggggggacggaggagaccatcccgaggatctcgcgcaaagccagtggttagcgacgacgactccgaagaagaacaggaagaggatagatcaggctctggctctgaggaagattag

SEQ ID NO: 242967 - DNA, 3159 bp, synthetic construct
  misc_feature 1..3159: note = Description of Artificial Sequence: Synthetic coding sequence
  source 1..3159: mol_type = other DNA
atgagctccgccgcagaaccgcctcctcctcccccacccgagtctgcaccctcgaaaccggctgcctctatagcgtccggaggctcaaactccagcaataagggcggtcccgagggtgttgcagcccaggccgttgcctccgctgcctcagccggtcctgccgatgcagaaatggaagaaatctttgatgatgcgtcacctggaaagcagaaggagatccaggagcccgaccctacttacgaggagaagatgcagaccgaccgcgctaaccgattcgaatacctgttgaagcagacagaactcttcgcacacttcatacaacctgctgcacaaaaaacgcccacctctcccttaaagatgaagccaggcagacccagaattaagaaagatgagaagcaaaatctcctttctgtcggggactaccgccatcggaggacggaacaagaagaggacgaggaactgttgacagaatccagtaaggccacgaatgtctgcaccaggttcgaggatagcccgagctacgttaagtgggggaagttgcgtgattaccaggtacggggactgaattggctgatttccctttacgaaaacggcatcaacggcatactagctgatgaaatggggctgggcaaaacactccagactatttctctcctaggttatatgaaacactatcgcaatatacccggaccgcacatggtgcttgtgcctaagtctactcttcataactggatgtccgaatttaaacggtgggtccccacattgaggagcgtctgtctgatcggggataaagaacagagggccgcattcgtcagggacgttttactgcctggagagtgggacgtctgcgtgacatcttacgagatgttgatcaaagagaagtctgtttttaagaagttcaactggcgctacctcgtgattgacgaggcccaccgtataaagaatgagaaatctaaacttagtgagatagtgcgagaattcaagacaaccaaccggctcctcctgaccggcactcccctccagaataatctacacgagctttggtctttgctgaatttcctgctgcccgatgtatttaactcagctgacgacttcgatagttggttcgatacaaacaactgtctcggggaccagaagctcgtggaaaggctccacatggttcttcgcccttttcttctgagaagaataaaggctgacgtagagaagtctttgccacctaagaaggaggtaaagatttatgtgggcctgagcaaaatgcagcgtgagtggtacaccaggattctgatgaaggatattgatatccttaattccgctggaaagatggacaagatgaggctactcaacatcctgatgcaactgagaaagtgctgtaatcatccctacctgtttgacggggcagaacctgggccaccctacactacagacatgcacttagttacaaattcagggaaaatggtggtgctggacaaactgctccccaaattaaaagaacaagggagtagagtgctaattttttcccagatgacccgcgtgctggacatccttgaggactattgtatgtggagaaactacgagtattgtcgtcttgacgggcaaacccctcatgatgagcgccaagatagcatcaatgcgtacaacgaacccaacagcacaaagttcgtgttcatgcttagcacccgcgcaggtggtttgggtatcaacctagccactgcggacgtagtcatcctttatgactctgattggaaccctcaggttgatctgcaggcgatggaccgggcacatcggattggtcaaactaagacagtacgggtgttcaggttcatcacggacaacaccgttgaagagagaatcgtcgaacgcgcagagatgaagcttaggttggattccatcgtgatccagcaggggaggctggtggatcagaatctgaataagattgggaaagacgagatgctgcaaatgatccgtcacggggctacacatgtcttcgccagcaaggaatccgaaataacggacgaagatattgatggaatccttgagcggggagcgaaaaaaaccgcagaaatgaatgagaaactctctaagatgggcgagtctagcctgagaaactttacgatggacacggagtcatcggtttataactttgagggagaggattacagggaaaagcagaagatcgcgtttactgaatggatcgagccacctaagagggagcgtaaagcaaactacgccgtggacgcttacttccgagaagctctgcgcgtgtccgagccaaaagctcccaaagctccacgccctcctaaacagcctaacgtgcaggattttcaattctttccccctcgtttgtttgaactgttagaaaaggagatccttttctacaggaaaaccatcgggtataaggtccctcggaatcccgagctgccaaatgccgctcaggcgcaaaaggaagaacagctgaaaatagatgaggccgagtctctcaacgatgaagaactcgaagagaaagagaagctgctaacgcagggtttcacaaattggaataaacgggacttcaaccaattcattaaggcaaatgaaaagtggggacgagacgatatcgagaacatcgctcgggaagtagaagggaaaacaccagaggaagtcatcgagtacagtgcagtgttctgggagcggtgtaacgaactccaggacattgagaagatcatggctcaaatcgaacgcggagaggcacgcatacagcgacggatcagtatcaaaaaggcattggacactaagataggccgatacaaagcaccctttcaccagctgagaatctcatatggaacaaacaaaggcaagaactacacagaggaagaagaccgcttcctgatttgcatgctccacaaactgggctttgataaagaaaacgtgtatgacgaattgaggcagtgtattcggaattcacctcagttcaggttcgattggttcctcaaaagccggacggctatggagcttcaacggaggtgcaataccctgatcacactgattgaacgggagaacatggaactcgaggaaaaagaaaaagctgagaagaagaagcgtgggccaaaaccctcaactcaaaagagaaaaatggacggagcacctgacgggaggggtcgaaaaaaaaaattgaagctctag

SEQ ID NO: 242968 - DNA, 2988 bp, synthetic construct
  misc_feature 1..2988: note = Description of Artificial Sequence: Synthetic coding sequence
  source 1..2988: mol_type = other DNA
atggaggagattttcgatgacgcctcccccggaaaacagaaggagattcaggaacctgatcccacctatgaggaaaagatgcagacagatagagctaatcggttcgagtacctgttgaagcagacagagctattcgctcatttcatccaacccgctgcccagaagacccccacatcccccctgaaaatgaaaccaggcaggcctcgaatcaagaaagacgagaagcaaaaccttctgtccgtcggtgactatcgacacaggagaaccgagcaagaagaagatgaagaactgctcactgaaagctcgaaagctacaaatgtttgcacgcggttcgaggattccccgagttacgtgaagtgggggaaactgcgcgactaccaggtgaggggccttaactggttgatctcactctacgagaatggcataaatggcatactcgccgatgaaatggggctggggaagacactgcagactattagcctgctgggatacatgaagcattaccgcaacattcccggtcctcatatggtcctcgtgcccaagagcactttgcacaactggatgtccgagttcaaaaggtgggttcccacactaagatctgtctgcctgataggcgacaaggagcaaagagccgcattcgtccgcgacgtcttactgccaggggagtgggatgtttgcgtcactagttatgaaatgctgataaaggaaaaaagtgtttttaagaagttcaattggcgatacttggtgatcgacgaagctcaccgaatcaagaatgaaaagtctaaactgtccgagatcgtgcgcgaattcaaaacaactaaccggttgctacttaccggaacccctctgcagaacaatcttcacgagctgtggtccttgctgaattttctcctccccgacgtgttcaatagcgccgacgacttcgacagctggttcgacacaaataactgtctgggtgatcaaaaactggtcgagcggctccatatggtcttgcgccctttcctcctccgcagaataaaggccgacgtggagaagtccctcccgccaaaaaaagaagtgaagatttacgtggggctttcaaaaatgcagcgagaatggtatacaagaatcctgatgaaggatatcgatatccttaactccgccggtaaaatggataagatgcgcctgctgaatatccttatgcaactacgcaaatgttgtaatcacccctatttatttgacggcgctgaacctggcccaccatatacaacagacatgcacctggtgaccaattccggcaaaatggtggtgctcgacaaactgttgcccaaactgaaggagcaggggagtagagtacttattttttctcagatgacaagggtgcttgacatcctggaggactattgtatgtggcggaactacgaatactgcagacttgatggacagaccccccacgacgaaaggcaggattccatcaacgcgtataatgagcctaattctactaagtttgtgttcatgttgtctacgagagccggagggctcggcatcaatttagccaccgcggatgttgtgatcctctatgactctgactggaatccacaggtagatttgcaagccatggaccgagcgcaccggatcggccaaactaagacggtgcgggtcttcaggtttattacagacaatacagtagaagagagaatcgtggagagagccgagatgaaactccggctagactcaatagtaatccagcaggggagattggtagaccagaaccttaacaaaatcgggaaggatgaaatgctacagatgatcaggcacggtgccacacacgtctttgcctcgaaggaaagcgagatcaccgacgaggacattgatggtattttggagcgcggagcgaagaagaccgcggagatgaatgagaaactgtcaaaaatgggtgagtcatctttgcgcaatttcacaatggacactgagagcagcgtttataacttcgagggggaggattatagggagaagcaaaagatcgcttttaccgaatggatcgagcctccaaaacgcgagcgtaaagccaactatgccgtggatgcgtatttccgggaggccctacgggtttccgagcccaaggcccctaaggccccacgtccccctaaacagcccaacgtgcaagatttccaatttttcccacctagattattcgagctgttggagaaggaaatccttttctaccggaagactatcgggtacaaggtccccaggaaccctgaactaccgaacgccgcacaggcccagaaagaagaacagctaaagatagacgaagccgagtctctcaacgacgaggaactggaagagaaggaaaaactcctcacacaaggatttacaaattggaacaagcgggacttcaatcagtttatcaaggctaatgagaagtggggcagagacgacatcgagaacatagccagagaagtcgagggaaagaccccagaagaggtgatcgagtacagtgcggtcttttgggaacgatgtaacgagttgcaggacattgaaaagattatggctcagattgagagaggggaagccaggatccagcgaaggatttcaattaagaaggctcttgatacaaaaattggacgctacaaagccccatttcaccagctcagaatctcctacggaaccaacaaaggcaagaattacaccgaagaagaggaccgcttcctcatttgtatgctgcacaagttagggtttgataaagagaacgtgtatgatgagcttagacagtgtattcggaatagcccacagttcagatttgactggtttctgaagagtcgcaccgccatggaacttcagaggcggtgcaacaccttgattaccttgatcgaaagggaaaacatggaactagaagagaaagagaaggccgagaaaaaaaagagagggcctaagccgtcaactcagaaacgcaaaatggacggcgcacccgatggaagggggagaaaaaaaaagctcaaactctag

SEQ ID NO: 242969 - DNA, 2988 bp, synthetic construct
  misc_feature 1..2988: note = Description of Artificial Sequence: Synthetic coding sequence
  source 1..2988: mol_type = other DNA
atggaagagatatttgacgatgcttcaccaggtaaacagaaggaaatccaggaaccagacccgacttatgaagaaaagatgcagacagacagggcaaatagatttgaatatctcctgaaacagacggaattgttcgcccatttcatacaacctgccgcacaaaagacccctacgtccccgctgaagatgaaacctggacgcccaaggatcaaaaaggacgagaagcagaacctcttgtccgtgggggattaccggcaccgcaggactgagcaagaggaagatgaggaactactgaccgaatccagtaaagcaaccaatgtatgtacccgtttcgaggacagcccctcctatgtcaagtggggcaaactgcgcgactatcaagtccgcggacttaattggcttatctccttatatgagaatggaataaatgggatcctggcagatgaaatgggcctgggtaagaccctgcagaccatatctctgttagggtacatgaagcattatagaaatatccctggccctcatatggtactggttccgaaatccacactgcacaattggatgtctgagttcaaaaggtgggtgccaaccctgagatctgtatgcctgattggcgataaggagcaacgggctgcctttgttagggacgtcctcctgcccggagagtgggacgtttgtgtcaccagctacgaaatgctgattaaggagaaaagtgtcttcaagaagttcaactggcgatacctggtgattgatgaagctcacagaattaaaaatgagaagagcaagctatctgaaatagtgcgggagttcaagacaaccaaccgccttctattaactggaaccccactacagaataatctgcatgagctttggagcctcctgaattttctgcttccagatgtattcaactccgctgacgattttgattcttggtttgatacaaacaattgtctgggggaccagaagctggtcgagcgattacacatggtcctgaggccctttcttctgcgtagaattaaagcggacgttgaaaagtcgctgcctcccaagaaggaggtaaagatctacgtggggctaagcaagatgcaacgggaatggtacacgaggatccttatgaaggatatcgacattctcaattcagcaggtaagatggacaagatgcgcctgctgaacatattaatgcaacttcggaagtgttgcaatcacccctacctgtttgatggggctgaacccggacccccttataccacagacatgcacctcgtgaccaactccggaaagatggtggtcttggacaaattgctgcccaagctgaaggaacaggggagtcgggtactgatttttagccaaatgacccgagtgctcgacatccttgaggattattgcatgtggagaaactacgagtattgtaggttagacggccagaccccacacgatgagagacaagattccataaatgcctacaatgagcctaacagcaccaaattcgtctttatgctgtctacaagggccggtggccttgggatcaatcttgcaactgcagatgtggttattctgtacgatagcgattggaacccccaggtggacttacaggccatggaccgggctcaccgtatcggacagaccaaaaccgtaagggtatttcggtttattaccgacaacacggtcgaagagaggatcgttgagcgtgcagagatgaaacttaggctagacagtattgtgatccagcaaggccgactcgtggaccagaacctgaacaagataggaaaggatgaaatgcttcagatgatccgccacggcgcaacacatgttttcgcgtcaaaggagtccgagattactgacgaggacatagatggaattcttgagcggggtgccaaaaaaacggcagagatgaacgagaagctgagcaagatgggagagtctagtctgaggaacttcacaatggatacagagagtagcgtgtacaattttgagggtgaggattaccgggagaaacagaaaatcgccttcaccgaatggatcgagcctccgaagagggagaggaaagctaattacgctgtcgacgcctactttcgggaggccctgcgggtgtctgaaccaaaagccccaaaggcccctcgtccccctaagcagccgaatgttcaggactttcagttctttccacctcggctgttcgaacttctggaaaaggagatccttttctatagaaaaaccatcggatataaagtgcctcgcaaccccgagttgccaaatgctgcccaggctcagaaggaggagcagttgaaaatcgatgaggcagagtctctgaatgacgaggaacttgaagaaaaggagaagctgctgacacaggggttcactaattggaacaagcgcgactttaaccagtttatcaaagcaaacgagaagtggggtagggacgacatcgagaacatagcccgagaggtggaaggtaagacgccagaggaagttatcgagtactcagctgtgttttgggagagatgtaacgaactgcaagacatagagaaaataatggctcaaatcgagcggggtgaggctaggatacaaagacgaattagtatcaagaaagctttagacaccaagataggaagatataaggcgcctttccaccagcttaggatctcctacgggacgaacaaaggaaaaaattataccgaagaggaagaccgatttctaatctgtatgttacacaagcttgggttcgacaaagagaatgtatacgatgagctgaggcagtgcatccgtaatagcccccagttcagattcgattggtttttgaaatcacggactgccatggaattgcagcgcagatgcaatacattaattaccctcatcgagagagaaaacatggagttggaagaaaaggagaaagctgagaagaaaaagagaggcccaaagccaagcacccaaaaacggaagatggacggggctcctgacggtaggggccgaaaaaagaagctgaagctctag

SEQ ID NO: 242970 - DNA, 2865 bp, synthetic construct
  misc_feature 1..2865: note = Description of Artificial Sequence: Synthetic coding sequence
  source 1..2865: mol_type = other DNA
atgagcctgcccctaaccgaagaacagagaaagaagattgaagagaacagacagaaggcattagctaggagggccgaaaaactgctcgctgaacaacatcagcgaacttcttcggggacgagcattgccggtaatcctttccaagccaagcagggaccctcgcaaaacttccctagagagtcatgcaagcctgtgagtcacggcgtgatctttaaacagcagaatctctcgagctcctcaaatgccgatcagaggccacacgatagtcacagtttccaggctaagggcatttggaaaaagcccgaagaaatgcctactgcctgccctgggcacagcccgcgatcgcagatggctcttacggggatcagcccccctctggcacagtcaccgcctgaggttcccaagcagcagctcctaagctatgaattgggtcaaggccacgcccaggcgagccctgagattcggtttacaccatttgccaatcccactcataagcctctggctaagccgaagtcatctcaggagaccccggcacacagctcgggtcagcctccaagggatgccaagttggaggctaagactgccaaagcttccccatctggacaaaacatctcatatatccactcatcctctgagtctgtgaccccccgtaccgagggaaggctgcaacagaaatccgggtcatctgtgcagaagggagtcaactcccagaaaggtaagtgtgtcagaaacggcgaccggtttcaggtgctgatcgggtataatgctgagctcatcgctgtatttaagaccctacctagcaaaaattacgaccctgataccaaaacctggaattttagcatgaacgactactcagcgctcatgaaagcagctcagagcttgcccaccgtgaacctgcagccattggaatgggcctacgggtctagcgaaagcccatctacctcgtctgaaggacaggcagggttaccatcagcaccatcactgagttttgtgaagggaagatgtatgttgatatcccgcgcatactttgaggccgatatcagttattcgcaggacctgatcgccctgttcaagcaaatggattcaagacgctacgacgtgaaaaccaggaagtggagcttcttactcgaggagcattccaaactgatcgccaaagttagatgcctgccccaagtgcagctcgatcctctacccacaaccctaactctggcatttgcctcccagctgaagaagaccagcctctccctgactccagacgtgccggaggcagacctgtcagaggtcgaccccaaattggtatcaaacttgatgcccttccagagagccggagtcaatttcgctattgctaagggcggtaggttgcttttggctgatgatatggggctcggcaaaactattcaagcgatatgcattgctgccttctacagaaaggagtggccgctgctcgtggtggttccatcaagtgtccgatttacatgggagcaggcatttctgcgatggctaccctccctcagccccgattgcatcaatgttgtggttacaggaaaggacagattgactgctggccttatcaatattgtttcatttgacctgctaagcaagttggagaagcaactgaagactcctttcaaggtcgttattatcgatgaatctcattttttgaagaattcccggaccgcaagatgtcgagcagctatgcccgtgctcaaggtagctaagcgagtgatactgctgtccggtacccccgcaatgagtcgaccagccgaactgtacacgcaaattattgcagtcaaacccacattttttccacagtttcatgccttcgggttgagatattgcgacgccaagcgcatgccttggggctgggattattctggctcatccaacttaggggaactgaaattgcttctggaagaggcagtgatgctgaggaggctcaagtcagatgttctctcccagctgccagcaaagcagaggaagatcgtcgttatcgcacccggtcgcattaatgccagaactagggccgctctcgatgcagcagctaaggagatgaccacaaaagataagactaaacagcagcagaaggacgctctaatcttgttttttaatagaactgccgaagcaaagatccctagtgtgattgagtacatcctggacctgttagaatctggtagggaaaaattcctggttttcgcccatcataaagtggtcttagatgctatcacacaggagcttgaacgaaaacacgttcagcacatcagaatcgatggttccacttcttcagccgagcgcgaggatctgtgccaacaattccagctgtcagagcgtcacgctgtagccgtactatctattaccgcagcaaacatgggtctcacctttagcagcgcagatctcgtggtgttcgcggaactgttttggaacccgggtgtgctgattcaggccgaggatagagtccaccgcattggccaaacatcatcagtaggcatacactacctggtggcgaaaggcactgcagacgattatttatggcctctgattcaagagaagatcaaggtccttgctgaggccggtctgtccgagaccaatttcagtgaaatgacagagtccaccgattatctttataaagaccctaaacagcagaaaatctacgatctttttcaaaagagttttgagaaggaagggtccgacatggagttgctggaggcagctgagagtttcgaccccggttccgcttccggaactagtggtagctcctcacagaatatgggcgacacgctagacgagtcttctctcaccgccagcccacaaaagaaaagaaggttcgaatttttcgacaattgggattccttcacaagcccgctgtag

SEQ ID NO: 242971 - DNA, 2865 bp, synthetic construct
  misc_feature 1..2865: note = Description of Artificial Sequence: Synthetic coding sequence
  source 1..2865: mol_type = other DNA
atgtctctgcccctgacagaggagcagagaaagaagatagaggagaaccggcagaaggccctcgccaggagggccgaaaagttgctcgccgaacagcaccagcgaacttccagcggaacttccatcgccggaaacccttttcaagcaaaacaggggccatcccaaaacttccctcgggagtcatgcaaacccgtgtctcatggcgtaatctttaagcagcaaaatctgagctcatcatctaacgcagatcagaggccacacgactcccactcatttcaagctaagggaatttggaaaaaacctgaggaaatgcccaccgcttgtcccggacatagcccgagatcccagatggctctaacaggtatatctccccctctggcgcagtcccctccggaagtgcccaaacagcagttgctgagctacgagttgggacagggccacgcacaggcttcaccagagattcgcttcaccccttttgcgaaccccacccacaagcctttggccaaaccgaaatccagccaagaaacacccgctcactctagcggccagcccccacgggacgccaagctcgaggccaaaaccgcaaaggccagtccttccggacagaacatttcttacatacacagctcgagtgaaagtgttacccccaggacagagggcagactccagcaaaaaagcgggtcctctgtacagaaaggagtgaacagccagaaaggcaaatgtgttagaaacggagacagattccaggtgttgattggttataacgctgagctgatagccgttttcaaaaccttgccgtccaagaattatgaccccgacaccaaaacctggaatttcagtatgaacgattacagcgcacttatgaaagctgcgcagtctcttcccactgtgaacctgcagcctctggaatgggcttatgggagttccgagagccccagcacaagcagcgaaggccaagcagggttgccaagtgctccgtccctgtccttcgtcaagggcaggtgcatgctgatcagccgggcatacttcgaggcggatatctcctatagccaagacctgatcgcgttatttaagcagatggattcaaggaggtatgacgttaagactaggaaatggagctttctgctcgaggagcattccaagttgattgctaaggttaggtgccttcctcaggttcagctggacccactgccaacgacactcaccctggccttcgcctctcagttaaagaagacctccctttctctgacccctgatgtcccagaagcagacctctccgaagtggacccaaagcttgtgtccaacctaatgccatttcagcgcgctggagtgaatttcgccatcgcaaaaggtggcaggcttttgctcgctgacgacatgggcctcggcaagacgatccaggcaatctgtatcgctgctttctatagaaaggagtggcctcttcttgtggtggtgccctcctctgtgcggttcacctgggaacaggcgtttctccggtggctgccctccctgtcaccagactgtataaatgtcgtcgtaactggcaaagacagactgactgctggattaatcaatatcgtgagttttgatcttctctctaagctcgagaagcagcttaagactccattcaaggtagtgatcattgacgagagccacttcttgaagaattcccgcaccgctagatgtagggctgctatgcccgtgttgaaggtcgccaaaagggtcattctcttgtctggaacacccgctatgagtcggcctgcagaactctacacccagataatcgctgttaagcccaccttcttcccccagttccacgctttcggtttaaggtattgtgacgcaaaaagaatgccttgggggtgggattattctggtagcagcaatctgggagagctgaaactcttactagaagaggctgtcatgctaagaaggctgaaaagtgacgtgcttagtcaactgcctgctaagcagcggaagattgtcgttatagcaccaggacgcatcaatgccagaacacgggcagctttggatgctgccgctaaagagatgacaacaaaagacaagacaaagcagcagcagaaggatgcgttgattctttttttcaacaggacggctgaagccaagatcccatccgtgatcgagtacatcctcgatctgctggagtcggggagagaaaagttcttggtcttcgcccatcataaggtagtcctggacgcaataacgcaggagctagaacgtaagcacgtccagcacatccgaattgacggttcaaccagctccgccgaaagagaagacctgtgtcagcaattccaactgagcgagagacatgctgttgccgtcttgtcaatcaccgccgctaatatgggattaaccttttcctcagcagatctcgtcgtatttgccgaacttttctggaaccctggcgttctgatccaggctgaagaccgggtgcaccgaataggacagacgtcatccgtgggcatccactacctggtggccaagggcactgccgacgactatctgtggccactgattcaggagaagattaaagtcctggctgaggcaggattgtccgaaacaaatttcagcgaaatgactgaatccacagattatctgtacaaggatcctaagcagcaaaagatatacgacctgttccagaagagcttcgagaaggagggatctgacatggagctcctggaggccgcagaatcctttgatcctggaagcgcatccggaactagtggaagctcgtcgcagaatatgggcgacacgttggatgaaagtagcctgacggcttccccacagaagaaaaggaggtttgagtttttcgataattgggatagttttacttctccgctatag

SEQ ID NO: 242972 - DNA, 60 bp, synthetic construct
  misc_feature 1..60: note = Description of Artificial Sequence: Synthetic coding sequence
  source 1..60: mol_type = other DNA
atgagcctgcccctcacagaggaacagagaaaaaagatagaagaaaacagacagaagtag

SEQ ID NO: 242973 - DNA, 441 bp, synthetic construct
  misc_feature 1..441: note = Description of Artificial Sequence: Synthetic coding sequence
  source 1..441: mol_type = other DNA
atgtctttgcccctcaccgaagagcagaggaagaagatcgaagagaatcgacaaaaagcacttgccaggcgggcagagaaattgctggcagaacagcatcaacggacatcttcaggaacatccatagccggaaatccgtttcaggctaaacagggcccaagtcagaattttcccagggaatcttgtaagcccgtgtcacatggggttatatttaaacagcagaatcttagttcttcctccaacgccgatcagcgtccacacgatagtcactcattccaggctaaggggatctggaaaaagcccgaggagatgcccaccgcttgtccaggtcactctccccgttcccagatggcccttacagggatctctcctcctctcgcacaatctccaccagaggtgccaaagcagcagcttctgagctacgagctgggacagggatag

SEQ ID NO: 242974 - DNA, 279 bp, synthetic construct
  misc_feature 1..279: note = Description of Artificial Sequence: Synthetic coding sequence
  source 1..279: mol_type = other DNA
atgagcttgcccttgacagaagagcaacggaaaaagattgaggaaaatagacagaaagctttagccaggagggctgaaaaactcctcgccgaacagcaccagcgcactagcagcgggaccagcattgccggaaatccgttccaggctaagcaaggaccaagccaaaacttccctcgcgagagctgtaaaccagtttctcacggcgtgatcttcaaacagcaaaacttaagctcctcctccaatgccgaccaacgccctcatgacagtcactccttctag

SEQ ID NO: 242975 - DNA, 393 bp, synthetic construct
  misc_feature 1..393: note = Description of Artificial Sequence: Synthetic coding sequence
  source 1..393: mol_type = other DNA
atgtctctcccgctcacagaggagcaaaggaagaagattgaggagaataggcagaaagccctcgccaggcgggctgagaaacttttggcagaacagcaccagcgaacttcttctggcaccagcatcgccggaaacccgttccaagcaaaacaaggaccgagccagaatttccctcgtgagtcttgcaaaccagtttcccacggggtgattttcaaacagcagaacctgtccagcagctcaaacgcagaccaacgccctcatgattctcattctttccaggccaagggcatctggaaaaagccagaggagatgcctacggcctgtcctggccacagtccacggagccaaatggccctgacgggaataagcccacctctggcccaatccccctag

SEQ ID NO: 242976 - DNA, 3318 bp, synthetic construct
  misc_feature 1..3318: note = Description of Artificial Sequence: Synthetic coding sequence
  source 1..3318: mol_type = other DNA
atggcagcagcagcaggaggaggaggccctggaactgcagtcggagccacgggaagtggtattgcagcagcagctgccggactggccgtatacagacgaaaggatggcggtcccgcaaccaagttctgggagtctccggagacagtctctcaactggacagtgtgcgtgtgtggctcggaaagcattataaaaagtacgtacacgcggacgcccctactaataaaacattagcagggctcgtggtgcagttgttgcagttccaggaagatgcgtttgggaagcatgtgacgaacccagctttcaccaaattgccagctaagtgcttcatggattttaaagccggaggagcgctttgtcatatcctcggagcagcctataaatacaaaaacgagcaggggtggcggagattcgacctccagaatccttcccgtatggaccgtaatgtggagatgtttatgaacattgaaaagacccttgtgcagaacaattgtctgacgcgcccaaatatctatctgatcccagacatcgacttgaagcttgccaacaagctaaaagacatcattaaacgccaccagggtaccttcaccgacgaaaaatcaaaggcctcccatcatatttacccctactcctctagtcaggacgacgaggaatggcttagacctgttatgaggaaggagaagcaggtactggtgcactgggggttttacccagacagctacgacacgtgggtccatagcaatgacgtggatgcagaaatagaagatccgcctatccctgaaaaaccctggaaagtccacgtgaaatggatcctggatacagatatctttaacgagtggatgaacgaggaggattacgaagttgatgaaaatagaaagccagtgtcctttaggcagaggatttcaacaaagaatgaggagcccgtgcgatcccctgagcgtcgcgataggaaggcctccgctaatgcaaggaagcgcaagcatagccctagtccaccaccgcctacacctactgaatcacgcaagaagtctggcaagaaagggcaggcctcactctacggaaaaagacggagccagaaggaagaagatgaacaagaggatttaaccaaggatatggaagatcccacccctgttcccaatattgaagaagtagttctccccaaaaacgtcaatcttaaaaaggattccgagaacactcccgtgaagggcggaaccgtggctgacctggacgagcaagatgaagagacggtgacggccggaggcaaagaagatgaagacccggctaaaggcgaccagagtcgctctgtcgacctgggagaagacaatgtcacggagcaaacaaatcatatcatcatcccttcatatgctagctggttcgattataattgcatccacgtcatcgagagacgggcactaccagagttctttaacggaaagaataagagtaagacgcctgagatctatctcgcatacagaaattttatgatcgacacctatcggctgaacccccaggaatacctgacatcaaccgcatgcagaagaaacctcaccggtgacgtgtgtgctgttatgcgggtccacgctttcctagagcagtggggccttgtcaattaccaggtggaccccgagagccggccaatggcgatgggcccaccacccactccacactttaatgtcctcgcagacacaccttcaggactggttcccttacacctccgctctcctcaggtgcccgctgcccaacagatgcttaacttccctgagaagaacaaggaaaaacctgtcgacttgcagaatttcggactgcgaacggatatttactcaaaaaagacgttggctaaaagtaagggagcgagcgccggtagggagtggactgagcaagagactctgctacttttagaggccctcgagatgtacaaagacgactggaataaagtgtctgagcacgtgggatcgaggacacaagacgagtgtattctgcacttcctgaggcttccaatcgaagatccgtacctggagaacagcgacgcttcactggggcctctggcatatcagccggttcccttttcacagagcggcaatccagttatgagcaccgttgcgtttctcgcttctgtggtggaccctcgagttgcatcagccgcagctaaggcagcactcgaggaattttcacgggtgcgcgaggaggtccctttggagcttgtggaggcgcacgtgaaaaaggttcaggaggctgccagggcctcgggcaaggtcgatcccacctacggcttagagtctagttgtatcgcgggtaccggccctgatgaacctgaaaagctggagggcgcagaagaagagaaaatggaagccgaccccgacggacaacaacctgaaaaggctgaaaacaaggtggagaacgaaactgatgagggagacaaagcacaggatggagagaatgaaaaaaatagcgaaaaagagcaggactcggaagtgagcgaagacaccaagtccgaggaaaaagagacagaggagaataaggagctgaccgacacatgcaaagaacgtgaatcggacactggcaagaagaaagtggagcatgaaatatctgaggggaacgtggccacagccgcagccgctgctcttgctagtgcagctaccaaagctaaacatctcgctgcagtggaagagcgcaagattaagagcctcgtcgcccttctggtggagacacagatgaaaaaattggaaataaaactgcgacacttcgaagagctggaaaccatcatggaccgggagaaggaagccttagagcagcagcggcagcagctcttaacggagcggcagaatttccatatggagcagctgaagtacgccgagctcagggcccgacagcagatggaacagcagcagcacgggcagaatccacagcaagcacaccaacatagcggtggtcctggcctagctccgcttggagccgcagggcacccagggatgatgccacatcagcagcctcccccttatccactgatgcaccatcagatgcccccaccacacccaccgcagccaggacagatccccggacctggcagcatgatgcccggtcagcacatgccgggaaggatgatcccaacagtggccgcaaacatccacccatcgggatccgggcctacgccacccggtatgccaccaatgcctggtaacatccttggacctcgagtgccactgaccgcacccaacggcatgtacccacctccccctcaacagcagcccccacctcccccacctgcggatggcgtacccccacccccagctccaggacctccagcttcagcagcaccttag

SEQ ID NO: 242977 - DNA, 3645 bp, synthetic construct
  misc_feature 1..3645: note = Description of Artificial Sequence: Synthetic coding sequence
  source 1..3645: mol_type = other DNA
atggccgtgaggaagaaggatgggggaccgaatgttaaatactacgaagctgccgacacagtcacccagtttgacaacgtccggctctggctgggcaaaaactataagaagtatattcaggccgaacccccaactaacaaatcactatcaagcctcgtggtccagcttctgcaattccaggaagaagtgtttggcaagcacgtgtctaatgctccccttacaaagctacccatcaaatgttttctagacttcaaggccggaggctcattgtgccatatcctggccgcagcatataaattcaaatccgaccagggttggcgacggtacgatttccagaacccctcccgcatggaccggaatgtcgagatgtttatgacaatcgaaaaatcactggtgcagaacaactgtctttcacgacctaatatctttttgtgccccgaaattgagcccaaactgctgggcaagttaaaggacatcatcaagcgacaccagggcactgtgaccgaagacaagaacaacgccagccacgtggtttaccccgtgccgggaaacctcgaagaggaggaatgggtccgtccggtaatgaaaagagataagcaggtgctgctgcactggggatattaccctgacagttatgatacctggatccccgcttctgagattgaagcctccgtcgaggacgccccaacacctgagaaaccgcgtaaggtgcatgccaagtggatcctagacacagacactttcaatgaatggatgaacgaagaggactacgaagtaaacgatgataaaaaccctgtgtcacgccgtaagaagataagtgcgaaaacgcttacagacgaagtcaactctccagatagtgataggcgtgacaaaaaagggggtaattacaagaagcggaagagatcgccatctccaagtcctactcccgaggccaagaagaagaacgcgaaaaagggtccctctaccccttacaccaaaagtaagcggggacaccgcgaggaagaacaagaagaccttaccaaggatatggatgagccgtcaccagtcccgaacgtggaagaagttactctgcccaagacagtcaacaccaaaaaggactctgagtccgcccctgtgaaggggggaaccatgacagatctggacgaacaggaagacgaatccatggagactacgggcaaggacgaggatgaaaactcgacggggaataagggcgaacagaccaagaatcctgatctccacgaagataatgtgactgaacagactcaccacattataattccgtcatacgcggcttggttcgattacaattccgttcacgccattgagcggcgtgccctccccgagttctttaacgggaagaacaagtccaaaacacctgagatttatctggcgtaccggaatttcatgattgacacataccgcttgaatcctcaggagtacctgacatcgactgcgtgtcgcaggaacctggccggagacgtttgtgccatcatgagggtgcacgccttcctcgaacagtggggactgatcaactatcaagtggacgcagagtctcggcctactcctatgggccctcctcccaccagccattttcatgtactggcagacaccccctcagggctcgtccccctgcaaccaaaaaccccccagcaaacatccgcgtctcagcaaatgctcaacttccctgacaaaggaaaagagaagccaactgacatgcaaaactttggactgcgcacggacatgtatacaaagaagaacgtgcccagcaaaagtaaagcagctgcctcagctacccgggagtggactgaacaagagaccctcctcctattagaagccctcgagatgtacaaggatgactggaacaaagtctcagagcacgtggggagtcgaacccaggacgaatgcatattacactttctgcggctgcccatcgaagatccttatcttgaagattccgaggctagtctgggtccactggcttatcaaccaatccccttttcccagtccggcaaccccgtgatgagtacagtggcttttcttgcaagcgtcgtcgatcctagggtagcgagcgctgcagcaaagtccgcactggaagaattcagcaaaatgaaagaagaggtgcccacagcgttagtggaagcccatgtacgaaaggtggaagaagccgctaaagttaccggcaaggctgaccctgcttttggtttagagtcttccggcatcgccggtaccacaagcgacgagcccgaacgtattgaagaatcggggaatgacgaggcaagggtcgaagggcaggccacagacgagaagaaagaaccaaaagaacccagagagggaggcggagccattgaagaagaggctaaagaaaaaacctcggaggctccaaaaaaagatgaggaaaaaggcaaggagggggactccgaaaaggagagcgaaaaaagcgacggcgatccaatcgtggatcccgaaaaggaaaaagagcctaaagagggccaggaggaggtgctgaaggaagttgtggagagtgaaggtgagcgcaagaccaaggttgaacgggatattggagaggggaatctcagcacggccgctgccgctgctcttgccgctgcagcggtgaaggcgaaacacctggcggctgtggaggaaagaaaaataaaatctctcgtcgcccttcttgtcgaaacacaaatgaagaaattggagataaaattaaggcatttcgaggagctggagacaatcatggacagggagcgcgaagctctggagtatcagcggcagcagttgctggctgaccgtcaggccttccatatggagcagttaaaatatgccgagatgcgggcacggcagcaacattttcagcagatgcaccagcaacagcagcagcccccacccgctctgccgccaggcagccaacctataccccctactggagcggcaggaccccctgcagttcacggcctggcagtcgctcccgcaagcgtggtccccgctcctgcaggcagcggagctccaccgggatcactgggcccatctgaacaaatcggtcaggcgggttctacagctggcccacagcagcagcaacctgctggcgctcctcaacctggtgccgtaccgcctggcgttccgccacctggtccacacggcccatctccattccccaatcagcaaacacccccaagtatgatgccaggagctgtgcctggtagcggacatcctggggtggcaggcaatgcacccctggggctgccattcggcatgcctcctccccctccacctccggcacctagcattatccccttcggctctttagctgattccatctcaatcaaccttcctgcccctcctaatctacacggccaccaccaccacctccccttcgcccctggtacactcccgcctccaaacctcccagtgtccatggctaatcccctgcatcccaacttgcctgccactaccaccatgccgtcttctctccctctcggccctggactgggctccgccgcagcccaaagtccagctattgttgccgctgttcaggggaatcttcttccctcagccagccccctgccagaccctggcacccctcttccccctgaccccacagccccttccccaggtaccgtcaccccagtgcctccaccccagtag

SEQ ID NO: 242978 - DNA, 3393 bp, synthetic construct
  misc_feature 1..3393: note = Description of Artificial Sequence: Synthetic coding sequence
  source 1..3393: mol_type = other DNA
atggctgtccggaagaaagatgggggtcccaatgtgaagtattacgaggccgctgacacggttacacagttcgacaacgtaagactctggctgggaaaaaattacaaaaaatacattcaggcggagccccctacaaataagagtctgtcttccctggttgttcaactgttgcaatttcaggaggaagtgtttggaaagcacgtgtccaacgcccctctgaccaaacttcccatcaaatgttttctagattttaaggcgggtggctccttgtgccatatcctggccgctgcctataaattcaaatccgatcaggggtggagacgctacgatttccagaatccatctcgcatggatcggaacgttgagatgtttatgacaattgaaaaatcattagtgcaaaataactgtctctctaggccaaatatttttctgtgccccgaaatcgaacccaagcttctcgggaagttaaaagatatcattaaacggcaccaaggcacagttactgaagataagaacaatgcatcacacgtcgtgtaccctgtccccggaaacctcgaagaagaagaatgggtgagacccgtcatgaaaagggacaagcaggtactgctccactggggctattaccccgatagttacgacacatggattccagccagcgagatcgaggcctccgtcgaagatgcccctacaccagagaagcctaggaaggtgcacgcaaagtggattctggatactgatacgtttaatgagtggatgaacgaagaggattatgaggtcaacgacgacaagaatccggtgagtaggaggaagaagataagtgcgaaaactttgactgatgaggtgaattcacccgactccgatcgcagagacaagaagggaggcaactataagaagcgcaaacgcagcccgtctcctagtccgacccccgaggcaaaaaagaaaaatgctaaaaagggcccttcgactccatacaccaagagcaaacgcggacatagggaggaggaacaggaggacctgacaaaagacatggatgaaccctcccctgtgcccaatgtcgaggaagtaactctgcccaagactgtcaatacaaaaaaggacagcgagagcgccccagtgaaggggggaacaatgacagatcttgacgagcaagaagatgaaagcatggagacgacagggaaagatgaggatgaaaacagcacaggtaataaaggcgagcaaaccaagaatcccgacctccacgaggataatgtgaccgaacagacccaccacatcatcatcccttcctatgcggcatggttcgattacaatagcgtgcatgccattgaaaggagagcgctgccggagttcttcaacggaaagaataagtctaagacccccgagatctatctggcttaccggaacttcatgattgacacctataggttgaatcctcaggagtaccttacttcaaccgcgtgcagacggaaccttgccggagatgtgtgcgcaataatgcgcgttcacgcatttctggaacagtggggactgatcaactaccaggtggacgccgagtctcgccctacgccgatgggaccaccacccacatcccacttccatgtactggcagataccccaagcgggctggtgccactgcaacctaagacccctcaggggagacaggtggacgcggacacaaaagccggtcgcaaaggaaaagagctcgatgatttggtgccagagacagcaaagggcaagcccgagcttcagacctcagcttcccagcaaatgctgaatttccctgataaggggaaagagaagcctacagatatgcaaaacttcggactccggaccgacatgtacactaagaaaaacgttccttcaaagtctaaggctgcagcttccgctactcgcgagtggactgagcaggaaactctgcttctgctggaagcgctcgagatgtataaggatgattggaataaggtatcagaacatgtgggtagccgcacacaggatgaatgtatcctgcactttctgcgcttacccattgaagacccctatctggaggattcagaagcctctctgggacctctggcctatcagcctatacctttcagccaatcgggcaaccccgtgatgtcaacagtggctttcttggctagtgtagtagacccacgcgtcgccagcgcagccgctaagagcgccctggaagagttctctaagatgaaagaagaagtgcccacagctctggttgaagcccacgtgcgcaaggtcgaagaggcagccaaggtcacaggaaaggcggatcccgctttcggcctcgaatctagcggcatcgccggtaccacaagtgacgaacccgaacggattgaggaaagcgggaacgatgaggctagggtagagggccaggctactgatgagaaaaaggagcccaaagaacccagggaaggcggaggagccattgaggaagaagccaaggaaaaaacttctgaagcaccaaagaaagacgaagaaaaaggcaaggagggagacagcgaaaaggagtctgaaaaatcggacggggaccctatagtggaccccgagaaggagaaagaacctaaagagggacaggaggaggttttaaaggaagtggttgagtctgaaggcgaacgaaagacaaaagtggagagggatattggagaaggcaatctgtcaactgcggcagccgctgccttggccgctgctgctgtgaaggcaaaacacctggctgccgtggaagaacggaaaattaagtcattagtggctctgctggtggagacgcagatgaagaaactggagattaaactgcggcactttgaggaactggaaacaattatggatcgtgagcgggaagccttggagtatcagagacagcagttgctggccgacaggcaagctttccacatggagcagttgaagtacgcagagatgcgcgcacgccagcaacacttccagcagatgcaccagcagcagcagcagccgccaccagctctgccaccgggaagccagcccattccaccgaccggcgctgccggaccaccggctgtgcatggcctcgccgtggccccagctagcgtcgtcccagcaccagctggatctggcgctccacccggaagcctcgggccttcggaacagattggccaagccggatcaacagccggaccccagcagcaacagccggcaggcgcacctcagcccggtgccgtccctcccggagtgccgcctccgggacctcatggtccttccccttttcccaaccagcagacccctcccagcatgatgcccggagctgtgccaggctccggccatcctggagtagctgatcctgggacaccactgccccctgaccccacagccccatctcctggaactgtaacccctgtaccgcctccgcagtag

SEQ ID NO: 242979 - DNA, 3459 bp, synthetic construct
  misc_feature 1..3459: note = Description of Artificial Sequence: Synthetic coding sequence
  source 1..3459: mol_type = other DNA
atggctgtcaggaagaaagatggcggaccaaacgttaaatactatgaggcagccgataccgtgactcagttcgacaacgttagattgtggcttggaaaaaattataagaaatatatacaggccgaacctcccacgaacaagtctctatcctctttggtagtacagcttctgcaatttcaagaagaggtgttcggcaaacatgttagtaacgcacccctcacaaagttacctatcaaatgtttcctggactttaaggccggtggcagcttgtgccatatactcgcagccgcttacaagtttaagtccgaccaaggttggcggaggtacgatttccagaatccctcaaggatggaccggaatgtagagatgtttatgactatagaaaagtcgcttgtgcaaaacaactgcctaagtaggcccaacatctttttgtgtcccgagatcgaaccaaaactcctggggaaactgaaggacattatcaaacgccaccagggaacagttactgaggataaaaataatgcaagccacgtggtgtatcctgttcctgggaaccttgaagaagaggaatgggtgagaccagtcatgaaacgagataaacaggtgctattgcattggggatattatcctgattcatacgatacatggattcccgctagtgagatagaggcctccgttgaagacgcgccaacacccgaaaagccaagaaaggttcacgctaaatggatcctagatactgacaccttcaacgagtggatgaacgaagaggactatgaggtgaacgatgataagaatcctgtgagcaggcgcaaaaaaatcagtgcaaaaacgttgacagatgaagtgaacagtcctgacagtgaccggagggacaagaagggcggaaactataaaaaacggaaacgcagcccgtccccctcccccacccctgaagccaagaagaaaaacgcaaaaaagggtccatctaccccttacactaaaagcaaacgaggacatagagaggaggagcaggaggatttaactaaggacatggatgagccatctccagtaccaaatgtcgaggaagttacacttccaaaaaccgtcaacaccaaaaaagactccgagagcgcacccgtgaaagggggaaccatgacagacctggacgaacaagaggacgagagcatggagaccacaggcaaggatgaggatgagaatagcactgggaacaagggcgaacagacaaagaatccagacctgcacgaggacaacgttactgaacagacgcaccacattattataccttcgtacgctgcttggtttgattacaacagcgtgcatgcaatagaacggagggccctccctgagttttttaacggaaaaaacaaaagcaagactcctgaaatatacctcgcttaccgcaactttatgatagacacttatcgactgaaccctcaggaatatctgaccagcactgcgtgtagacgcaacctcgcaggagatgtctgcgccatcatgagggtccacgcctttctagaacagtgggggctgatcaattatcaagtggatgctgaatcacgccctacacccatgggacccccaccaacgtcccacttccacgtgctagcggatactccatccggtttagtccctctccaacccaagaccccccagggcaggcaggttgatgccgatacaaaggcaggacgcaaggggaaagaactggacgacctggtgcctgaaaccgctaagggcaagcctgagttacagacctccgcctctcagcagatgctgaatttccctgacaagggcaaggaaaagcccactgacatgcagaacttcggcctgaggaccgacatgtacaccaagaaaaatgttcccagtaagtcaaaagcagcagcaagtgccactagagagtggaccgagcaggagacactgctgctgctggaggcactggaaatgtacaaagacgattggaacaaagttagcgagcatgttgggagcagaacacaggatgaatgtatcttacactttctgcgcctgcccatcgaggatccctatttggaggattccgaggcttccctcgggcctttggcttaccagccaatcccctttagccagagtggaaacccagtgatgtctaccgtggccttcctcgcctctgtggttgatccgcgagtggcgtcagcggcagctaaatccgctctggaggaattttcaaaaatgaaagaagaagttccgacagcactcgtggaagcccatgttaggaaggtggaggaggcagctaaagttacgggaaaggcggaccctgcatttgggttagaatcttccggtattgccggaaccacctctgacgagcccgagcgcattgaagagagtggcaatgacgaggccagagttgaagggcaggccacagatgaaaaaaaggaacctaaggaacccagagagggaggaggagccatcgaagaagaagccaaagaaaagacgtctgaagccccaaagaaggatgaagaaaaaggtaaagaaggcgatagcgaaaaggaatccgaaaagtcagatggagacccaatcgtggatcccgagaaggagaaagaaccaaaggagggacaagaggaggtgttaaaggaagtggtggaatccgaaggtgagagaaaaacaaaggtggaacgtgatattggtgagggcaacctgagtacagccgctgctgcagccctcgccgctgcagctgtgaaagccaaacacctggccgcagttgaagagagaaagatcaagagtttggtggctctgttagtcgagacccaaatgaagaagctagagataaaattgaggcacttcgaggagctggagacaataatggatagagaaagggaggccctcgagtaccagaggcagcagctgctggctgacagacaagcatttcacatggagcagttgaagtacgctgaaatgcgggctaggcagcagcattttcagcagatgcatcagcaacagcagcaacctccaccagccctccccccaggttctcagccgattccacccaccggcgctgccggacccccagccgttcacggtctcgcagtggctccagcaagcgtggtgccagctcccgcaggaagtggggctccgcctggtagtctcgggccttctgagcagattggccaggcgggatccacggcaggcccacagcagcagcaacccgctggcgcaccacagccaggagccgtgccacccggagtgccgccacctgggcctcacgggcctagccctttcccgaatcagcagacacctccgtccatgatgccaggggcagtccctggtagtggtcaccccggagtggccgcacaaagccctgctattgtagctgccgttcaagggaacctgctgccgtccgcttcgccgctccctgatcccggtaccccactgccgcctgacccgacggctcccagccccggaacagtgacccccgtaccacctccccagtag

SEQ ID NO: 242980 - DNA, 1425 bp, synthetic construct
  misc_feature 1..1425: note = Description of Artificial Sequence: Synthetic coding sequence
  source 1..1425: mol_type = other DNA
atggctgccagggcgggatttcagagtgtggctcccagcggcggagctggcgctagcggcggtgctggggctgctgctgctctcgggcctggcggaacacccggacccccagtgaggatggggccagcacccggtcagggcctttaccggtcccccatgcccggagctgcctaccctcggccaggcatgctgccaggaagtcgcatgactcctcaaggtccttccatgggccctccaggctacggcggtaatccctctgtcagacccggtcttgcccagtctggtatggaccagagccgcaaaaggcctgcccctcagcaaatccagcaggtccagcagcaggccgtgcagaacaggaatcacaatgcaaagaaaaaaaaaatggccgataaaatcctgcctcaacgtataagggagctggtgccagagagtcaggcgtacatggatctgttggcctttgaaaggaaacttgatcagaccattatgcggaaaaggctcgatatccaggaggctcttaagaggcccatcaagcagaagagaaagctcaggatattcatctctaatactttcaatcctgcaaaaagcgatgccgaagacggtgaaggcaccgtggccagttgggaactgagagtcgaagggcgactgctggaggacagcgccttgtctaagtacgacgcaaccaagcagaaacggaagttttcgtccttctttaaaagcttggtgatcgagctcgataaggacctatacgggccagacaatcacttggttgaatggcataggacagctacaacacaagagactgatggttttcaagttaagaggcccggagacgtgaatgtgagatgtactgtcctgcttatgctggattaccaaccaccccaatttaagttggacccgaggctggccagactgctgggcatccatactcagacacggccagtcatcatccaggctctgtggcagtatataaagacacacaagctacaggatccacatgagcgggaattcgttatatgtgacaagtatttacagcaaatcttcgaaagtcaacgtatgaagttttcagagataccacagaggcttcacgccttgctgatgccccctgagcctatcatcatcaaccacgtgatatcggtagatccaaacgaccagaaaaagaccgcgtgttatgacatagacgtggaagtggatgatactctcaagacgcagatgaactctttcctcctgagcactgcatctcaacaagagatagcaaccctcgacaacaagactatgacagacgtggttggaaatccagaagaggaacggagggccgagttctactttcagccctgggcacaggaagctgtgtgcagatacttttactctaaggttcagcaacggaggcaagaattggagcaggcgctgggaataaggaacacttag

SEQ ID NO: 242981 - DNA, 1548 bp, synthetic construct
  misc_feature 1..1548: note = Description of Artificial Sequence: Synthetic coding sequence
  source 1..1548: mol_type = other DNA
atggccgctcgcgctggatttcagtcagttgcgccttccggaggcgctggcgcttctggcggagcgggagctgccgctgcccttggacccggtgggacaccaggcccaccagtacggatgggaccagccccaggccaaggcctataccgctcaccaatgccaggggcagcataccctcgccctgggatgctgcccggatcacggatgactccccaaggtccatccatgggcccacctggatacggcggaaatccctcggtgagaccgggtctggcccagtcaggtatggatcaaagccgtaaacgcccagcgcctcaacagattcagcaggtgcaacagcaggccgtccaaaatcgcaaccataatgctaagaaaaaaaaaatggccgataaaattttaccccagaggattagggaactggtcccagagagtcaagcgtatatggatctcttagcgttcgagaggaagcttgatcaaacaatcatgcgcaagaggcttgacatacaggaagcactcaaacgccctattaagcagaaacgcaaacttaggatttttatttcaaacactttcaaccccgcaaaatctgacgccgaggatggcgagggtacggtcgcctcttgggaattgcgagtagagggacggctgctggaagattcagctctgagcaaatacgacgccaccaaacaaaaacggaagtttagcagcttttttaaatctctggtcattgagctggataaggacttgtacgggccagataaccatctggtggaatggcaccggaccgcaactacccaggagacagatggatttcaagtcaaaagacccggagacgtgaacgtaagatgcacagtgctgctgatgctggattatcagcctcctcagtttaagcttgaccctcgcttagcgagactgctggggatccatacccagacaaggccagtcatcattcaggccctgtggcagtatattaaaactcataagctgcaggatccacatgagagagagttcgtgatatgcgacaagtatctgcagcagatttttgaaagccagcgcatgaaattttctgaaattccccaacgtcttcacgccctgctgatgccaccggagcctatcattatcaaccatgtcatctctgtcgacccaaatgaccaaaaaaaaaccgcttgttacgatatcgatgtggaagtggacgacactctgaagacacaaatgaattcctttctgctctccacagccagccagcaggaaatcgccacccttgacaataaaattcatgaaaccatagaaaccatcaaccagctgaaaactcagcgcgagttcatgctgtccttcgcaagagatccgcagggttttatcaatgactggctccaaagccagtgcagggacctgaagactatgacagacgtagtcgggaatcccgaggaagaacgcagagccgagttttatttccagccgtgggcccaggaggctgtgtgtaggtacttttatagtaaggtccagcagaggcgtcaggagctcgagcaggcccttggtataagaaatacttag

SEQ ID NO: 242982 - DNA, 876 bp, synthetic construct
  misc_feature 1..876: note = Description of Artificial Sequence: Synthetic coding sequence
  source 1..876: mol_type = other DNA
atgatgcctctcaacaagcggggatcttcccttccctttaaatctcttgtgatagaactagacaaagatttgtacggccctgataatcacctggtggaatggcacaggacagccacaacccaagagactgacgggttccaggtcaagcgtccaggcgatgtgaacgtgcgctgtactgtcttacttatgctcgattaccaaccccctcagttcaaattggacccaagactggcacgtctcttgggcattcatacccagacccggcctgttatcatccaggccctgtggcagtacatcaaaacccacaaactgcaggaccctcatgagagggaattcgtgatttgtgacaagtatctgcagcagatcttcgaaagtcagaggatgaagttctcagaaatcccacagaggctacacgccctcctaatgcctccagaacccattattataaatcatgtgatctccgtggacccaaacgatcagaagaaaacagcttgctatgacattgacgtagaggtagacgataccctgaaaactcagatgaatagtttccttctgtcaaccgcaagccagcaagagattgccaccctggataacaagatacacgagaccattgagacgataaaccaattgaaaactcaacgagaattcatgttgagctttgctagagatcctcaagggttcatcaatgactggctccaatcccaatgccgcgatcttaaaactatgacagatgtggtgggaaatcctgaggaagagagacgcgctgagttctatttccagccatgggcacaggaagcagtatgccggtacttttactccaaggtgcaacagcgcaggcaggaactggaacaggccctggggatcaggaatacttag

SEQ ID NO: 242983 - DNA, 1362 bp, synthetic construct
  misc_feature 1..1362: note = Description of Artificial Sequence: Synthetic coding sequence
  source 1..1362: mol_type = other DNA
atgtctaagattagcgaggcagtcaagagggcacgcgctgctttcagctctggaaggacacgcccactacagtttaggatccagcagctggaagcgctccagcggctgattcaggagcaagagcaggagttagtcggtgctctggccgctgatttgcataagaatgaatggaacgcttattacgaggaagttgtctacgtgctcgaggagatcgagtacatgatccagaagctccccgaatgggccgctgatgaacccgtggagaagaccccccagacccaacaggatgagctctacattcactcagaacctctcggcgtcgtcctggtgatcggcacttggaattatcccttcaacctcaccatccagcctatggtgggcgcaattgcagcaggaaatagcgtggtgctcaagccaagtgagttatcagaaaatatggcctccctcctggcgactataatcccccagtacctcgacaaagacctgtaccctgtcatcaatggcggtgtcccagagacaaccgagctcctcaaggagcggtttgatcatatcctgtacacgggttccacaggcgtgggaaaaattatcatgacagcggctgccaagcacctcacccccgtgactcttgagcttggcggtaaaagcccttgttacgttgacaaaaactgcgatttggacgtggcatgcagacgcatcgcgtgggggaaattcatgaacagtgggcaaacttgcgtcgccccagattacattctctgtgatccttccatccagaatcagatcgtggaaaaattaaagaaatcactgaaagagttttatggggaggacgcgaaaaaatcacgggactatgggcgaatcatttctgctcgtcacttccaacgggtgatgggtctgatagaggggcagaaagtggcatatgggggaaccggggatgccgctacacggtatatagctccaacaatcctcacagacgtggatccacagtcacctgtgatgcaggaagaaattttcggccctgtgctgccgatcgtatgcgtgcgcagccttgaagaagctatccagttcatcaatcagcgggagaaaccactcgctctctatatgttctcaagtaacgataaggtaatcaaaaagatgatagcggagaccagcagtggtggggtcgccgctaacgatgtgattgtgcacattacactgcacagcctgccattcggcggagtgggcaattccgggatgggctcctatcacggtaagaaatccttcgaaacgttttcacaccggcgatcttgtttagtgagaccacttatgaatgacgagggtctgaaagttagatatccgcctagcccagcaaaaatgacccagcattag

SEQ ID NO: 242984 - DNA, 1452 bp, synthetic construct
  misc_feature 1..1452: note = Description of Artificial Sequence: Synthetic coding sequence
  source 1..1452: mol_type = other DNA
atgggccgtcgagtgggcgtagaggtgactcccagatgggctccacagaaatgtcagggagcgagaccgcagcgacccggtatgtcacctggtaatcggatgcccatggccggactgcaggtcggtcccccagccggatctcctttcggggcagcggctcctctgcggcctggaatgccacccaccatgatggatccctttaggaaaagactactggtgccacaggctcaacccccaatgcccgctcaaagacggggactcaagagaagaaagatggcagacaaagtcctgccacaaagaattcgggagctggtgccggagagccaagcctacatggatctgctggccttcgagcgtaagcttgaccagacaatagccagaaagcgaatggaaatccaggaggctattaaaaagccattgacgcagaagagaaaactgcggatctatatctctaacacctttagcccgtccaaggcagagggtgactctgccggaaccgctgggacaccaggaggcacgcccgctggagacaaagtagcatcctgggagctaagagtagagggcaaactgctggatgatccatcgaaacagaaaagaaagttctcttcttttttcaaaagcttggtgatagagctggacaaggagctgtatggccctgataatcacctcgtggagtggcacaggatgcccactacgcaagagacagacggtttccaggttaaaagaccaggagatctgaatgttaagtgcactctgctgttaatgttagaccaccagcccccacagtataaactcgatccccgactggcaaggctgcttggagtgcatactcagacgcgagccgctatcatgcaggccctctggctgtatattaagcacaaccagctgcaggacggtcatgagcgagagtacatcaactgcaataggtattttagacagatcttttcctgcggcagattgcggttctctgagattccaatgaagcttgcaggccttctccagcaccctgaccccattgtcataaaccacgtgatatcagtggatccaaatgaccaaaagaagacagcctgctatgatatagacgtggaggttgacgacccactaaaagctcagatgagcaacttcctggctagtacgacaaaccagcaagaaatcgctagtctggacgtgaaaatccatgaaaccatcgagagtatcaaccaacttaaaacccagagagattttatgttgtcattcagcactgatccccaagacttcattcaggagtggctcagatcccagaggcgcgacttaaagatcattaccgacgtgatcggaaatccggaggaagaacggagagcagctttctaccatcaaccttgggcccaagaggcagtgggcaggcatatctttgctaaggttcaacaaaggaggcaggagctggaacaggttctgggtattaggcttacctag

SEQ ID NO: 242985 - DNA, 1596 bp, synthetic construct
  misc_feature 1..1596: note = Description of Artificial Sequence: Synthetic coding sequence
  source 1..1596: mol_type = other DNA
atgtcaggtagaggtgccggaggctttccgctcccccctctgtcgcctggaggaggagctgtcgctgccgcacttggcgcaccgcctcccccagcaggcccaggaatgctcccaggcccagcactccggggaccagggcctgcgggtggggtcggcggtcccggtgctgccgcttttagaccaatggggcctgccggacccgctgcccaatatcagcgacctggaatgtcccccggaaacagaatgcccatggccggactccaagtggggccaccagctgggagcccatttggtgccgcagctccactgcgacctggaatgcctccaaccatgatggacccctttaggaagcgccttttggtgccccaagcccagccccctatgcccgcacagaggcgcggactgaagagaaggaagatggcagataaggtcctgcctcagcggattcgcgagttagtgcctgagagccaggcttatatggatctgcttgcctttgaaagaaagctggatcaaacaatcgccaggaagagaatggagatccaagaggcgattaaaaagcctcttacccagaaaagaaaacttaggatttatatttcaaacacgttctccccatcaaaagcagaaggggacagtgccggtactgcaggcaccccaggcggaacacccgcaggcgataaggtggcatcatgggaactgcgcgtcgaaggcaaactgctggacgacccttccaaacagaagcggaaatttagctcttttttcaaatctctggtaatcgagctggacaaggaactgtatggaccagataatcacctggtggaatggcatagaatgcctaccactcaggaaaccgatggcttccaggtaaaaagacctggcgatctcaacgtgaaatgcacactgctcctgatgctcgatcaccagccgccacaatacaagctcgacccacgcctggcaaggctgctgggggtccacacacagacgagggcggctatcatgcaggctctgtggctctacattaaacacaaccagcttcaggacgggcatgaacgcgaatatattaactgtaacagatatttccgccagattttcagctgcgggaggctgaggttctctgagattccgatgaagttggcgggattgctacagcatcccgatcccatagtcattaatcacgtgatttctgtagacccaaacgaccagaagaagaccgcctgttacgatattgacgtggaggtagacgacccgctgaaagctcagatgagtaacttcctggcttcaaccacaaatcagcaggaaattgctagccttgatgtcaaaatccacgaaactatcgagtctattaatcagttgaagacccagcgggactttatgttgtcattcagcacagacccacaggatttcattcaggagtggctgaggtcccagagaagggacctgaaaatcattaccgacgttatcggtaaccctgaagaggaacgacgcgctgccttctatcaccaaccatgggctcaggaggctgttggccgacacatctttgccaaggttcagcagcgccgacaagagttggaacaggtgctcgggatcagacttacatag

SEQ ID NO: 242986 - DNA, 1485 bp, synthetic construct
  misc_feature 1..1485: note = Description of Artificial Sequence: Synthetic coding sequence
  source 1..1485: mol_type = other DNA
atgtcggggcgaggagccggtggattccctcttcctccgctttcgccgggtggcggtgccgctttcaggcccatgggaccagccggtcccgcagcccagtaccagaggcctgggatgtcccctggaaataggatgcccatggctggccttcaggtgggaccaccggctggcagccccttcggcgctgctgctcctcttcgccctggtatgcctccaactatgatggaccccttccggaaaaggttacttgtgcctcaggcccagcctccaatgcctgcccagcgccgtggcctgaagcgcagaaagatggcagacaaggtactccctcaaaggatacgtgagttggtgcccgaaagtcaggcttatatggatctgctcgcttttgagagaaagttagatcagaccatcgctaggaaacgcatggagattcaagaggccattaagaagccattaactcaaaagaggaaacttaggatctatattagcaacacctttagccccagcaaagccgagggcgattctgccggtaccgccggaacgcccggtggcactccagctggggacaaagtcgcatcttgggagcttcgcgtggagggaaagctattggacgacccgagcaaacagaagcggaaattttcctccttctttaagtctctggtgatcgagctggacaaggaactgtacgggccagacaatcatctggtcgagtggcaccgtatgccgacgactcaggagaccgatgggtttcaggtaaagaggcctggcgatcttaacgtcaagtgtactctgttactcatgcttgaccaccagccaccacagtataaattggaccccagacttgcccgactcctgggcgtgcacactcagactagggcagctatcatgcaggctctatggttatatatcaaacacaaccaactgcaagacggccacgagagagagtatatcaactgcaaccgttacttcaggcaaatcttttcttgcgggagactacggtttagtgagattcctatgaaactggcaggtttgcttcaacacccagatcctattgtgataaaccacgtgatcagcgtggaccctaacgatcaaaagaaaaccgcctgttatgatatagacgtcgaggtggacgacccacttaaggcacagatgagtaatttcctggcttccaccacaaaccagcaagagatagccagtctggacgtgaagatacacgagacaatcgagtctattaatcaactgaagacccagagagactttatgctgtccttctcaaccgaccctcaagacttcatccaggaatggctccgttcccagcgacgcgacctgaaaatcatcactgacgtaataggcaatcctgaagaagagcgacgcgctgcattctatcaccaaccgtgggctcaggaagccgtggggaggcacatattcgctaaggtccagcaacggaggcaggagcttgagcaggttctgggtatccgcctgacgtag

SEQ ID NO: 242987 - DNA, 1452 bp, synthetic construct
  misc_feature 1..1452: note = Description of Artificial Sequence: Synthetic coding sequence
  source 1..1452: mol_type = other DNA
atggccgctgatgaggttgcgggaggggcacggaaagccaccaaatcaaagctgttcgaatttctggtccatggcgttaggccaggcatgcctagcggagccagaatgccacaccagggggcaccaatgggaccacctggatccccttacatgggctcccctgccgttcgcccagggctggcgcctgcaggtatggagccagccagaaaacgcgcagcaccccctccgggtcaaagccaggcacagagtcaaggtcagcccgtgccaacagcgccagcgagaagcaggagcgctaaaaggaggaaaatggctgacaagatcctgccccagaggattagggagttagttcctgaatcacaggcgtacatggatctcctggccttcgaaagaaaactcgaccagacaatcatgaggaagagagttgatatccaggaggccctgaaaaggcccatgaaacagaaaaggaaactgcgcctttatatctcaaacacctttaaccctgcaaagccagacgctgaagacagcgacggatccatcgcaagttgggagctcagagttgaggggaaactcctggacgatccgagtaaacagaaacggaagttctcgtccttcttcaagagtctggtgatcgaactcgataaagacttgtacggaccagataatcatctggtcgagtggcaccgtacgcccactacacaagagacagatgggttccaggttaagagaccgggagacttgagcgtgcggtgtactttactgctcatgctcgattatcagccgccacaatttaagctggacccgcgattggcacgtctgctgggcctccacacccagtccaggagcgccatagtccaggcactgtggcagtatgtgaaaacaaaccgactccaggattcacacgataaggagtatataaacggtgacaagtactttcagcagatatttgactgcccacggcttaagttctcagaaattccccagcgcctgacagcgctgcttcttcccccagacccaattgttatcaatcacgtaataagcgtggatcccagtgatcaaaagaaaacagcctgctacgatattgatgtagaagtagaagagcccctgaaagggcaaatgtcatcttttctgctctccacagccaatcagcaggagatcagcgccttggacagcaagatacacgaaacaatagagagcatcaatcagctcaaaattcaacgggatttcatgctaagcttctctcgggaccctaaaggatacgtccaggacttgctccgctcacaaagtagagatcttaaggttatgacagacgtggctggcaatcctgaagaagagcgtcgggctgagttctatcaccaaccttggtcacaggaagcagtgagtagatacttctactgcaagattcagcaacgtcgccaggaactagaacagtctttggttgtgcgcaacacctag

SEQ ID NO: 242988 - DNA, 1308 bp, synthetic construct
  misc_feature 1..1308: note = Description of Artificial Sequence: Synthetic coding sequence
  source 1..1308: mol_type = other DNA
atgacacctggtctgcagcatcccccaacagtggttcagaggcctggcatgccaagcggcgctagaatgccacaccagggagccccaatgggacctcccggatccccttacatgggctcccctgctgccccagctaggtcccgttctgccaagagacgcaagatggcggataagattctgccccagaggattagagagctggttcccgagagccaagcatatatggacctgctcgccttcgaacgcaagctggaccagaccatcatgcgaaagcgggtggacattcaggaagctctgaagcggccaatgaaacagaagagaaaactgcgcctctacatctccaacacatttaaccctgccaaacctgacgctgaggattccgatggatccattgcctcctgggagctgagagtggagggcaagctgttggacgatccttctaagcagaagaggaagttcagttctttcttcaagagtctggtcatagagttagataaggacttgtacggacccgacaatcatcttgtggagtggcacagaactcccacaacacaagaaaccgacgggttccaggtcaagcggccaggcgacttgtcagtgaggtgtacacttctgctgatgctcgattaccaacccccacagtttaaactagatccacggctcgcccgattgctgggtttacacacacagtcaagatccgcgatagttcaggcactgtggcagtatgtgaaaacaaaccggttacaagactctcatgataaggagtacatcaacggcgataagtactttcagcaaatatttgattgtccacgtttaaagttctccgagatcccacagaggctgactgcgctgctcctcccaccagatccaattgtgattaatcatgtcattagtgtcgatccatccgaccaaaagaaaaccgcttgctatgacattgatgtcgaggtcgaggagcctctaaagggacagatgagttctttcctgctgtccacagcaaaccagcaggaaatttccgcattggactctaagatccacgagaccatcgaatctatcaatcagctcaaaatccaaagagattttatgctctccttttcccgtgaccccaagggttatgtgcaggacctcctgagatcccagagcagagacctgaaggtgatgacagatgtcgctggcaacccagaggaagagaggagagctgagttctaccatcagccgtggagccaggaagcagtgtcacggtacttctactgcaagatacaacagcgtagacaggagcttgagcagagcctagtggttcgtaacacttag

SEQ ID NO: 242989 - DNA, 1413 bp, synthetic construct
  misc_feature 1..1413: note = Description of Artificial Sequence: Synthetic coding sequence
  source 1..1413: mol_type = other DNA
atgaccccgggtctgcagcaccccccaactgtggtccagagacccggaatgccgtcaggcgctcgtatgccccaccaaggcgcacctatgggccctcctggctcaccctatatgggaagcccggctgttcgaccaggactggccccagctggtatggaaccagcccgaaaacgggcagccccaccccctggtcagagccaggcccagtcgcagggtcagcccgtacctacagcgccagcaaggagccggtccgccaaacgaaggaaaatggccgacaagatactcccccagcggataagggaactggttccggagtctcaggcctatatggacctgctggcctttgagcggaagttagaccagactatcatgcgcaaaagagtcgatattcaggaggccctgaaaaggcccatgaagcagaagcgcaaactgcgcttgtatatcagcaacaccttcaaccctgcgaagccagatgcagaggacagtgacggatcaatcgcatcatgggagcttagggttgaaggaaagctattggatgatccgtctaagcagaaaaggaagtttagcagtttttttaaatccctggtcatcgagctggataaggacctgtacggtcctgataaccacttggtcgagtggcaccggactccgactacacaggaaaccgatggattccaagtcaaaaggcccggagacctgtcagtacgatgtaccctgttgctgatgctggactaccaaccaccccagtttaagctggatcccaggttagccagacttctggggttgcacacccagtcacgctccgcaatcgtccaggcgttgtggcagtacgtgaaaaccaatcggttgcaggactctcacgataaggagtatattaacggcgacaagtattttcaacagatctttgactgtcctcgacttaaattcagcgaaattccacagagactaacggctcttctgttaccgcctgaccctattgtgatcaatcatgtgatttctgtagatccatccgaccagaagaaaaccgcctgctacgatattgacgtagaagttgaggagcctctgaaagggcagatgagtagttttctcctgtcgactgcaaaccaacaggagataagtgctttagattccaaaatacacgaaaccatcgaaagcattaaccagctgaagatccagagagacttcatgttgagcttctctagggatccgaagggctatgttcaggatttgctacggagtcagagtagagatctgaaggtcatgacagatgtcgccggaaaccccgaagaggagcggagagccgagttttaccaccagccctggtcacaagaagcagtaagtcgctacttctactgtaaaattcagcagcgacggcaggaactagagcagtcactggtcgtgaggaatacctag

SEQ ID NO: 242990 - DNA, 1413 bp, synthetic construct
  misc_feature 1..1413: note = Description of Artificial Sequence: Synthetic coding sequence
  source 1..1413: mol_type = other DNA
atgactcccggattgcagcaccctcctacggtggtgcagcggcctggcatgccatctggggctcgaatgccccaccagggtgctccaatgggcccacccggatccccctatatgggatctcctgcagtgcgcccaggtctggccccagcaggaatggagccggctagaaaaagggccgctcccccaccaggtcagtcacaggcacagagtcagggtcagcccgtgccaacagcacctgcacggtctaggtcagctaagcgccgaaagatggccgacaaaatcttgccacaaaggattagagaactggttccagaaagccaagcatacatggatctcctcgcctttgagaggaaactggaccagactattatgagaaagagggtggacatccaggaggccttgaaacggccaatgaagcagaaaagaaagttgaggctctacatttcaaacacctttaatcccgctaagccagacgcggaggactcagacggcagtattgccagttgggaactgcgcgtggaaggcaagctgttggatgatccatctaaacagaagagaaaattcagttctttctttaagagcttggttatcgaattggataaagacttgtacggcccagataatcacctcgtggagtggcaccgcacacctactacccaagagactgacgggttccaggtgaagagaccaggcgaccttagcgtcaggtgtactctactcctcatgcttgactaccagcctccacaatttaaactagatcctcggctcgcacggcttctgggtcttcatacccagagtagaagtgccatagtgcaggctctgtggcagtacgtcaaaaccaaccgcctgcaagatagtcatgataaagagtatattaatggcgacaagtactttcagcagattttcgactgccctcggcttaaattttctgagatcccacaacgcctcacagccctcttgttgccccctgaccccatagtgatcaaccatgtcatatcagtcgacccaagcgaccagaagaagaccgcctgctacgatattgacgtcgaggtagaggagcccctcaaaggccagatgtcttctttccttttatcaacagccaaccagcaggaaataagtgccctggattccaagatccacgagactatcgagtccattaaccaactgaagattcagcgggatttcatgcttagcttctcccgtgatcccaaaggatacgtgcaagacctgttacggtcgcagagtcgggaccttaaagtgatgaccgacgtggccggtaatcctgaggaagaaaggcgggctgagttctaccaccagccatggtctcaggaggctgtgagccgctatttctactgcaaaatccagcagcggagacaggagctggaacaatccctggtggtgcggaacacatag

SEQ ID NO: 242991 - DNA, 420 bp, synthetic construct
  misc_feature 1..420: note = Description of Artificial Sequence: Synthetic coding sequence
  source 1..420: mol_type = other DNA
atgacacctggacttcagcatccgcctaccgtggtgcagcgcccaggaatgccgagcggcgctcgtatgccgcatcagggtgcaccaatgggtccacccggtagtccttatatgggatcaccagcagtgagacccggtttagccccagcaggcatggagccagctcggaaaagagctgccccacccccagggcagtcacaagcccagtctcaaggacaaccggtgcctactgcacccgcaaggtccaggagcgcaaaacgacgaaaaatggcggacaagatcctgccgcagcgcatcagggagctcgtgcccgaatcccaagcctacatggatctactcgcttttgagcgtaaactggaccagacaatcatgagaaaaagagttgacatccaagaagccctaaaacgacccatgaaatag

SEQ ID NO: 242992 - DNA, 3081 bp, synthetic construct
  misc_feature 1..3081: note = Description of Artificial Sequence: Synthetic coding sequence
  source 1..3081: mol_type = other DNA
atgaatctatttaacctggatcggtttcggttcgaaaagcggaacaagattgaagaagccccagaggccacaccacagcctagtcagcccggtcccagctctcctatttctctgtcagccgaagaagaaaacgctgaaggcgaggtgtccagagcaaacactccagactcagatatcacagagaagacagaggatagcagtgtgccagaaacccctgacaatgaacgcaaagcctcaatatcttacttcaaaaaccagcgaggcatccagtatatcgatctctcctcagactcggaagatgttgtgtccccaaactgttctaacactgtccaggagaagaccttcaataaagataccgtgattatagtttccgagcctagcgaggacgaagagtcccagggactgccaacaatggctcgaaggaatgacgacatctctgagcttgaagacctcagtgaattggaggatctcaaggatgccaagctgcaaacactcaaggaactgttcccacagaggagcgataatgaccttctcaagttgatagagtccacttcaaccatggatggcgctatcgccgcagctctcctgatgttcggagacgctggcggaggcccacgcaaacgcaagcttagttcctccagtgagccctatgaagaagacgagttcaacgacgatcaatcgataaagaaaacgcgcctcgaccacggtgaggaaagcaacgagagcgcggagagctctagtaactgggagaagcaagagagcatcgtacttaaactccaaaaggaatttcctaactttgataaacaggaactgcgcgaggttctaaaggagcacgagtggatgtacactgaggcattggaatccctgaaagtgttcgccgaggatcaagacatgcagtacgtctcccaaagtgaagtcccaaatggaaaggaagtgtcctctcgaagtcagaactatcccaagaacgcaacgaagacaaagttgaaacagaaattcagcatgaaggcccagaatgggtttaataaaaaacgcaagaagaacgtgtttaaccccaagcgggtggtggaggattccgagtatgactcgggttcagacgtcgggtcttccttggatgaggattacagcagcggggaggaagtaatggaagatggatataagggcaagattttgcatttcctgcaggacgccagcatcggtgagctcactctgattccgcagtgcagccaaaaaaaggcccagaagatcaccgagcttcgcccattcaattcctgggaagctttatttacaaagatgtccaagaccaacggtctttcggaagacctgatctggcattgcaaaactctgatacaggagcgtgatgtggtgatccggctgatgaataagtgcgaagatatctccaataagctcacgaagcaggtgaccatgttaactggtaacgggggaggttggaacattgaacaaccatctattctgaatcagtccctcagtctcaaaccttaccagaaggttggcctcaattggctggcccttgtccataaacatggtcttaacggaatcctcgccgacgaaatggggctcggcaaaactattcaggcaatcgcattccttgcctatctatatcaagagggcaataatgggccacaccttattgtggttcccgcttctaccatcgataactggctacgggaggtcaatctttggtgccctacgctgaaagttctgtgctattatggttctcaggaagaacgaaagcagatcagattcaatatacactctcgatacgaggattacaatgtgatagtcacaacatataattgtgcaatctcttcaagtgatgacagaagcctttttcggcgactgaaactgaactacgctatctttgacgaaggccacatgcttaagaatatgggcagcatcaggtatcaacatctgatgactataaacgccaataataggctgttactgactggaacacctgtccagaacaatcttcttgagttgatgtctctcttaaacttcgtgatgccccacatgttcagttctagtacatctgagatcaggagaatgttttcctctaagacaaagtcagcagacgagcagagtatctacgaaaaagaacggattgcacatgctaagcagatcattaagcctttcatcctgaggagggtcaaggaagaggttctcaaacagctgccccctaaaaaagatcggattgagctttgcgcgatgagcgaaaagcaggaacaactgtatctgggcttattcaataggctgaaaaaatccattaataacttagaaaagaatactgagatgtgcaatgtaatgatgcagctgcgcaagatggccaatcatcctctgctccaccggcaatattatactgccgagaaactgaaagagatgtcccaactcatgctgaaggagcctacacactgcgaggccaacccggatttaatttttgaggacatggaggtgatgacagatttcgaattgcacgtgctttgcaaacaatacaggcacattaacaattttcagctcgatatggacttaatcctggactctggcaagttccgggtcctgggatgtatcttgtccgaactgaagcagaaaggcgaccgcgtagtgctgttttcgcaatttaccatgatgttggacattctcgaagtgctcctgaaacaccatcaacatcggtacttacgcttggacgggaaaactcagatcagtgagagaatacatttgattgacgagttcaatacagatatggacatcttcgtcttcctcctgtctactaaagccggaggactgggaataaacctgacttcagccaacgtcgtcatcctgcatgacatagactgcaacccatataacgataaacaggccgaggacagatgtcaccgcgtagggcaaacaaaagaggtgctcgtgatcaaactaatctctcaaggaaccatagaggaatccatgctgaaaataaatcagcagaagctgaagttggaacaggatatgacgaccgtggatgagggtgatgaggggagcatgcccgctgatatagccacgctgctgaagacttctatggggctctag

SEQ ID NO: 242993 - DNA, 3087 bp, synthetic construct
  misc_feature 1..3087: note = Description of Artificial Sequence: Synthetic coding sequence
  source 1..3087: mol_type = other DNA
atgaacctcttcaaccttgacaggttcagattcgagaaaagaaacaagatcgaagaagccccagaagcaactccccaaccgtcccaaccaggccctagcagtcctatctccctcagcgccgaggaggaaaacgccgagggcgaagtatcacgagcgaatactcccgactcagacataacggagaaaacagaggactccagcgttccggagacaccggataacgagcgtaaggcctctatttcatatttcaagaatcagcgcggtatccagtacattgacttatctagtgacagcgaggatgtggtatctcccaactgttcaaataccgttcaggaaaaaactttcaacaaagacacggtgattatcgtctcagaaccatcagaggatgaggaatcacaggggttacccaccatggccaggcggaacgacgacatatcagagcttgaggacctctccgaacttgaggacctgaaagacgccaaactgcaaacgctcaaggagttattcccacagagatcagacaatgatttgctgaagctgatagaatctacatccaccatggatggggcaatcgcggcagccctgcttatgttcggcgatgcgggagggggtcctcgaaagcggaagttgtctagttcatcagagccctatgaggaggatgagtttaacgatgaccagagtattaagaaaacaaggctggatcatggtgaggaatcaaatgagtctgctgagtcctcatccaattgggagaaacaggaatccattgtactgaagctgcagaaagagttccccaactttgataaacaggagctgcgcgaagtgctcaaagaacacgaatggatgtacacagaggcgcttgaaagtctcaaggtattcgccgaggaccaggatatgcagtatgtctctcagagcgaggtaccaaacgggaaagaggtttctagccggtctcagaattacccaaagaatgctaccaagacaaagctaaagcagaagttctctatgaaggcccaaaacgggtttaataaaaaacggaaaaaaaacgttttcaatccgaagagagtggtcgaggacagcgagtacgactctggtagcgatgtaggctctagcctcgacgaggactacagcagcggcgaagaagtgatggaggacgggtataaaggtaaaatccttcacttcctgcaggatgctagcattggggagctcacattaatcccccaatgcagtcagaaaaaagctcagaaaattaccgaactgagaccgttcaattcatgggaggctctttttactaagatgtcaaagaccaatggcctgtcagaagatctcatttggcactgcaagaccctgattcaggagcgagacgtggtcatccgtctcatgaacaaatgcgaggacatatcaaacaaacttaccaagcaagtaaccatgctcacaggtaacggagggggatggaatatcgagcaaccatccatcctgaaccagtcgctttccttaaaaccttatcagaaggtgggcttaaactggctcgcgctggtgcacaagcatgggctgaatggcattctcgctgacgagatgggcctcggcaagaccattcaggccatcgcctttttagcctatctgtaccaggaagggaacaacgggccacatttaattgttgtgcccgcatcgacaatcgataattggctgcgggaggtgaatctatggtgcccaacattgaaggtcttgtgctactacggatctcaggaggaacggaaacagatacggttcaatatccattcacgctacgaggattacaacgtgattgtgaccacctacaactgcgccatctcctcatccgacgacagatctctattccgtagactgaaattgaattacgcaatcttcgacgagggccacatgctgaagaatatgggttcaatccggtatcagcacctgatgactatcaacgctaataatcgtcttttgctcactggcaccccagtgcagaataacctgttggaattgatgtccttgctgaacttcgtgatgccgcacatgttctcaagcagtacatccgaaattaggcgcatgttttcgtcaaagacgaaaagtgcagacgagcagagtatttacgagaaagagaggatcgctcacgcaaaacagattataaagccgtttatcctgcgccgtgtcaaggaggaggtgctcaagcagctgcccccaaaaaaagatcggatcgaattgtgtgccatgagcgagaagcaggaacaactctaccttgggttgtttaatcgcctgaagaaaagtatcaataacctcgtcactgagaagaacaccgagatgtgtaacgtgatgatgcaactgcgcaagatggcaaaccaccccttactgcacagacaatactacacggcggaaaaactgaaggagatgtcccaattgatgttaaaggagcccacacattgcgaggccaaccctgatctgatatttgaagatatggaggtgatgactgactttgaactccatgttctttgcaagcaataccggcacattaataactttcagctggacatggatctgatcctcgattcaggcaaatttagggtcctgggttgtatcctgagtgaactgaaacaaaaaggggatcgagtggtgttgttctcccagtttactatgatgttggacatcttggaggtgctactaaagcaccatcagcacagatacctccgcttggacggcaaaacccaaataagcgagaggatacacctgatcgatgaattcaataccgatatggacatctttgtattccttctgtctactaaggcaggcggacttggaatcaatcttacgagcgccaacgtggtcatcttacacgatatcgactgtaacccttacaacgataagcaggccgaggaccgatgccaccgggtgggtcaaactaaggaggtgctggtaatcaaattgatcagccagggaacgatcgaagaatccatgctgaaaatcaatcagcaaaaattgaaactcgagcaggacatgacaaccgtggatgagggtgatgagggctcaatgcctgcggacattgctactttgctgaaaacatcaatgggtctgtag

SEQ ID NO: 242994 - DNA, 3087 bp, synthetic construct
  misc_feature 1..3087: note = Description of Artificial Sequence: Synthetic coding sequence
  source 1..3087: mol_type = other DNA
atgaatttgtttaatttggacagatttcggttcgaaaaacgaaacaagattgaagaggcaccagaagcgacaccacagcccagccaacctggaccctcctcaccgatcagcctaagcgctgaggaagagaacgctgagggggaggtgagtagagcaaataccccagacagcgatataacagagaagaccgaggattcctctgttcctgagaccccagataatgagagaaaggccagcattagttattttaagaaccagcggggaatacagtacattgatctgtccagtgacagcgaggacgtggtgtcaccaaattgttcaaatacagttcaggagaagacttttaacaaagatacagtcatcatcgtcagcgagccgagcgaggatgaagaaagccaggggctgccaacaatggcaagaaggaatgatgacatcagtgagctcgaggatttgtcagagttggaagacctgaaggacgccaagcttcagacacttaaagaacttttcccacaaagaagcgataacgacctcctcaagttgatcgagtctacatcaacaatggacggggctatcgccgcagccttactaatgttcggggatgctggcggaggccctcgaaagcgcaaactgagctctagctcagaaccgtatgaagaagatgagtttaatgacgatcaatcaatcaaaaagacccgtcttgaccacggagaagagtccaacgagtccgctgaaagctcaagcaactgggaaaagcaagaatccatagtgctgaagctccagaaagagtttcccaacttcgataagcaagagctacgagaggtactgaaagagcacgagtggatgtacaccgaagcccttgaaagccttaaagtcttcgcagaagaccaagacatgcagtacgtatcccagtcagaggtgcccaatggaaaagaggtgtcgtctaggtcccagaactatcccaagaacgctactaagaccaagctgaaacaaaaatttagtatgaaggcccagaatggttttaataaaaaacggaaaaaaaatgtcttcaaccccaagcgtgtggtcgaagattcggaatatgacagtgggagtgatgtaggaagcagtctggacgaggattacagcagcggggaagaggtgatggaagatggctacaaagggaagatcctgcatttccttcaggacgcgtctattggagagttgacccttatccctcagtgttctcagaagaaggctcagaagattaccgagttgcgtccatttaattcatgggaagcactgtttacaaaaatgtctaaaactaatgggttatcagaggacttgatatggcactgcaagaccttgatccaagaaagagacgttgtgattagactgatgaacaagtgtgaagacatttccaataaattgacgaagcaggtgaccatgttaactgggaatggcggagggtggaatatcgagcagccatcgatcctcaatcagagcctgagcctgaagccgtaccagaaggttgggctaaactggcttgctttggttcataagcacggacttaatggaattctcgctgacgagatggggctcgggaagaccatccaggcgatagccttcctcgcctatctatatcaggagggaaacaacggcccacacttgatcgtagtccccgctagtacgattgacaactggctccgtgaagtgaatttgtggtgtcctacattgaaggttctctgttattacggtagtcaggaggagaggaaacaaataagattcaacatccactctcggtacgaagattacaacgtgatcgtgaccacttataactgtgcgatctccagtagcgacgaccggagcctgtttagaagactcaaactcaattatgcaattttcgacgaaggtcacatgctgaaaaacatgggatccattcgctaccagcacctgatgaccataaacgctaacaatcggctcctgctgactggaacacccgtgcagaataacctcttggagcttatgagcctcctgaacttcgtgatgcctcatatgttcagcagttcaacatccgagatacgccgaatgttcagctctaaaaccaaatccgccgatgagcagtccatctatgaaaaagagagaattgctcacgccaaacagatcattaaaccatttattttgcggcgtgtgaaggaggaagttctgaagcagctgccgccaaagaaggataggatcgaactgtgtgccatgtctgaaaagcaggaacaattatacctgggcctctttaaccgcctgaagaaatccatcaataatctggtgactgagaaaaacacagaaatgtgtaacgtcatgatgcagctgagaaaaatggctaatcaccctctgcttcacaggcaatattataccgccgagaaattaaaggagatgtcgcagctcatgctgaaggaaccgactcactgtgaggcaaaccccgacttaatttttgaggatatggaagtgatgactgatttcgagctccatgtgctgtgcaagcagtataggcacataaacaacttccagctggacatggacctcattctggactccggcaagtttagagtgctgggttgtattctctccgagttaaagcagaagggtgacagagtggtgctttttagccagttcaccatgatgctcgatatcctcgaggttctacttaaacaccaccaacacagatatctgcggctcgatggcaaaacgcagatttccgagagaatccatctgattgatgaattcaatacggatatggacatattcgtgttcctgttgagtaccaaggcagggggattgggtattaacttgaccagtgccaacgtggtcatcctgcacgatatcgactgcaacccatacaacgacaagcaggccgaagatcgctgtcacagggtgggccagaccaaggaagtgttggtaatcaagctcatcagtcagggaaccatcgaggaatccatgctgaaaataaaccagcaaaagttgaagctcgaacaggatatgacaacggtggacgagggagatgaggggtcaatgcctgccgacattgccactttactcaagacctccatgggcttatag

SEQ ID NO: 242995 - DNA, 957 bp, synthetic construct
  misc_feature 1..957: note = Description of Artificial Sequence: Synthetic coding sequence
  source 1..957: mol_type = other DNA
atgaacctgtttaacctagaccgctttcgatttgaaaagcggaacaagattgaggaagcaccagaggctacaccgcagccttctcagcctggaccctcttccccaatttccctgagtgcggaagaagaaaacgctgagggggaagtctctagagctaataccccagacagcgacattacagagaagactgaggacagctctgtgcctgaaactcctgacaatgagcgcaaggcctccatctcctacttcaagaatcagcgcggaatccagtacatagacttgtcctccgacagcgaagatgtggtctcacccaactgctccaacactgttcaggaaaagactttcaataaagacactgtcatcatcgtgtccgaaccttcagaggatgaggagtctcaaggtctgcctacgatggcacggaggaacgatgacataagcgaactagaagacctctccgaattggaggatctgaaagatgccaagcttcagactttaaaggagctcttccctcaaagatccgacaatgacctgctcaagctgatagagtccaccagcaccatggatggtgccattgctgccgctctgctcatgttcggagatgccggtgggggaccccgtaagaggaagctgtcatcatcctctgagccttacgaagaggacgagtttaacgatgaccagtctattaagaagacccgacttgatcatggcgaggaatccaacgagtctgccgagagttcttctaattgggagaaacaagagtcaatcgtactgaaactgcaaaaagaattcccaaatttcgacaaacaggaacttcgggaagttctaaaggagcatgaatggatgtacaccgaggctctcgagtccctgaaggtgtttgccgaggaccaggacatgcaatacgtcagccagtctgaggtgcccaatgggaagaagaaagcccagaagaagaaaaagtag

SEQ ID NO: 242996 - DNA, 732 bp, synthetic construct
  misc_feature 1..732: note = Description of Artificial Sequence: Synthetic coding sequence
  source 1..732: mol_type = other DNA
atggctgccatagccgctagcgaggtcctcgtcgactcagccgaagagggctccttggccgcagcagccgagcttgcggctcagaagcgggagcagcggcttcgcaagttccgggaactacatctgatgcgcaatgaagcgcgtaagctgaatcaccaagaggtggttgaggaagacaagcgtctgaaactccccgctaactgggaggccaaaaaggcgagattggagtgggaactgaaggaggaggaaaagaaaaaggagtgcgcagctcgcggtgaagattacgaaaaggtgaagctgttagaaattagtgccgaagacgccgagagatgggagaggaaaaaaaagagaaaaaatccagacttggggttctccgattatgccgctgcacagttaaggcaatatcaccgcctgaccaagcagataaaacccgatatggaaacctatgagaggcttagggagaagcacggcgaagagttttttccaacatccaactctctgctccacggtactcatgttccttccaccgaggaaattgaccgcatggtaattgatcttgagaagcaaatcgagaagcgcgataagtattcccggagacggccttacaatgatgacgcagatatcgactatatcaacgaaaggaacgcaaaattcaacaagaaggctgagaggttctacggaaagtatactgctgaaatcaagcagaacttagaacggggaactgctgtctag

SEQ ID NO: 242997 - DNA, 606 bp, synthetic construct
  misc_feature 1..606: note = Description of Artificial Sequence: Synthetic coding sequence
  source 1..606: mol_type = other DNA
atggccgctatcgctgcctccgaggtgcttgtggactccgctgaggaagggtctctggctgccgcagcggaactggctgctcaaaaaagggaacaaaggttacggaaattcagggagctgcaccttatgcgtgagtgcgccgctcgcggagaggactatgaaaaggttaaactgctggagatctcggctgaagatgcggagcgttgggaaaggaaaaaaaaaaggaagaatccagatctgggcttttcggattacgcggcagcacagttgagacaataccatagacttaccaagcaaatcaagcccgatatggagacgtatgaaaggctgcgtgagaagcatggggaagagttttttccgacctcaaacagtctcctccacggaacacatgtgccatccactgaggagattgatcgaatggttatcgacctcgagaagcagatcgaaaagcgagacaaatattctcggcgacggccttataatgacgacgctgatatagactatattaacgaacggaacgcgaagtttaacaaaaaagccgagaggttttacggcaagtatacagcggaaatcaaacaaaacctcgagcgcggtactgcagtgtag

SEQ ID NO: 242998 - DNA, 777 bp, synthetic construct
  misc_feature 1..777: note = Description of Artificial Sequence: Synthetic coding sequence
  source 1..777: mol_type = other DNA
atggacggaatcatcgaacaaaaatccatgttggtccacagtaagatttccgacgcagggaaaagaaatggcctaatcaataccagaaatctgatggcagaaagccgtgacggcctcgtatcagtctacccagccccacagtaccaatcgcatcgtgtcggggcttcgaccgtcccagcctctctggactcctcacgttccgaacccatgcagcagttacttgatcctaacaccctccagcagagcgttgagagccgataccggcctaacatcattttatattcagaaggcgtgctgcgctcgtggggagatggggtggctgctgattgctgcgagacgacctttatagaggatcgtagcccgactaaagatagtctggaatatccagacggcaaatttatcgacctcagcgccgatgacattaagatccacacactgagctacgatgttgaggaggaggaagagttccaggagttagaatctgactattcttcagataccgagagcgaggacaacttcctcatgatgccgccacgcgatcatctcgggctgtcggtcttctccatgctgtgctgtttttggcctctggggattgcagctttttaccttagtcacgagaccaataaagcggtggccaagggtgatctgcatcaggcctcaacttcttccagacgcgctttattcctggctgtcctcagtattacaatcgggacaggggtttacgtgggtgtggccgtcgctttaatcgcgtatctttctaagaataaccatctgtag

SEQ ID NO: 242999 - DNA, 717 bp, synthetic construct
  misc_feature 1..717: note = Description of Artificial Sequence: Synthetic coding sequence
  source 1..717: mol_type = other DNA
atggagtcactcagcgagctgcagaacccactcctgccacgatcacctgctcacctgcacggcccatacccctatccagaaacaccgccatcatggtcatgccaggaaaagctgtactcgtacctactcgggggagccggaccggcaggggcacatcagctgttggacccaggctctctacagctcgcagtggaggcatggtacaggcctagctgcctcctcggccgtgacaaggtgaaagagccaagagcgggaagctgcgagaccagcttcaccgaggatcgggaaccacaagaaggaccacctgagcaaccgactggtccaggccaggccgctgaaaatgtaactatccaaacagtaagttacggcgtgcaggaagagttgcgggatcaggaggacgaccaggaagaagaggagagcgacgctaccagtactgagtccgagtcagaggataatttccttacgttgcccccacgggaccatctgggtcttaccctcttctctatgctgtgctgcttctggcccctgggcatcgccgctttctatttctcacagggcaccagtaaggctatctctaagggcgattttaggttggcctcaaccacaagtcggagggcattgtttctggctaccctggctatcgccgttggcgctggcctttacgtggctgtagtcgtggcccttgctgcctacatgtctcagaatggccacggatag

SEQ ID NO: 243000 - DNA, 717 bp, synthetic construct
  misc_feature 1..717: note = Description of Artificial Sequence: Synthetic coding sequence
  source 1..717: mol_type = other DNA
atggagtccctgtccgagttgcagaacccacttcttcccaggagtcctgctcaccttcacgggccttacccttacccagagacacctccatcatggtcctgccaggagaaattgtatagctatctgttaggcggtgcaggacctgcgggagcacaccaattactcgaccccggttctctgcagctcgccgtggaagcctggtacagaccctcgtgtctcctaggaagggataaggtcaaagagccacgagcagggagttgtgaaacctcctttacagaagaccgagagccccaggaggggccacccgaacagcctacaggccctgggcaggccgctgagaatgttacgattcagacagtgagctacggggtgcaggaagaactgcgcgatcaggaagacgatcaagaggaggaagagtctgacgcaacctccaccgagtccgagtccgaggataactttcttacccttcctccgcgtgaccacttaggcttgaccctgttttctatgttatgttgtttctggccattgggtatcgcagcattctatttttcccagggaacatccaaagccatctcaaaaggcgactttagactggcctctaccacgtctagacgcgctctcttccttgccactttggccatcgcggttggcgcaggcttgtatgtggcggtagtggtagcattagcggcttacatgtcacagaacggccacggttag

SEQ ID NO: 243001 - DNA, 243 bp, synthetic construct
  misc_feature 1..243: note = Description of Artificial Sequence: Synthetic coding sequence
  source 1..243: mol_type = other DNA
atggagagcctgagcgagttgcagaacccactgctgccaaggtcccccgctcatctccacggtccatatccataccccgaaacgccaccatcatggtcatgccaggaaaaactctatagctatcttctggggggagctggcccagcgggtgcacatcaactgctggatcccggatctttgcaacttgccgtggaggcctggtaccgtccaagttgcctgttggggagggacaaagttaaatag

SEQ ID NO: 243002 - DNA, 2118 bp, synthetic construct
  misc_feature 1..2118: note = Description of Artificial Sequence: Synthetic coding sequence
  source 1..2118: mol_type = other DNA
atgaactacttgagaagaaggctgtctgactctaacttcatggccaatctacctaacggctacatgactgacctgcagaggcctcagccccctcctcccccacccggtgcccactccccaggagcaacgcccggaccaggaacagccactgccgagcgttcgagcggtgtagctcctgccgctagccctgcagcccctagtcctggatcgtcaggtggcggtggattcttttcttctctctccaacgcagtgaaacagacaaccgcggctgctgctgcaaccttcagtgaacaagttgggggtgggagcgggggtgctgggagaggcggagcagcttcccgcgtactgcttgtgatcgatgagcctcataccgactgggcgaagtacttcaaggggaagaagatccacggggaaattgatatcaaggtggagcaggctgaattcagtgatttgaacctggtcgcacacgcaaatggtggtttttctgtggatatggaggtgcttcgaaatggcgttaaggtggtccggagcctgaagccggactttgtgctcatccggcaacacgctttcagcatggcgaggaacggggactaccgctccctggtcatcggactgcagtatgcaggaatcccttccgtgaatagtttgcactcagtttataacttttgcgacaagccatgggtgttcgcccagatggtcagactgcacaagaagctgggcaccgaagagttcccccttatcgaccaaaccttttacccaaatcataaagaaatgctatcatccacaacctaccccgtggtagtcaagatgggccacgctcactcgggtatgggcaaggtcaaagttgataaccagcacgatttccaagatatcgccagcgtcgtggctttgaccaagacatacgcgacagccgaaccctttattgacgcaaagtacgacgtgagagtccaaaagataggccaaaactataaagcctatatgaggacaagtgtgagtggcaattggaagactaacactggatctgccatgctggagcagatcgctatgagcgatcgatacaaattatgggttgatacgtgttccgagatctttgggggtctggacatttgtgccgtcgaagccctacatggaaaggatggacgagaccatatcatcgaagtggtggggtcctctatgccgctgattggggatcaccaagatgaggataagcagctcatagtagagctggtggttaacaagatggctcaggctctcccaagacagcgccagagggatgccagtcctggccgaggaagccatgggcagaccccaagcccgggagcactgccattgggccgtcagactagtcagcagcccgctggacccccagcccagcagcgacccccacctcaggggggaccaccccagcccggtccagggccacagcgtcaggggccacccttacagcagcggcctccgccacagggacagcagcatctgagcggcctagggccacccgcaggctccccgctgccacagaggctgccttctccaacctcagccccacagcaacctgctagccaggccgctccaccaacccaaggacagggacggcaatctaggccagtagctggcggtccgggagcccctcctgcagcccgaccacccgctagtccatcacctcagagacaggcaggccctcctcaggccacgcgacaaacctcagtaagtggtcctgctccccctaaggcctccggagctccaccagggggacagcaaaggcaaggccctcctcagaagcctcccggacccgctggtcccacaagacaggcctcccaggccggtccggtcccgcgtaccgggcctcccacgacccagcagccacggccaagcggaccaggcccagccggtagaccgaaaccccagttggcccaaaaaccctcgcaggatgtgcccccaccagccactgcagccgctggtggtccgccacatccgcagctgaacaagagccagtccttaacgaacgccttcaatcttccagaacctgcaccaccaaggccttccctgtcacaggatgaggtcaaagcagaaaccattcgttccctgcgaaagagcttcgcatcacttttcagcgattag

SEQ ID NO: 243003 - DNA, 2010 bp, synthetic construct
  misc_feature 1..2010: note = Description of Artificial Sequence: Synthetic coding sequence
  source 1..2010: mol_type = other DNA
atgaactaccttcgacgccgattatctgacagtaattttatggccaacctacccaatggctacatgaccgatcttcagaggcctcaaccaccacccccacctcccggagcacattctccaggcgcaactcccggtcccggaaccgcaacggccgagaggagttccggcgtggcaccggctgcctcccccgctgcaccatcccccggttcctctggaggcggtgggttttttagctctctgagcaatgccgttaaacagactactgccgcagctgccgctacgttttccgagcaggttggcggagggtcagggggtgcgggaaggggcggtgcggcatctcgcgttcttctggttattgacgagccccacaccgattgggccaagtactttaagggcaagaagattcacggggagatagacatcaaggtggagcaggccgaattctctgatctgaatttggtggctcatgccaacggagggtttagtgtggacatggaagtcctacgcaatggggtgaaagtagttagatcactgaaaccagatttcgttttgattcggcagcatgctttttccatggcccgtaatggggattatcgcagcctggtaatcggactgcaatacgccggaataccgagcgtgaacagcctccattcagtttataatttctgcgacaagccttgggttttcgcccagatggtccggcttcacaagaaactgggcacggaggagttccccttaatcgaccagacattctatcctaaccacaaagagatgctgtccagcactacgtaccctgtggttgttaagatggggcacgcccacagcggaatgggaaaagttaaagtggacaaccagcacgattttcaggatatcgcctccgtggtggcccttacgaagacctacgcaacagcagagccttttatcgacgctaaatatgacgtgagagtgcagaagattggccagaattataaggcatatatgcggacgagtgtgagcggaaactggaaaacaaacaccggatccgcaatgctggagcaaattgccatgtctgatcgctataagctgtgggtggatacatgtagtgagatatttgggggattggatatatgtgccgtcgaggccttgcacggtaaagacggacgagatcacattattgaagtggttggaagcagtatgccgctcataggcgatcatcaggatgaggataaacagctgatagttgagctcgtagtgaacaaaatggcacaggctctccccagacagcgtcagagagatgcatcccctggaagaggctcacacggacaaacacccagtcctggcgctctgcccttggggaggcagacaagccagcagcccgctggacccccagctcagcagcgtccgccacctcaggggggacccccacagcctggacctggtcctcaacgccagggtccaccgttgcagcagcgacctcctcctcagggtcagcagcacctatccggcctgggtcccccagctgggtctccactgccacaacggctgcctagccctacatctgctccccagcaacccgctagccaggccgcaccccctactcaggggcaagggaggcagtcacgacccgttgctggagggccaggcgcaccaccagccgctaggccccctgcctctccctcgccccaacggcaggccggtcccccacaggccaccaggcagaccagcgtaagcggaccagccccacctaaggcgagcggagctcccccaggcggtcagcagagacagggtccacctcaaaagcccccaggtccagccggtcccacacggcaggcctctcaagccggacccgtgcccaggactggtcctcccactactcagcaaccgaggcccagcggccctgggcctgcgggaagacccaagcctcagttagctcaaaaaccatctcaggacgtcccccctcctgccacagctgcagctggaggacctccccaccctcagctgaaagcatcccctgcacaggcccagccttag

SEQ ID NO: 243004 - DNA, 1743 bp, synthetic construct
  misc_feature 1..1743: note = Description of Artificial Sequence: Synthetic coding sequence
  source 1..1743: mol_type = other DNA
atgaactttttgcgcaggcgcttgtccgactcctcctttatggcaaatctccctaatgggtatatgactgatctgcagaggcccgacagcagcacttcgtccccagccagcccagctatggagcggaggcatcctcaacctctcgccgcatctttcagctctccaggcagcagtctgttcagtagcctgtcttctgccatgaaacaggcaccccaggcaacctcaggtttgatggagccccctgggccttcgacgccaatcgttcagaggccacggatcctgctcgtgatcgatgacgcccacaccgactggtcaaagtactttcatggaaagaaagtcaacggcgagatcgagatacgggtggagcaggctgagttcagcgagctgaacctggccgcatatgtaacaggcggttgcatggtcgacatgcaggtagtgcgcaatgggactaaagtcgtatctaggtcattcaagccagattttattctggtcaggcagcatgcttatagtatggctctcggtgaagattaccgttctttagtaatcgggctgcagtatggaggcttacctgctgtgaatagcttatactccgtgtataatttctgttcaaaaccatgggtgttcagccagctgatcaagatcttccactccctaggccctgaaaagttcccgctcgtggagcaaaccttttttcccaaccataaaccaatggttacggcccctcactttcctgtcgtcgtaaaactcggccatgctcatgctggcatggggaagatcaaagttgagaaccagctcgacttccaggatatcacatctgtggtggctatggccaaaacatatgcaactacagaggcattcatcgactctaagtacgacattagaatacagaagatcggaagtaactacaaagcgtatatgaggaccagcatctcaggcaactggaaggctaacactgggtcggcgatgctggaacaagttgccatgacagaacgttatagactctgggtggactcatgcagtgagatgttcggaggcctagacatttgtgcagtcaaggcagttcatagtaaggacggacgtgattatatcattgaagtgatggatagctcgatgcccctcatcggagagcatgttgaagaggatagacagctgatggccgacttagtggttagcaagatgtcacagcttcctatgcctggaggcactgcacccagcccattgcggccttgggccccacagattaaatctgcgaaaagccctggccaggcgcagctgggccctcagctcggtcagccccagcccagacccccaccccaaggaggacccaggcaggcccagtccccacagccccagcgctcagggagtcctagtcagcagcgtttatctccccagggccagcagcctctctccccacagagcggttctcctcagcagcagcggagccctggtagcccacaattatctcgggcaagtagtggctcatctccaaatcaggcctccaaacctggggctacactggcttctcagccaaggccacctgtgcagggacggagtacatcacagcagggcgaagaatccaagaagccagccccacctcacccgcacctgaataagtcacagtcactgactaattctctgagcacatctgacaccagccagagagggacaccgagtgaagatgaggcaaaggctgaaacaatccgcaacctacggaaaagctttgcgtctctgttttccgattag

SEQ ID NO: 243005 - DNA, 1743 bp, synthetic construct
  misc_feature 1..1743: note = Description of Artificial Sequence: Synthetic coding sequence
  source 1..1743: mol_type = other DNA
atgaactttctccgcaggagactgtcagattcaagcttcatggccaacctacctaatggctacatgaccgatctgcagagacctgattccagtactagttcccccgcaagcccagctatggaaagacgacacccccagccgctagccgcatcattctcgagccctggaagttctctgttctcatcactctcgagcgccatgaaacaggcccctcaagccacctctggcctcatggagccacctggtcctagcacgccaatcgttcaaagaccacgcattcttctggtaattgatgacgcacatactgattggagtaagtatttccatggtaaaaaggtgaacggagaaattgaaatccgcgtggagcaggctgagttttcggagctgaaccttgcagcctatgtcaccggcggttgcatggtggacatgcaggtggtgagaaatggtactaaggtcgtcagcagaagttttaagccagactttatcctggtgcgccagcatgcttactccatggccttaggcgaagactaccgctcactcgtgattgggctccagtacggcggattacccgcagtcaatagcctgtacagcgtgtacaacttctgtagcaagccatgggtgttcagccagctgattaagattttccactcacttgggcctgagaagtttcctcttgtggaacaaactttttttcctaaccataagccaatggtgaccgccccacattttcccgtagtggttaaactgggtcacgcgcatgcgggaatggggaagatcaaggttgagaaccagctcgacttccaggacattacctcagtcgtagccatggcaaagacctatgccacaaccgaagcattcatcgactccaaatatgacatcagaatacagaagattggaagcaactataaggcatacatgagaacctctatttccgggaactggaaggcaaacactggcagcgccatgctagaacaggtggccatgactgagcggtataggctgtgggttgacagttgctctgagatgttcggaggtctggatatctgtgccgtcaaggctgtacatagcaaagatggcagggactatattatcgaggtgatggatagtagcatgcctctcattggggaacatgtggaagaagataggcagctcatggccgacctggtggtgtctaagatgagtcagctgcccatgcccggaggaacagccccttccccacttcgaccttgggccccacagatcaaatctgcgaagtctccagggcaggcccaattgggcccacagctaggtcagccccagcctcggccaccaccgcagggcggacctaggcaggcccagtccccacaaccgcagcgcagtggctcgccatctcagcagcgcctgtccccccagggccagcaaccgctgagcccccagtctggaagcccccagcagcaaaggagcccgggaagtccacagttgtcccgcgctagctctggaagttcacccaatcaagcttccaagccgggagctacgctcgcctcccagcctcgccctcctgtgcaaggaaggtcaacctcccaacagggcgaggagtccaagaagccagcccctcctcatcctcacttgaacaaaagccagagtctgactaattctctgagcacgtccgacaccagccagcgaggcactcccagcgaggacgaagccaaggcggagacaatccgcaacttacgcaaatccttcgcctccctgttttccgactag

SEQ ID NO: 243006 - DNA, 1335 bp, synthetic construct
  misc_feature 1..1335: note = Description of Artificial Sequence: Synthetic coding sequence
  source 1..1335: mol_type = other DNA
atgaacttcctgcggcgaagattaagcgattccagcttcatggctaacctgccgaatgggtatatgaccgacttgcagcggccagactcatccacatcaagtcccgctagcccggctatggaacgtcgccacccacagccactcgctgctagttttagtagccccggttcttccctgttcagtagtttatccagcgcaatgaagcaggccccacaggctacgagcggccttatggaacctccagggccaagcactccaatcgtgcagagacctagaattctgctggtcattgatgacgcacataccgattggagtaaatacttccatggaaagaaggtaaacggcgagatcgaaattagggtcgagcaggcagaattttctgagttaaatttggctgcgtacgtcaccggcggatgcatggtagacatgcaagtcgttcgcaatgggactaaggttgttagcaggtcatttaagccagactttatccttgtgcggcagcatgcttactccatggcgctgggagaggattatagatcccttgtgatcgggttgcagtacgggggtctcccagcagtgaatagcctctattctgtttataatttttgtagcaagccgtgggtgtttagccagttgatcaagatatttcacagccttggtccagagaaatttcctctggtggagcagacattcttccctaatcataagcccatggtgacagcacctcatttcccagtggtggtgaagctcggacacgcgcatgcaggaatgggtaagatcaaggtcgagaatcagctggacttccaggatatcacgagcgtggtcgccatggccaagacgtacgcaactaccgaggcctttattgacagcaaatatgatatccgtattcagaaaatcggtagcaattataaagcctatatgcgtacttctatctccggcaattggaaagccaacactggctccgcgatgctcgaacaggtcgctatgactgaacgttaccgactgtgggtggactcatgctctgagatgtttggcggacttgatatctgcgctgtgaaagccgtgcactctaaagacggcagggattacatcatcgaggttatggatagttctatgcccctaatcggggaacatgtggaagaagacagacagctgatggccgacttggtggtgtctaagatgagccaactgcccatgcctggtggcacagcaccatcacccctgcgcccatgggcacctcaaatcaagtccgcaaaaagtccaggccaggcacaactgggcccacaattaggccagccacagccaaggcctccgccacaggtgtcttttagcccctag

SEQ ID NO: 243007 - DNA, 342 bp, synthetic construct
  misc_feature 1..342: note = Description of Artificial Sequence: Synthetic coding sequence
  source 1..342: mol_type = other DNA
atgaattttctaagaaggcggctttctgattcctcatttatggccaacctccctaatggttacatgaccgacctacagagacccgactctagtacatcttcacccgcatctcccgcaatggagcgcaggcaccctcagcccctagcagcttcattctcgtccccaggtagtagtcttttcagttcgctatcctctgccatgaaacaagcccctcaggccacctctggactgatggagcctcccggaccttcaacccctattgtgcagcggccacgcatcctcctggtcattgacgacgcccacacagactggtctaagtacttccacggcaaaaaagtttag

SEQ ID NO: 243008 - DNA, 372 bp, synthetic construct
  misc_feature 1..372: note = Description of Artificial Sequence: Synthetic coding sequence
  source 1..372: mol_type = other DNA
atgaacttcttaagacggcgacttagtgatagcagctttatggcgaacctccctaacggttatatgacagacctgcagaggcccgattcgtctacctcatcaccagcatctcctgccatggagagacgccaccctcagcctttggccgcaagcttctcgagccccggatcctctctcttcagttctctatctagcgctatgaaacaagctccgcaagccacttctggcttgatggagcctccgggtccatcaaccccaatagtccagagacctcggattcttctggtgattgacgatgctcacactgattggtcaaaatacttccacgggaagaaggtgaacggggagattgagatccgcgtagaacaatag

SEQ ID NO: 243009 - DNA, 561 bp, synthetic construct
  misc_feature 1..561: note = Description of Artificial Sequence: Synthetic coding sequence
  source 1..561: mol_type = other DNA
atggactctagcatgccactcattggagaacatgtggaggaggacagacagttaatggcagacctcgtggtttctaagatgagccagctccctatgcctgggggaactgctccctccccccttagaccctgggcaccgcaaataaagagtgctaaaagtcctggacaggcccagcttggaccacagctgggacagccccaacccagaccgccaccacaggggggtccacgccaggcccagtcaccccagcagcaacggagccctggctcccctcagctgtccagggcatcatctggcagcagtccaaaccaggcctcaaaacccggagccaccctggcctcccagcctcggccacctgtacaagggcgaagcaccagccagcagggcgaagagtctaaaaagcctgctcctcctcatccccacctaaataagagccagagcctgaccaatagcctctctacatctgatacatcccaacgaggcacacccagcgaagatgaagctaaagccgagactattaggaatttgcggaagagttttgctagcctgtttagcgattag

SEQ ID NO: 243010 - DNA, 1212 bp, synthetic construct
  misc_feature 1..1212: note = Description of Artificial Sequence: Synthetic coding sequence
  source 1..1212: mol_type = other DNA
atgtctcacaggaagttcagtgcaccacgccacggctcgctgggatttctgcctagaaaacggtcttcgcgccaccggggaaaagtgaagagcttccccaaagacgaccccagtaagcctgtgcaccttactgcatttcttggatacaaggctgggatgactcacattgtgcgcgaagtggaccggccagggagtaaggtcaacaagaaagaggtcgtggaggccgtgacaattgtggaaaccccaccgatggtggtggtgggaatagtgggctatgtcgaaactcctcgcggacttcgcacatttaagacggtattcgcggaacacattagcgacgaatgcaaaaggagattttataagaattggcacaaaagtaaaaaaaaagcctttactaaatactgtaaaaaatggcaggacgaggacggcaaaaagcagctggaaaaagatttctcctctatgaagaagtattgtcaggtgatccgcgtcatcgcccacacgcagatgcgcctgctgcctctaaggcagaagaaagcacacctcatggaaatccaggtgaacgggggaaccgtcgccgagaagcttgactgggcacgggagagacttgaacaacaggttcccgtcaatcaggtcttcggccaggacgagatgatcgacgtcatcggggtcacaaagggcaaaggctacaagggtgtgaccagcagatggcacaccaaaaaactgccaaggaaaactcatcgtgggctccgtaaagtggcctgcataggtgcctggcacccagccagggtcgcattttctgttgcaagggcaggacagaaggggtaccaccaccgcaccgagattaataaaaaaatctacaaaatcggccagggctatctgattaaggatggcaagctgattaaaaacaacgcctctactgattatgacctgagcgataaatcgatcaacccactggggggatttgtgcactacggggaggtgacaaacgatttcgtgatgttaaaaggctgtgtagtgggaactaagaagagagtgctcacccttaggaaatccctattggtgcagaccaagaggcgagctctggagaagatcgatctaaaattcattgacaccaccagtaaatttgggcacgggagattccagacaatggaagaaaagaaagcattcatgggtcctttgaagaaggatcggatcgccaaggaggaaggcgcatag

SEQ ID NO: 243011 - DNA, 576 bp, synthetic construct
  misc_feature 1..576: note = Description of Artificial Sequence: Synthetic coding sequence
  source 1..576: mol_type = other DNA
atggagggcggagcgtacggcgcaggtaaagctgggggagcatttgatccctatacgctcgttagacaacctcacactattctccgcgttgtgagttggctttttagtattgtcgtgtttggctctatcgtgaatgagggatacttgaactccgccagtgagggcgaagagttctgtatttacaatcgaaatcctaacgcgtgctcctacggggtggcagttggggtactagcatttctcacgtgtcttctgtacctcgccctggatgtatattttccacagatttcctccgtgaaggatcgaaagaaagctgtgctgtctgatattggggtctctgccttctgggcctttctatggttcgtgggattttgttatctcgctaaccagtggcaagtttccaaacctaaggacaatccgctgaacgagggaaccgatgccgctcgggcagccattgcctttagcttcttttcaattttcacatggtctttgacagccgcactggcagtgcgaagatttaaggacctatcctttcaggaagagtatagcacactgttccctgcttccgcacagccttag

SEQ ID NO: 243012 - DNA, 702 bp, synthetic construct
  misc_feature 1..702: note = Description of Artificial Sequence: Synthetic coding sequence
  source 1..702: mol_type = other DNA
atggagggcggagcatacggagccggaaaagctgggggagccttcgatccttacaccctggtaagacagccccataccatcttgagggtggtgtcttggcttttctcaatcgtagtattcggctctatagtcaacgagggttacctgaactctgcatccgaaggtgaggagttctgcatttacaaccgaaatcccaatgcttgctcatatggcgttgccgtaggcgtgctggcttttctgacctgcctcttgtacttagctctggacgtctactttccacagatcagcagcgttaaggataggaagaaggcagtcctgagcgatatcggcgtcagtgccttctgggccttcctgtggttcgtgggattttgttacctggccaaccaatggcaggtttccaagcccaaggataaccccctaaacgaaggtactgacgctgctagagcggctatcgcctttagcttttttagcattttcacttgggctggccaagccgtactcgcattccagcgttaccagataggcgctgattcagccttattcagccaggactatatggatccttcgcaggactccagcatgccatacgcaccatatgtcgaacccacaggcccagaccctgccggaatggggggaacctaccagcaacccgctaatacatttgatacagagccgcagggataccagtctcagggatactag

SEQ ID NO: 243013 - DNA, 579 bp, synthetic construct
  misc_feature 1..579: note = Description of Artificial Sequence: Synthetic coding sequence
  source 1..579: mol_type = other DNA
atgctcacgcttgaatttggaatcctggagtttgacccgtcatggatcggttcctggacgcagcggtcttgggtctcctggaggtctcggcctggttgcgagctgtttagtattgtcgtattcggaagcattgtcaacgaagggtacctgaattccgcatcagagggggaagagttttgcatttacaaccgcaacccaaatgcatgcagttatggcgtggccgttggggtgctggcattcttgacctgtctactgtatctggccctggacgtgtactttcctcaaatctcttccgtgaaagataggaagaaggcagtgctatcagacattggggtaagcgcattttgggcgttcctgtggttcgtaggtttctgttacctggctaatcagtggcaagttagcaaacccaaagataacccgttaaacgagggaaccgacgcggcacgcgcagctattgcattctccttttttagtatctttacctggtccctgaccgcggcactcgccgtccgcagatttaaggacctgagctttcaggaagaatactccacactgtttcccgcttcagcccagccctag

SEQ ID NO: 243014 - DNA, 510 bp, synthetic construct
  misc_feature 1..510: note = Description of Artificial Sequence: Synthetic coding sequence
  source 1..510: mol_type = other DNA
atggagggcggtgcttacggagccggtaaagccggaggagcttttgacccttacacactggttcgtcaacctcacacaattctccgcgtggtatcatggctgttttcgattgttgtattcggctccatcgtgaacgagggttatctgaacagcgctagcgaaggggaagagttttgcatttataaccggaaccctaatgcctgttcgtacggcgtggcagtgggcgtcctagctttcctgacctgtttactatatttggcccttgatgtctacttcccccagatatcttccgtcaaagaccggaaaaaagcagtgctgtccgatatcggggtgtctgccttctgggctttcctgtggttcgtaggcttttgctatctcgcaaaccagtggcaggtttccaagcctaaagataatcctctcaacgaggggacagacgccgctcgggcagcgatcgcattttcattcttctctatcttcacttggcgcagcggagccactagtcccccttag

SEQ ID NO: 243015 - DNA, 297 bp, synthetic construct
  misc_feature 1..297: note = Description of Artificial Sequence: Synthetic coding sequence
  source 1..297: mol_type = other DNA
atggctagtggcgctggcggaagctgggggagaagcccccctcagtctgccgtacctacgccttgggttacgtttctgcaacccctgtcctgggccgtgccaccagcgcctccccagcccggtcgtgttaaggaagatctgctggaactgatgatgctgcagaacgcacagatgcaccagctgctgcttagcagactggttgccggagcactgcagcctaggcccgcttccccctgccctcaggagagttgtgcccctactccgacgcctcaatgccacagggactgcgggtgctag

SEQ ID NO: 243016 - DNA, 690 bp, synthetic construct
  misc_feature 1..690: note = Description of Artificial Sequence: Synthetic coding sequence
  source 1..690: mol_type = other DNA
atggagggggctagttttggcgctgggagggccggagccgctctcgacccagtgtctttcgcgaggcgtcctcaaactcttcttagggttgcaagttgggttttttcaatcgcagtgttcggcccaatagtaaatgagggctatgtgaacactgacagcggtcctgagctgagatgtgtcttcaacggtaacgctggtgcctgtcggtttggagtcgcgctgggcctgggggcttttctcgcctgtgcagcttttctgctgctagacgtgcgctttcaacagatatctagcgtccgagaccgccgtcgcgctgtccttctcgacttaggcttcagtggcctctggagctttttgtggtttgtgggattttgctttctgacaaaccagtggcaaagaacagccccaggaccagcaaccacccaggcaggagacgctgcacgggcagctatcgccttctccttcttcagcatcttatcctgggtcgcccttaccgtcaaggccctacagcggtttcgcctcggaacggacatgagcttattcgccaccgagcaactctcaaccggggcaagccaggcctatcccggatatccggttggcagtggcgtggaggggaccgaaacctaccagtccccaccgtttacagaaacactggatacttcgcccaagggctaccaggtccccgcttactag

SEQ ID NO: 243017 - DNA, 438 bp, synthetic construct
  misc_feature 1..438: note = Description of Artificial Sequence: Synthetic coding sequence
  source 1..438: mol_type = other DNA
atggagggtgcctccttcggtgcaggtcgcgcaggcgctgccttggatccggtcagcttcgcacggaggcctcaaactctgctccgggtcgcatcctgggtgttcagcattgctgtttttggaccgatcgtgaatgaaggttacgtgaatacagactctggcccagaactccggtgtgtcttcaatggcaacgccggtgcatgccggtttggcgtggcactcggattaggggctttcctggcatgcgctgcttttctgctgctcgatgtgcgttttcagcagtccggagggagggggaagaccccgccttctccgcaagactggggcagttggccactgtttccaagtcatgtgccagtgggctccgactgcttagtgagcgtgatggtggtgcgccctgtgcggtctcactcaccacttagcctgactggctgttag

SEQ ID NO: 243018 - DNA, 705 bp, synthetic construct
  misc_feature 1..705: note = Description of Artificial Sequence: Synthetic coding sequence
  source 1..705: mol_type = other DNA
atgcacattcccaagtctcttcaagagctggctaacagtgaagccgtgcagtttctgcggagacccaaaacaattacaagggtcttcgaaggagtctttagtctgattgtgttttccagcttgcttaccgacggctaccagaacaagatggaatcacctcagctccattgcattctgaactcgaatagcgtggcatgcagttttgctgttggcgctgggtttttggctttcttgtcatgtctcgcgttcttggtgctggacactcaggagaccagaattgcgggtaccagatttaaaactgctttccagctcctggacttcatcctggctgtgctgtgggcagtcgtgtggttcatgggcttctgcttcctcgccaatcagtggcaacactcccctccgaaagaatttctgctgggctcatcaagcgcccaggccgcaattgcatttacctttttctccatcctagtctggatttttcaagcctatttagctttccaggatctacgcaatgacgcccctgtcccatacaaaagattcctcgacgagggaggcatggtcctgactaccttacccctcccttccgcaaattcaccagtgaatatgcctaccaccggcccaaattccttatcgtacgcaagttcagcactctccccatgcctgacagcgcctaaatccccacgcttggccatgatgccagacaactag

SEQ ID NO: 243019 - DNA, 4722 bp, synthetic construct
  misc_feature 1..4722: note = Description of Artificial Sequence: Synthetic coding sequence
  source 1..4722: mol_type = other DNA
atggccttcagcaaaggtttcagaatctaccacaagctggatccacccccattcagcctcattgtggaaactaggcacaaggaagagtgtctaatgtttgaatccggggctgttgccgtgctttctagtgctgaaaaagaagccatcaaaggcacctattctaaagtcctggatgcttatgggttactgggcgtcctgcgcctgaacctgggtgacaccatgctacattatctcgttttagtgaccggatgtatgtccgtcggcaaaattcaggaaagcgaggttttccgggtgacaagcactgagtttatttctttgaggatcgactcatccgacgaggatcggatttccgaggttagaaaggtactcaactccggcaacttttatttcgcttggtcggcctcagggatttccctggaccttagtctaaacgcacacaggagtatgcaggaacagacaaccgacaacaggtttttttggaatcagtctctgcacctgcatttgaagcattatggagttaattgtgacgactggctccttagattgatgtgcggaggagtggagataaggacgatttacgccgctcacaagcaggcaaaagcttgcctgatttctcgcttgtcatgcgagagagccggtacacgatttaacgtgcgtggaactaacgacgacggccatgtggcaaactttgtggaaaccgaacaggtggtttatctggacgatagtgtcagctcttttatccaaatcagaggaagcgtccccctgttctgggaacaaccaggtctacaagtgggctcccacagggttcgcatgagccgcggtttcgaagctaacgcccctgcatttgataggcactttcggacattgaaaaatctgtacggaaagcagatcatagtaaacctcttggggtctaaggagggcgagcatatgctgtccaaagcattccagtctcacctcaaggcgagcgagcatgccgcagatatccagatggtgaatttcgactatcatcagatggttaagggagggaaggccgaaaaactgcactccgtgctaaagccccaggttcagaaattcctggactacgggttcttctactttaacgggagcgaggttcagcggtgtcagagtggcacagtgcggactaattgtttggattgtctggaccgaacaaactctgtgcaagcattcctgggccttgagatgctagctaaacagttggaggcactggggttggccgaaaagccacaattagtgaccagattccaggaagtgtttcgctcaatgtggtctgtgaacggtgattcaatctccaagatctacgcaggtacaggcgctcttgaggggaaggccaagttgaaagacggtgctcggtcagtcacgcgtactatacagaataatttttttgattcttccaagcaagaggccatcgacgtgttgcttctcgggaacaccctcaactccgacttggccgacaaggcaagggccctcctgaccaccggttctcttagggtaagtgagcagaccctgcagagcgcatcctccaaggtcttgaaaagtatgtgtgagaacttctataaatactcaaaacccaaaaagattcgtgtatgtgtgggaacatggaacgtgaatgggggaaagcaatttcgatccatcgcatttaagaaccaaaccttaactgactggcttctcgacgctccaaagttggccggtattcaagaatttcaggataagcgttctaagcctactgacatcttcgccatcggatttgaagagatggtggagctaaacgccggtaacattgtctcagcttcaactaccaaccagaagctctgggccgtggagcttcagaagacgatctcgagggataacaagtacgtcctactggctagtgagcaacttgtaggagtgtgcctattcgtgtttatcaggccgcagcatgctccatttattcgcgatgtggccgtggacacggtgaagacagggatggggggagctacagggaataagggcgctgtggccatccggatgttgtttcacacaacttctttatgtttcgtgtgttctcacttcgctgccggtcagagtcaggtgaaagaacggaatgaagacttcatcgagatcgcacggaaactgtccttccccatgggccgaatgctgttttcccacgactacgtcttttggtgcggagactttaactaccgcatcgacctgccaaatgaggaggtgaaagaacttatccgccaacaaaactgggattcgctcattgctggagatcagctcattaatcagaaaaatgccggacaggtctttaggggctttttggagggcaaagtcacattcgctcctacttataagtatgacctgttttctgacgattacgacacgtctgagaagtgtagaacacctgcctggacagatagagtcctctggagacgcagaaaatggccctttgataggtcagctgaagatcttgatctcctcaatgctagctttcaggatgaatcaaagattctgtatacgtggacaccaggcaccctgctccactatggcagggccgaactcaagacatccgaccatcgacctgtcgtggcgttgatagacatcgacatctttgaagtggaggctgaggaaaggcaaaatatctataaagaagttattgccgtgcagggacctcctgacggtaccgttctggtgagcattaagtcctcacttcccgagaacaacttctttgacgacgcactgatagacgagttgcttcagcagtttgcgagtttcggtgaggtgatcctaattcgattcgtcgaagacaaaatgtgggtgaccttcctggaggggtcttctgcactgaacgtactctcactcaacggtaaggaacttctaaataggaccattacaatagctttgaagtcaccagattggataaagaatctggaggaggaaatgtcccttgaaaagatcagtatcgctctcccttcaagcaccagcagtaccctgctgggcgaagacgccgaggtagctgcagactttgatatggaaggtgacgtggacgactactctgcagaagtcgaagagctcctgcctcagcacttgcaaccgagcagtagctcaggcctgggtacatctccaagtagctcccctcgcactagtccatgccaatcgcccactatttcagagggacccgtaccaagtctgccaatcaggcctagtcgtgcaccgagtaggacccccggaccgccaagtgcccagagcagtcccatcgacgcccagcctgccactcccctgccacagaaggatccggctcagccgttagaaccaaagcggcctccccctccgcgtcctgtcgccccaccaactcgccctgccccaccacagaggcccccacccccatcgggtgctcgttctcctgcccctactagaaaagagtttggcggaataggagctcctccaagccccggagtcgccagacgggagatggaggcaccaaagtcgcctggaacaactcggaaggacaacatcggacggtctcaacccagcccccaagcaggtctagccggtcctgggccagcaggctattctactgccaggcccacaatacctcctagggccggagtgatctctgctcctcagtcccacgccagggcatccgccggaaggttgacgcctgaatcgcagagcaaaactagcgagaccagcaagggctctacctttctgccagaacctttaaaaccacaggccgctttccctccacagtcatctttgcctccccctgcgcagaggctgcaggaaccactcgtgccggtcgccgctcctatgccacaaagtggcccacaacccaatctggaaacacccccacagccaccacctcggtcacgatcatcccatagcttgccctcggaagcttcctcccagcctcaggtcaaaactaacggcatctcggatggcaagcgcgaaagcccactgaaaatcgatcccttcgaggacctctcgtttaaccttctggccgtctccaaggcgcagctcagtgtgcaaaccagcccagtgcctactcccgatcccaaacggttaatccagttgccatccgccacccagtccaacgtgctctcctcagtgagttgcatgccaaccatgccacccattccagcccgttctcagtcccaggagaatatgagatcgtctcctaacccttttatcacaggtttaacccgaacgaatcccttctccgaccggaccgcggcaccgggaaatccattcagagcaaagagtgaggagagcgaggctacctcctggttcagtaaggaagagcccgtgactatcagtccgtttccaagcctgcaacctctgggccataacaagtctcgggcttcctcaagcttggacggtttcaaagacagttttgatctgcagggacagtctaccttaaaaatctccaacccaaagggctgggtgacgttcgaagaggaagaagacttcggcgtgaagggaaaatccaagtccgcatgctcagatctgctgggaaatcagccgtccagtttctccggctccaacctgactcttaacgacgactggaacaagggcacgaacgtgagcttttgcgtgctcccaagccgtcggcctcctccaccccctgtcccgctcttacctcccggtacctcacctcccgttgatccattcactaccctcgcctccaaagcgagccctactctcgacttcactgaacgctag

SEQ ID NO: 243020 - DNA, 3888 bp, synthetic construct
  misc_feature 1..3888: note = Description of Artificial Sequence: Synthetic coding sequence
  source 1..3888: mol_type = other DNA
atggcgtttagtaaagggtttcgaatctatcacaagctggatccccctccattttcactgatcgttgaaacgaggcataaggaggaatgcctcatgttcgagagcggagccgtcgctgtcctgtcttctgcagagaaggaagctatcaaaggaacttactctaaagttctggatgcttacggactgcttggagtcttgagacttaacctaggggacacaatgctgcattacctggtactagtaacaggatgcatgagcgtggggaagatccaggagagcgaggtatttagggtcacatccacggaatttattagcctccgaattgattcaagcgacgaagaccggattagtgaggtaagaaaagtgttgaacagtgggaacttttactttgcttggtcggctagcggcatctcgttagacctgtcattaaacgctcaccgcagcatgcaagagcagaccacggacaacaggttcttctggaaccagtctttgcacttgcacttaaagcattacggagtgaattgtgacgattggttgcttcgcttgatgtgtggcggagtggagatccgtacaatttacgctgctcacaagcaagcaaaagcttgcctgatctctagactgtcctgcgaacgcgctgggacccggttcaacgtgcggggaaccaacgacgatgggcacgtggctaacttcgtggaaactgagcaggtggtctatttagacgatagtgtgtcttcattcatccaaatcagaggctcggtgccgctattctgggaacaacctggactacaagtcgggagtcaccgagtgcgaatgtccaggggctttgaggctaatgcaccagccttcgatcggcactttcgcacgctgaagaacctgtacggcaagcaaattattgtcaatctgctggggagtaaggaaggtgaacacatgttatccaaggctttccagtctcaccttaaagctagtgaacacgctgctgacatccagatggtcaactttgattaccaccaaatggtgaagggcggaaaagccgagaaattgcatagcgtactaaaaccacaggtgcaaaagtttctcgactatggcttcttttattttaacggatcagaggtgcagagatgccagtccggaactgtgcgaacgaactgtttggactgcctcgataggaccaacagcgtacaggccttcctaggcctggaaatgctggctaagcaactagaagccctgggtctggcagagaaacctcagctagtaacgcgctttcaggaagtgtttaggtctatgtggagcgtgaacggagattccatatctaagatctatgcagggacgggtgcgttagaaggaaaggccaagctgaaggacggcgcaaggtccgtgacccgcactattcagaataacttcttcgattcttctaaacaggaagcaatagacgttctgctgttggggaacactctcaatagcgacctggcggataaagcaagggcacttctgaccacgggctcactgcgagttagcgaacagacactccaaagcgctagctctaaggtgttaaagagcatgtgcgaaaacttctataagtacagcaagccaaaaaagatcagggtgtgtgtcgggacctggaatgtaaacggaggtaagcagtttcgctctatcgcattcaaaaaccagaccctaacagactggctgttggatgcgcctaagctcgccggtatacaggagttccaagataagcggagcaagcccaccgacatcttcgccattggatttgaggaaatggtcgagctgaacgccggaaacatagtatcagcttccaccacaaaccagaaactctgggcggtggagctacagaaaaccataagccgggataacaagtatgtcctattggcttcagagcagctggtcggggtatgcttgttcgtgtttatcagaccccagcacgccccttttatccgagatgtggccgtagataccgtgaaaacaggaatgggcggtgctacgggaaataagggagccgttgcaatccgcatgttattccacacaaccagtctgtgctttgtttgcagccatttcgccgctggacagagtcaggtcaaggagcggaacgaggactttattgagatcgccaggaagctgtccttccctatggggaggatgctgtttagccatgactatgtgttctggtgtggggacttcaattataggattgacttgccgaacgaagaggtgaaggagctgatcaggcagcagaactgggatagcttgatagccggtgaccagctcattaatcagaagaatgccggtcaggtcttccggggttttctagagggcaaggtcacgttcgcacctacgtacaagtacgacttattctccgacgattacgacaccagtgagaagtgccgaacacccgcatggacagacagggttctctggagaagacgcaagtggccttttgaccgcagcgcagaggatttagacctgcttaacgcttccttccaggacgagagtaaaatcctttatacctggactcccggaactctgctccattacggcagggcagagctgaaaacctcagaccaccggccagttgtcgcactcattgatatcgacatattcgaggttgaagctgaagaacgtcaaaatatctacaaagaggtgattgcagttcaaggaccaccagatggcacagtgctggtgtcaattaagtctagcctgcccgagaataactttttcgacgatgccctgattgacgagctgttgcagcaatttgcctcttttggcgaagtgatcctgattagatttgtggaggacaaaatgtgggtcacattcctcgaggggagtagtgccctgaacgttctgagcctgaacggtaaagagttactgaacaggaccatcaccatcgcgttgaaatcccctgactggattaaaaacctcgaggaagaaatgtccctggagaaaatctccatcgcactgccgagctccacgtcgtccaccctgctgggggaggacgccgaggtagccgctgatttcgatatggaaggcgatgtcgacgattactcagccgaggtggaagagctgctgccccaacatttacagccatcaagcagctccggcttaggaacctccccatcatcgagcccgaggacgtccccttgtcagtcccccacaatctcagaggggccagtgcctagtctgccaataagaccttctcgcgcaccgagccgtactccgggacctcctagcgcccagagtagccccattgacgctcagccggctacgccactgccacagaaggatcccgcacagcccttggagcccaagagaccaccaccaccacggcctgttgccccaccgactcggcctgctccgccacagaggcctccacctccaagtggagcccgaagccccgctcctacacgcaaggagttcggggcaccgaaatcaccaggcactactcggaaagacaacatcggtaggtcccaaccgtctcctcaggccggattagcagggcctggtccagcgggatacagcaccgccagacctaccattccaccaagagctggcgtgatcagcgctccacaaagtcatgcccgagcctccgcagggagacttacgcccgagtcccagtccaagacatccgagactagtaaaggtagtacatttctgcctgaacccctaaagccccaggccgcttttcctccccagagctccctgccgccaccagcacagcggttacaagagcctctcgtgccagtagcagcccctatgcctcagtccggccctcagcctaatctggagaccccaccacaacctccaccaaggtcaaggtcatctcatagcctcccaagtgaagcatcatcccagccgcagcaggagcaacccagtggatag

SEQ ID NO: 243021 - DNA, 4581 bp, synthetic construct
  misc_feature 1..4581: note = Description of Artificial Sequence: Synthetic coding sequence
  source 1..4581: mol_type = other DNA
atggccttcagtaagggctttaggatctatcataagttagaccccccaccatttagcctgatagttgagaccaggcataaagaagagtgcctgatgtttgagtctggagcagtggcagtgctgtcctctgccgagaaggaagccataaagggtacttattccaaggtgttggatgcctatggactgttaggcgtgcttcgcctgaatcttggagacaccatgctgcactacttggtgctggtcacaggctgcatgtccgtgggcaaaatccaagaatctgaagtcttcagagtgacttccaccgaattcatttctctcaggatcgactccagcgacgaggatcgcatatctgaggtgcgaaaagtgcttaattctggaaacttttatttcgcctggagcgcatctgggattagcctggatctgagcctgaatgcccaccgatcaatgcaggaacaaactacagacaacagattcttctggaaccagtcactgcacttgcacctgaagcactatggtgtgaattgtgacgattggcttctaaggctgatgtgcggcggtgtggagatcagaactatttacgctgcacacaaacaggccaaggcctgtctaatctcgcgactgagttgcgagcgggctggcactcggttcaacgtgcgcggtactaacgatgacggccacgtagcaaacttcgtcgagacagagcaagttgtctacttggatgactccgtaagctcatttatccagatccggggatctgtaccattattttgggagcaacccggactgcaagtcgggagccaccgtgtcaggatgtctcgcggatttgaggctaacgctcccgcattcgataggcactttcggactttgaaaaatttgtatgggaaacaaatcatcgtgaacctgctggggtcaaaagaaggagagcacatgcttagcaaggcattccagagccatctgaaggctagcgaacacgccgctgacatccagatggtaaattttgactaccatcagatggtaaagggcggaaaagccgagaagcttcattctgtactgaagccccaagttcagaagttcctggactacggattcttttatttcaatgggtccgaggtgcaacgttgccagagtggtacggttagaactaactgtctcgactgtctggatcgcacaaactcagtgcaggcctttctcgggctggagatgcttgccaaacagcttgaggctctgggcctcgcggaaaagcctcagctggtaacccgattccaggaggtgtttagaagcatgtggtcggtcaatggagattcaatctctaaaatttacgctggcacaggggctctggaggggaaggccaaagccggtaagttaaaagacggcgctaggtctgtgactagaacaatccaaaataacttcttcgattcttctaagcaagaggccatcgacgttctgcttctagggaacaccctgaatagcgacctggctgataaagctagggcactcctcaccacgggatctctacgcgcatcaagtaaggttttgaaaagtatgtgcgaaaatttctacaaatacagcaagcccaaaaagattagagtatgcgtcggcacctggaatgtgaatggaggaaaacagtttcggtcaatagcctttaaaaaccagacgctaaccgactggttacttgacgcaccgaagctcgccggaattcaggagttccaggacaagcgaagtaaacccaccgacatatttgctattggatttgaggaaatggtcgaactcaatgcagggaacatcgtttcagcctctacaaccaaccagaaattgtgggccgtcgagctgcagaagaccatctcccgtgataacaagtacgttttactcgctagcgaacagctagtgggggtgtgcctgttcgtgtttatcagacctcagcatgctcctttcattagggatgtggcagtcgacactgtcaagacaggcatgggcggtgcgactggcaataaaggagccgtggcaattaggatgctttttcacacaacctctctgtgtttcgtttgctcccacttcgcagccggtcagtctcaggtgaaggaaaggaatgaagactttatagaaatcgcgcgtaaactctcatttccaatggggcgaatgttattctctcacgactacgtgttctggtgcggcgacttcaattaccgcatcgatcttcctaacgaagaggtgaaagagttgataagacaacagaattgggattccttgattgcaggggatcaacttatcaatcagaagaatgctggtcaggtctttagagggttccttgaaggcaaagttacgtttgccccaacctacaaatacgatttgttttctgacgactatgacacgagcgagaaatgccgcacccctgcctggactgaccgagtgctgtggcgacgtaggaagtggcctttcgacaggtccgccgaagacctggacctgttgaacgccagtttccaggacgagagtaagatactctatacgtggactccaggaactcttcttcattacgggcgagcagaattgaaaacatccgatcatcgtccagtggtcgccctcattgacatcgacattttcgaggtggaggctgaggaaaggcaaaatatctacaaggaagtgatcgccgtgcagggtcctcccgatggcactgtgctggtgagtatcaagtctagcctgcctgagaacaactttttcgatgatgcgttgatagacgaactcctgcagcagtttgcaagttttggtgaagtgatcctcattcgcttcgtagaggacaagatgtgggtgacatttctggagggctcctctgccctgaacgtcctttccttgaacgggaaggaactgctgaaccgcactatcaccatagccctcaagtctcctgactggatcaagaatctggaagaggagatgtctctcgagaagataagcatcgccctcccttcttctactagcagcaccctgttaggcgaggacgccgaggtggcagccgacttcgatatggagggagacgtagacgactactctgcggaagtggaggagttactccctcagcatctgcagccttccagctcctcagggctgggcacctcccctagcagttctcccagaacatctccctgtcagtcccccaccattagtgagggcccagtgccgtcactccctattagacccagccgcgcaccaagtagaacgcctggcccaccttcagcccagtccagtccaattgatgcccaaccagccactcccctgccccagaaggatcccgcacaacccctcgagccgaaaagaccacccccaccaaggcctgtggccccacctacacgtccagcccctccacagagacctccccctccaagcgggaggtctcagcccagcccccaggccggactggccggaccaggccctgccggatattcgacagccagaccaacaattccaccacgcgctggagtaatctctgccccacagtcacatgcacgtgcctccgccggtagactgacgcctgagtcacagagcaaaacttcagaaacatcgaaaggcagcacctttctgccggaacccctgaagcctcaggctgcttttcctccacagtcatcccttcccccacctgcccagagactgcaggaaccactggtgcctgtggcagcccctatgcctcagtccggccctcagccaaatctggagacacccccacagccccctccccgatccaggtcatctcattctctcccgtccgaagccagttcacagccgcaggtcaagactaacggtatatcagacggcaaacgggaaagcccactcaaaatcgaccccttcgaggacctgtcctttaacctgctcgccgtctccaaggcccaactgtccgtgcaaacatctcccgtcccaaccccggaccctaaacgactgattcaactcccctcagcgacccagtcgaatgtcctcagttcagtctcttgcatgcccaccatgcccccaattcctgccaggagccaatcccaagaaaacatgagaagctctccgaatcccttcatcactggactcactagaaccaatccgttctcagatagaacagccgctcccggtaacccgttccgtgctaagagcgaggagtctgaagctactagctggttctccaaggaagagcctgtgaccatctccccctttcccagtttacagcccttggggcacaacaagagcagagcatcttcctctctggatggcttcaaggattcctttgacctccagggtcagtcaactctgaaaatctctaatcccaaaggctgggttactttcgaggaagaggaagattttggcgtgaagggtaagtcgaagtcagcctgttcggatctcctcggcaaccaaccaagctccttctctggcagtaatctcactttaaacgatgactggaacaaaggcaccaatgtttctttctgtgtgcttccttctcgaaggccaccccctccccctgtcccactcctgccgcctggaacaagtcccccagttgaccccttcactacactggcttccaaagcatcccctacgctggatttcacggagcgatag

SEQ ID NO: 243022 - DNA, 4053 bp, synthetic construct
  misc_feature 1..4053: note = Description of Artificial Sequence: Synthetic coding sequence
  source 1..4053: mol_type = other DNA
atgagaaagcggtgggcctgttggtcaggtagtgatgctccaggaggatgtggtggcggatgcgggcgtcgcagacgtcgcagtcgacgcaagcgcgcagccagcgaagagagaaggatggctttcagcaaaggatttcgcatctaccacaaactggatccccctcctttttcactcatcgtggaaacacggcataaagaagagtgtctcatgttcgagagcggtgccgtcgctgtgctctccagtgcggagaaggaagcaattaagggtacttattctaaggtgctcgacgcttacggattgcttggggtgctgcggctgaacctcggcgacacaatgctgcactacctggtcttggtgacagggtgcatgagcgtcgggaaaattcaagaatccgaggtgttccgggtgacatccacagagttcatcagcctgcgcatcgactcctcagacgaggatcgaatctctgaggtgaggaaagtcctcaacagtggaaatttctatttcgcttggtctgcctccgggatttcgctggatttgagtcttaacgcacatcggtcgatgcaggaacagaccaccgataatagatttttttggaatcagtcactgcacctccacctcaaacattacggcgtgaattgcgacgattggctcttaagactcatgtgtggaggagtagagatcaggacaatctatgccgctcataaacaagctaaggcctgtctgatttctagactgtcctgcgaaagagctggtacacggttcaatgtcagaggcaccaatgacgatgggcatgtagctaactttgtggagacagagcaggtggtctatttggacgactccgtgtcttccttcatccagattcgcggttccgtgccactcttctgggaacagccgggtctgcaggttggctcacaccgggtgagaatgagccgagggtttgaggcaaacgcccctgccttcgaccgccattttcgaaccttgaaaaacctatacgggaaacagatcattgtcaacctcctgggatcaaaagaaggggaacacatgttgagcaaggcattccagagccatttaaaggctagcgagcatgctgccgacattcagatggtgaactttgactatcaccagatggtcaagggagggaaagcagaaaaactacacagcgttctcaaaccacaagtgcagaagttcttggactacggcttcttctatttcaatggcagcgaggtccagcggtgccagtcaggaacagtgaggacaaattgccttgattgcttggaccggactaattctgtgcaggcttttctggggctagaaatgctggccaaacagctcgaagcactgggcctggcagagaaacctcagctcgtgacaaggtttcaggaagtctttcgctccatgtggtcagtgaatggagacagcatatccaagatatacgctggaacaggcgctttagagggaaaggctaaactgaaggacggagcccgttctgttactcggactatccagaataactttttcgatagcagtaagcaggaggcaatagatgtgctcctgctgggtaacaccctcaactctgatctggctgacaaagccagagccctcctgacaactggatctcttagggtgagtgaacaaaccctgcaaagcgcatcgtctaaggtactgaaatctatgtgtgagaacttttacaagtactccaaacccaagaagatccgtgtgtgtgtgggaacctggaacgtaaatggcggtaaacagtttcgctcaatcgcctttaagaatcagacgcttaccgattggctgctggatgcacccaagctggctgggatccaggaattccaggataagaggtccaaacccacagacatcttcgccatcgggtttgaggaaatggtggagctgaacgccggtaatatcgtgtctgcgtcaacaactaatcagaaattgtgggcggtggagttgcagaagacgatatccagagataataaatatgttttgctggcaagcgaacagctggtgggggtatgcctgttcgtgtttatcaggccccagcacgcccctttcatccgcgacgtcgctgtggatactgtcaaaacaggcatgggaggggcaaccggaaataaaggagctgtcgctattcgcatgctgtttcacactacttccctgtgcttcgtgtgcagccactttgcagccggtcagtcacaggtgaaggagaggaacgaggacttcatcgagattgcaagaaagctcagttttcccatgggcagaatgcttttctctcatgattatgttttctggtgcggggatttcaattaccgtattgacctgcctaacgaggaggttaaagaactgatacggcagcagaattgggattctctgatcgccggtgaccaactgatcaaccagaaaaatgcaggacaggtgttcagggggttcctggagggtaaggttaccttcgctccgacttacaaatatgacctcttttctgatgactacgacacatctgaaaaatgtcggacccctgcatggactgaccgcgtcctctggagacgcagaaagtggccctttgatcgcagcgccgaggatctggatcttctgaatgcttccttccaggacgagtcgaagattctgtatacatggacaccaggcacactcctgcactacggaagggccgaattgaagacaagcgatcaccggccagtggtcgccctaattgacatagacatattcgaagttgaggcagaagagcgccagaacatctacaaagaggtaattgccgtgcaagggccacctgacggaactgtattagtatccatcaagagctccttgcctgagaacaatttctttgatgacgctctgatcgacgaactgctccagcagttcgcctcatttggcgaagtaatattgattaggttcgtggaagacaagatgtgggtcaccttcctagaaggatctagtgccctaaacgttctcagcttgaatgggaaggaactgctgaacaggacaattaccatagccctgaaaagtccagattggataaagaacctcgaggaagagatgagtctggagaaaatttcaatcgcgctgccctcctcaaccagcagcaccctgctaggagaagacgcagaagttgctgctgacttcgacatggaaggggacgttgacgattactctgccgaggtggaggagctcttgcctcaacacctgcagccatcaagttcttccggcctcgggacaagcccgtcctcatctccccgtacatctccatgccagagccctactatttcagaaggacctgtgccgtctcttccaattcgaccatcgcgggcaccaagccgcactcccggtcctcccagtgcacaatcctcccccattgatgctcaacccgcaacccctctcccccagaaagaccctgcacagccactggaaccaaaaagacctcctccacctcgccctgtcgctccacccacgcgcccagcaccacctcaacgaccaccccctccatcaggagcacgcagccccgctcctacgcgcaaagaatttggaggaattggcgctcccccttctcccggtgtggccagacgtgaaatggaggcaccaaaaagccctggtacgactcggaaggacaacatcggaaggtcacagcccagcccacaagcaggactggccggaccgggaccggcaggatattcaaccgctcggcctaccattcccccacgggctggggtaatcagcgctcctcagtcccacgctagggcaagtgcaggacggttgacacctgaatctcagagcaaaacatcagagacctcaaaaggtagtacctttctgcccgagccactgaagccacaggctgccttcccacctcagtctagcctgccgccacccgcacagcgattacaggaacctctggtcccagtcgccgcaccaatgccacagtctgggcctcaaccaaatctggaaaccccccctcaacctccccctagaagccgctctagtcatagcctaccctcggaggcctccagccaaccgcagcaggagcagccaagcggctag

SEQ ID NO: 243023 - DNA, 4839 bp, synthetic construct
  misc_feature 1..4839: note = Description of Artificial Sequence: Synthetic coding sequence
  source 1..4839: mol_type = other DNA
atgagaaagagatgggcttgttggagtggatcagacgctccaggaggctgtggaggaggctgcgggcgtcgcagacgacggagcaggcgcaagcgagccgcttccgaggaacgtcgaatggctttcagcaaaggctttcgcatctatcacaaactagacccaccccctttttcacttatcgttgagacacgtcacaaggaggaatgcctgatgttcgagtctggagcggtggctgtgctctcatctgctgaaaaagaagctataaaaggaacttacagcaaggtgctcgatgcctacgggctccttggagtcttgcggctaaatcttggggacactatgctgcactaccttgtactggtaactggctgcatgtcggtggggaagatccaggaaagcgaggtcttccgggtcacttccacagaattcatcagcctgcgtattgacagcagtgatgaggaccgtatctccgaggtgagaaaggtcttaaatagcgggaatttctacttcgcctggagcgcaagcggaatctctttggacctaagtttaaacgcgcatcggtcaatgcaggagcaaacaacagacaaccgattcttctggaaccagagcctgcacttgcacttgaagcattacggcgtcaactgcgacgattggttgctgcggcttatgtgcggcggagtggagatcagaaccatctacgccgctcacaagcaggccaaagcttgccttatttcccgcttgtcctgcgaacgggctggtaccagatttaatgttcggggaactaatgacgacggccacgtcgccaacttcgtagagacagaacaggtggtgtacctggacgactcagtgtcttctttcatacagatacgaggatcagtgcctctcttttgggaacagcctggactccaggtgggcagccatcgcgtcaggatgtcccggggtttcgaggccaacgctccagcatttgacaggcacttccgcaccctgaagaatctctatggaaaacagatcatagtgaatcttctgggcagcaaagagggggaacacatgctctctaaggccttccagagccaccttaaggcctccgaacacgctgcagatatccagatggtcaattttgattatcaccaaatggttaaggggggaaaggctgaaaagctgcactctgtgcttaaacctcaggtgcagaagtttttagattatggtttcttctattttaacggcagcgaagtgcagcgatgccagtctggaactgtgcgcacaaactgccttgactgtcttgacagaaccaactctgtccaagctttcctgggcctagagatgctggcaaaacagttggaggccctggggctagcagagaaacctcagcttgtaacccgatttcaggaagtgtttcgtagtatgtggagcgtgaatggggattctatctcaaagatttatgccggaaccggggcactggaaggtaaggctaaacttaaggacggcgcaaggtcagtgaccagaacaatccagaacaacttcttcgattcttctaagcaggaggcgatcgatgttctgctgttgggcaacaccctcaattccgacttagctgacaaagctagggctctattaaccacaggatcccttagggttagtgaacagacactgcaatcggcatcatcaaaggttctgaagtccatgtgtgaaaatttttataagtatagcaagcctaagaaaattagagtatgcgtcggcacctggaacgtgaatggtggtaagcagtttaggtcgatcgccttcaaaaaccagactttgactgactggcttctggacgcccctaaattggctgggatccaggaattccaggataagaggtctaaaccaaccgatatttttgccatcggcttcgaggaaatggttgagctcaacgcaggtaatatcgtgtccgcttctacaaccaaccagaaactttgggcagtggagctgcagaagacaatctctcgggataacaagtatgtcctgcttgcctctgagcagcttgtgggtgtgtgcctgttcgtgttcattagacctcagcacgccccttttatcagggacgtggctgtggataccgttaaaacgggaatgggaggtgctacaggcaataaaggcgctgtggccattagaatgctgttccacacaacctctctgtgtttcgtgtgctcccacttcgctgcaggacagtcccaggtgaaggagcgtaacgaagattttatagagattgcacgcaagctgagttttcctatggggagaatgctgttctcccatgactatgtgttttggtgtggagacttcaattaccgcatagatctgcctaatgaggaagtcaaggaattgatcaggcagcagaactgggatagtttaatcgcaggcgatcaactcatcaaccagaaaaatgcgggacaggtttttaggggatttttagaaggcaaagttacgttcgctcccacttataagtacgacctattctctgacgactacgacactagcgagaaatgcagaactccagcatggacggatagggtgctctggaggaggcgcaagtggcctttcgacaggtcggccgaagatctcgacttactgaatgcctctttccaggacgagagtaagattttgtacacttggacacctggtaccctgctgcactacggccgagccgagctgaagaccagcgaccatagacccgtcgtcgccctcatcgacatcgacatctttgaagtggaagcagaggagcgccagaacatctataaagaagtcatcgctgtgcagggccctccggacggaactgtgctcgttagcattaagagttcactacctgaaaataacttctttgatgatgcactgatcgatgagctacttcagcagttcgccagtttcggggaggtcattctgatacggtttgtagaggataaaatgtgggtcacattcctggaaggctcctccgcactcaacgttctctccctcaacggcaaggagctgctaaaccgtaccatcacaattgccttgaagtcgcctgactggatcaagaacctcgaggaggaaatgagcctggaaaagatcagcattgccctgcccagtagcacctcaagtacccttctgggggaggacgcggaagtggccgcagacttcgatatggagggcgatgtggatgactattcagcagaagtagaagagttgctgccgcaacatcttcagccctccagtagctctggcctcggaaccagcccaagcagcagtcccagaaccagcccctgccaaagccccacaatcagtgagggcccagttccatcattgccgatcaggccttctcgggcaccctcgaggactcctggacctccttccgcccagtcatcacctattgacgcacaacccgctacgcccttacctcagaaagaccccgctcagcctctggagcctaaaagaccacctcctcctaggcccgttgcgccacccactaggccagcaccaccccagcgaccaccaccccctagtggcgctcggtcaccagcccctacccgtaaggaattcggcggaattggcgctcccccaagtcctggcgtggcccgtcgcgaaatggaggcgcctaaaagcccagggaccacgcggaaagataatattggcagatcacagcccagcccccaggctgggctcgctggccctggccctgccggttatagtactgcaaggcccacaattccaccaagggcgggagtgataagcgctccacagtcacacgccagagcaagcgcagggcgtttgacaccagaaagccagagcaaaactagtgaaacttctaaaggttccacattcttgccagagccactgaagcctcaggctgcgttccctccacagtctagcttgccacctccagcacaacggctgcaggaacccctggtgcccgttgcagccccaatgccccagtcagggccacagcccaacttggaaaccccaccacagccaccacctcggtctcgaagtagccattccttgccctccgaagcttccagccagccgcaggttaagacgaatggaatctccgatggcaagcgggagagtcctctaaagatcgacccatttgaggacttgtcatttaacctgcttgctgtaagtaaggctcaacttagcgtgcagacaagtccagtaccaaccccagatcccaaacggcttatacagctgcctagcgcaacacaatccaacgtgctgtccagtgtttcctgtatgcccaccatgcctcccatccctgctcgttctcagagccaggaaaacatgaggtcatctcctaacccatttatcacaggcctgacccgcacaaaccccttttctgatagaactgctgcccctggcaatccatttcgagccaaaagtgaggaaagcgaggccacgtcttggttcagcaaggaagaaccagtcacgatcagtccttttccatccttacagcccctgggacataataagagtagggcctccagttctctggacggattcaaggactcctttgatctgcaaggccagagtaccctgaagatcagcaatcctaaagggtgggtgacttttgaagaagaggaggacttcggcgtgaaaggtaaatctaaatctgcctgttcagatttactcggtaaccagccttcttcttttagtggctctaacctcacactgaatgacgattggaataaaggtacgaatgtatcgttttgcgtgctgccatctaggaggccaccaccacctccagtgcccctgctgcccccaggaactagcccccctgtggacccttttactaccctggccagtaaggcgagtcccacccttgattttactgagcgctag

SEQ ID NO: 243024 - DNA, 4491 bp, synthetic construct
  misc_feature 1..4491: note = Description of Artificial Sequence: Synthetic coding sequence
  source 1..4491: mol_type = other DNA
atggccttgtccaaagggctccggctcctcggacggcttggagccgagggagattgctcagtcttgttggaagccaggggaagggatgactgcctactgttcgaggcgggaactgttgcaaccctggcccctgaagaaaaagaagtgatcaagggtcagtacggcaaactcaccgatgcttacggttgcctgggggaacttagattgaaatctggtgggacctccctgagttttctggtgctagtaactggatgcacaagcgtgggccgaatcccagatgcagaaatatacaagatcactgctacagatttctaccctctgcaggaggaagccaaggaagaggaaagattgatcgcccttaagaagattttatcaagcggcgtcttttatttttcttggccaaacgacggctccaggtttgacctcaccgtaaggactcagaagcagggtgacgattctagtgagtggggtaatagtttcttttggaatcaactgctgcatgtacctttgcggcagcatcaggtcagctgctgtgactggctgctcaagattatttgcggagtcgttaccatccggacagtgtacgctagccacaaacaggctaaagcctgcctggtgtcaagggtgtcatgcgaaaggacgggaactaggtttcacacaagaggcgtgaatgacgatggacacgtttcaaacttcgtggaaactgaacagatgatatatatggatgatggagttagttcgtttgtgcagattagaggaagcgtcccccttttctgggaacagccagggcttcaggtcggttcgcaccatctccgactgcaccgaggactggaagcaaatgccccagcgtttgacagacatatggtgctcctcaaagagcagtatggtcagcaagtggttgtgaacctgctcggtagtcgcggtggtgaagaggtgctcaatcgagccttcaagaaactgttgtgggcctcctgtcatgccggtgatactcctatgattaactttgattttcaccagttcgccaagggaggcaagttggagaaattggagaccctgcttaggcctcagctgaagctgcactgggaggatttcgacgtgttcacaaaaggcgagaatgtctccccgagattccaaaaagggaccctgcgcatgaattgcctcgactgcctcgataggacaaacactgtccagtccttcatagctctcgaagtccttcacctgcagctcaagactctgggactctcctccaaaccaatcgtagatcgcttcgttgagagcttcaaggccatgtggtcgctaaatggacacagcctttccaaggtattcacaggctcgcgggctctagagggaaaagccaaggtgggcaagttaaaggatggtgcgaggagcatgtcacgcacaattcagagtaatttttttgacggcgtcaagcaggaagccatcaaattgttgctggtgggcgatgtctacggagaggaagtcgccgacaaaggcggtatgctgttggacagtacggcgctgttagtgaccccacggattttaaaagccatgaccgagaggcagagcgagttcaccaattttaaaaggatccgtatcgctatggggacctggaatgtgaatggaggcaaacagttcagatccaatgtgctgagaactgctgagctcacggactggctgctggatagtccccagctcagtggagccaccgattcgcaggatgattcgtcgcccgctgacattttcgccgtaggattcgaggaaatggtagagctgtctgctggcaatatcgttaacgcctccacaacaaataaaaaaatgtggggggaacaactccagaaggcaatctctcggtcccatcgctacattttgctgacatctgcgcaattagtgggcgtgtgcctgtatatattcgtccggccttatcatgtgccattcattcgagacgttgcgatcgacacagtaaagactgggatgggcggaaaagcaggcaataagggggctgtgggaatccgtttccaattccactcaaccagcttttgctttatctgcagtcacctgactgccggacagagtcaggtgaaggagaggaatgaagattacaaggaaatcactcagaagctttgtttccctatgggaagaaacgtgttctcgcatgactacgttttctggtgcggagattttaattacaggatcgacctcacatacgaagaagtcttctatttcgttaaaagacaagattggaagaagctgctcgaattcgaccaacttcagctgcagaagagctccggaaagatattcaaggactttcatgagggggcaatcaactttggaccaacgtataaatatgacgttgggtcggctgcatacgacacgagcgacaagtgtcggactccagcctggacagatagagtcctgtggtggaggaagaaacacccttttgataagactgcaggagagttaaatctgctggatagcgacctcgacgtcgacaccaaagtgaggcacacatggagccccggtgcgctgcagtactatggcagagccgagctacaggcttctgaccacagacctgtgttggctattgtagaggtcgaagtgcaggaggtggacgtgggggctcgtgagagggtttttcaggaagtatccagctttcagggcccactcgacgctacagttgtcgtgaacctgcagtcccctactctggaggagaagaatgagtttcccgaagacttaagaacagagcttatgcagaccttgggctcctatgggacaattgtccttgtccgcataaaccaggggcagatgttagtcacgtttgctgattcacacagtgccctgtcggtgctcgacgtggatgggatgaaggtgaaggggagagctgtcaaaattcgcccaaaaacaaaagactggctaaagggcttacgcgaagaaattataagaaagcgcgactcaatggctcccgtcagtcccacggccaactcctgcttgctggaggaaaactttgattttactagcctggattacgaatcagagggagacattcttgaagacgacgaggactacctggtggatgagttcaatcagcccggtgtatctgatagtgagttagggggagatgacttaagtgacgtgcctggtccaactgcactggcccctccttccaagagccccgcattgaccaaaaaaaagcagcatcctacttacaaggatgacgccgacctggtcgaattaaagagagagctggaggccgtcggcgagttccgacaccggtcccccagtcgcagtctgtccgtaccaaataggccacgccctccacagccacctcagaggcctccacctcccacaggcctcatggtcaaaaagtcggcctccgacgcaagtatatcatctggtacacacggccagtacagtattctacagacggccaggttactgcctggagcaccacaacagccccctaaggccaggactggcattagcaagccctataacgtgaagcagatcaagaccacaaacgcccaggaggccgaggccgctattcgatgccttttggaggccagagggggtgctagcgaggaagccctgagcgccgtggctcctcgggacttggaagcttcttctgagcctgagccaactcccggagcagccaagcctgagacccctcaggcaccccctctgctcccgcgtcggcctcctcctcgcgtgcccgcaattaaaaaaccgacactccggaggactggtaagccgctgtctcctgaggagcagttcgagcagcagactgtgcattttaccatagggccacctgagacctcagttgaggcaccaccggtagtgaccgcccctcgcgtcccgcctgtgccaaagcccagaacgtttcagccaggcaaagcggctgagagaccctcacaccgcaaacccgcatccgacgaggccccaccaggcgctggtgcctccgtgcctccgcctctcgaagccccacctctggttcccaaggttccccctaggcgcaagaagagtgccccagctgctttccacctgcaggttttacagagcaacagtcagctccttcagggattaacctataattcttcggatagtccgtcaggacatccccctgctgctggcactgtgtttcctcagggtgattttttaagtaccagcagtgctactagccccgacagcgacggcacaaaagccatgaagcccgaagccgctcccctcctcggcgactaccaggaccccttctggaatctgctgcaccatccaaaactgctcaataacacttggctgtctaagtcaagtgacccgttagatagtgggacacgctcacccaagcgcgatccaattgatccagtcagcgctggggcaagtgccgcaaaagcagagctgcccccagaccatgagcacaagactttggggcattgggtcacgattagcgaccaagaaaagcggaccgccttgcaagtgtttgatccattggctaagacctag

SEQ ID NO: 243025 - DNA, 1746 bp, synthetic construct
  misc_feature 1..1746: note = Description of Artificial Sequence: Synthetic coding sequence
  source 1..1746: mol_type = other DNA
atgcagacactcggcagctacggcactattgttcttgtgagaattaatcaaggacaaatgttggttaccttcgcagacagccactctgctctctctgtcttggacgtagacggcatgaaggtgaagggacgcgctgtaaaaattagacccaagaccaaggattggttaaaaggcctaagggaggagattatccggaagcgtgattctatggccccagtctcccccactgctaactcctgtcttttggaagaaaatttcgacttcacatcccttgattacgaaagcgagggtgacattttggaggacgacgaagattaccttgtcgacgaattcaatcagcctggcgtgtccgactctgaactcgggggagacgatctgtcggatgtcccaggccctaccgctttggccccaccatctaaatcccccgcacttacaaagaaaaagcagcaccctacgtataaagatgacgccgacctcgtggagctgaaaagagagttggaggccgtgggggaatttcgccatagaagccccagccgctccctgtcggttcctaatcgaccacgaccgccacaacctccgcagcgccctccaccccctaccggccttatggtgaagaagagcgctagcgatgcttcgatttcctctggcacacacggccaatattcaatacttcagacggctcgcttgctcccaggggcacctcaacaaccccctaaggcccgaactggcatctcgaaaccttataatgttaagcaaattaaaaccacaaacgctcaggaggctgaggcagccattagatgcttactagaagcacgcggtggggctagcgaggaagcactatccgccgtcgctccaagggacctggaagcctccagtgagcccgaacctacgccgggagccgctaaaccagaaacacctcaggcgcctcccttattaccaagacggcctcctcctagagtaccagccataaagaaaccaacgcttagacggacaggtaaacctctgtcccctgaggaacagttcgagcagcaaacagttcattttaccattggacccccagagacaagcgtggaagcaccccctgtggtaacagccccaagggtgccccctgtgcccaagcccaggaccttccagcccggaaaagctgccgaacggcctagccacaggaagcccgctagtgatgaagctccgccaggtgcgggtgcgtccgtgccaccacctctagaagctccacccttggtccctaaagtgccacccaggcggaagaagtcagccccagccgcttttcacctccaagtgctgcagagcaatagccagctgcttcagggcctcacctataactcttccgactccccatcagggcatccgcctgctgctggaactgtgttcccccagggggattttctcagcaccagttccgctacctcgccggactctgacggtaccaaagccatgaaacccgaggccgcacccttgctcggagattaccaggatcctttttggaatttgctgcatcatcctaagctactgaataatacttggctgtccaaaagttctgatcctcttgactctggcacgcgatcccccaagcgggacccaatagatcccgtatcagccggagcctctgctgctaaggccgaattacccccagaccacgagcacaaaacgttaggccattgggtgacaattagcgaccaggaaaaacgcaccgcgctccaagtgttcgacccacttgccaaaacatag

SEQ ID NO: 243026 - DNA, 411 bp, synthetic construct
  misc_feature 1..411: note = Description of Artificial Sequence: Synthetic coding sequence
  source 1..411: mol_type = other DNA
tgaggcagggacgattgtctccttttcgaggccggtacagtggccacgctggccccagaagagaaagaagtcatcaagggccagtacggtaagttaaccgacgcatacgggtgcttgggcgagctgcggctcaaaagtgggggaactagcctgagctttctcgttcttgtaacgggctgcacctccgtcggtagaatccctgatgccgaaatctataaaataaccgccacagatttttacccattgcaggaggaggccaaggaggaggagaggctgattgccctgaagaagatcctttcatcaggagttttctactttagctggcctaatgacggcagtagattcgacttgaccgtgcgcacccagaagcagggtgacgattcatctgaatgggggaattctttcttttag

SEQ ID NO: 243027 - DNA, 3867 bp, synthetic construct
  misc_feature 1..3867: note = Description of Artificial Sequence: Synthetic coding sequence
  source 1..3867: mol_type = other DNA
atggccctgtctaaggggctgaggctgctcgggagactcggtgcagagggggattgttccgtgctcctggaagccagggggagagatgattgtttactctttgaggctggcacagttgcaaccctggctcctgaggagaaagaggtgattaaaggccaatacggcaaactgacagatgcctacggatgcctgggtgagttacgccttaaaagtgggggtacctccctttcatttcttgtgctggtcaccggatgcacctccgtgggacggatacctgacgctgaaatctataagatcactgccaccgacttctatccattgcaggaggaggccaaggaggaggagcggctcatcgccctaaagaagatactgtcaagcggggtgttctattttagttggccgaacgatgggtcccgttttgatttgacagtccgtactcagaagcagggagatgattcctcagaatggggcaatagcttcttttggaaccagttgctacacgtgccactaagacagcaccaggtctcctgttgcgactggctacttaaaatcatctgcggggtcgtcaccattagaaccgtctacgcctcccataagcaggccaaggcgtgcctggtctctagagtgagttgcgagcgtactgggacgcggttccacacccgcggagttaatgacgacgggcacgtctcaaattttgtggagaccgaacagatgatctacatggatgacggggttagcagcttcgtgcagattagaggaagtgtcccactgttctgggaacagcccggactgcaggtaggatctcatcacctccgccttcatcgcggattggaagcgaatgccccagcatttgacagacatatggtcctcctgaaggagcaatatggccagcaggtggtggtcaatctgttaggtagtaggggtggcgaggaggtccttaacagggccttcaaaaagttgctgtgggcatcctgtcacgccggagatacaccaatgatcaattttgacttccatcagttcgccaaaggcggaaaactggagaagcttgagacgttgctgaggcctcagttgaagttgcactgggaggattttgacgtgtttactaagggcgagaacgtgtctcctcgctttcaaaagggcacgctgaggatgaactgtctggactgccttgatcggacaaacaccgtgcagagcttcatcgccttagaagtgctgcacctgcagttaaagactcttgggcttagttcaaagcccatcgttgatcgcttcgtggaatcctttaaagctatgtggagcctgaacggccactcattgagcaaggtattcacagggagccgagcattagaggggaaagctaaggttggtaaattaaaggacggcgctcgctccatgtctcgaaccatccaatctaacttcttcgatggtgtgaagcaagaggctattaaactacttctggtcggcgatgtgtacggtgaggaggttgctgacaaaggcggtatgttattggattccactgccctcctcgttacacccagaatcctgaaagcgatgacagagagacagagtgagtttaccaacttcaagcggatacggattgccatgggcacctggaatgttaacggtggcaagcaatttcggtctaatgtgctcagaacagctgaactgaccgattggctccttgactccccccagctctccggtgcgacggacagccaggacgactcatctcccgctgacatcttcgctgtggggttcgaggagatggtcgagctgagtgctggcaatattgtcaatgcaagcaccaccaataagaagatgtggggggagcagctgcagaaagccattagccggtcccatcggtacatcctcctaacgtcagcacagctggttggcgtctgcctctacatattcgttcgaccgtatcatgtgccctttatacgtgatgtggcaatcgacacagttaaaacgggcatgggtggtaaggctgggaataagggagctgtggggatccgctttcagttccacagcacttccttctgttttatttgttcacatttaactgctgggcagtctcaggtcaaggaacgcaacgaagactacaaagagatcacccaaaaactgtgtttcccgatgggaagaaacgtcttctcccacgactacgtattttggtgcggcgacttcaactacagaatcgatctcacttacgaggaagttttttattttgtgaaacgtcaggattggaagaaactgctagaatttgaccaactccagctacagaagtcctccgggaaaattttcaaggattttcacgaaggggcaatcaactttgggccaacgtacaagtacgatgtaggcagtgcggcttatgatacatctgataagtgtcgaaccccagcttggaccgacagagtgctgtggtggcggaagaaacacccattcgacaaaaccgctggagagctgaaccttctggattctgacttggatgtggacaccaaggtcagacacacatggtctcccggagcactccagtactacggacgggcagagctgcaagcatcagaccataggcctgtgctggccattgtcgaggttgaggtccaggaggtggatgtgggtgcccgtgaacgcgtcttccaggaggttagtagtttccagggaccccttgacgcaacagtcgtggtcaacttgcagtcgcctaccttggaggagaaaaatgagttcccagaggacttgcgcacggaacttatgcagaccttaggtagctacggtacgatcgtacttgtccgcatcaatcagggccaaatgctggtcacttttgccgactcacattccgccctcagcgtcctggatgtagacggcatgaaggtcaagggaagggcggtaaagatcagacctaagaccaaggactggctgaaaggtctgcgagaggaaatcataagaaagcgtgactcaatggcacccgtgagtcctaccgcaaattcttgtttgctggaggaaaattttgattttacaagcttggactatgaatccgagggtgacatcttagaagacgatgaggattaccttgtagatgagttcaaccagcccggtgttagcgacagcgaacttgggggagatgacctgtcggatgttcctgggccaaccgccctcgcgcctccttccaaaagccctgcactgactaaaaagaagcaacaccccacctataaggatgatgcggacttggttgagcttaagagagaactggaggccgtgggcgagtttaggcatagatcacccagcagaagcctcagcgtgccgaatcgccctcgtccacctcagcctccacagagacccccaccacctactggacttatggtgaagaaaagcgcgtccgatgcctcaatatcctcgggtacacatggtcagtattccatcttgcagaccgccaggctattacctggcgctccacagcagcctcccaaggcccgtaccggcatctcaaagccctacaacgtaaaacagataaagaccacgaatgcccaagaggcagaagccgcaatccggtgtctgcttgaagccagaggaggagcttccgaggaggccctgagtgccgtagctccgcgagacttggaagcatcttctgagccagagcctacccccggagccgctaagcccgagacgcctcaggcaccacctttactgcctcgaaggccacccccaagggtgcccgcaatcaagaaaccaacactgcgtcgcacagggaaaattgtgttttgttcgcggtcgcaggcctcacagccttgcttgctactgcagaggcacgagtttgtgcggacagtcgccgcacagaggctagccagtgtcgatacgtctggttcgtccgtgtag

SEQ ID NO: 243028 - DNA, 4356 bp, synthetic construct
  misc_feature 1..4356: note = Description of Artificial Sequence: Synthetic coding sequence
  source 1..4356: mol_type = other DNA
atggccctgagcaagggactcaggctgttggggaggctgggggctgagggcgattgcagcgtgttgctggaagcgaggggcagggatgactgcctgctgtttgaagccggtaccgtggcgactcttgcccctgaagagaaagaagtaataaaaggacagtacgggaaacttacagacgcgtatgggtgcctgggagaactgcgactcaagagtgggggaaccagtctctccttccttgtgctcgttactgggtgcacaagtgtcggacgcatccctgatgcggagatttataaaataaccgctaccgatttttatcctttgcaggaagaagccaaagaggaggaaagactgattgctctaaagaagattctctcttctggagtgttttatttctcctggcccaacgacggcagtcgcttcgacctgactgttagaacacagaagcaaggcgacgatagtagcgaatggggtaacagctttttctggaaccagctgctccacgtacctctaagacaacatcaagtgagctgctgtgattggctgctgaagattatctgtggcgttgtaacaattcgcactgtctacgcttcacataaacaggccaaagcctgtttggtgagccgcgtctcttgtgagcgaactggcacacggtttcacaccaggggcgtgaatgacgatggacacgtgtctaacttcgtggagaccgaacagatgatatatatggacgacggcgttagttcattcgttcagattagaggtagcgtgccgttgttctgggagcagcctggactgcaggtgggatcccatcatctgagattgcatagaggcctggaggccaacgctccagctttcgacagacacatggtgcttctaaaggagcagtatggacagcaagtggtagttaacctcctaggttctcgaggcggtgaagaagtgctcaatcgggcttttaagaagctgttgtgggcttcttgtcacgcgggtgacacccccatgattaactttgatttccatcaatttgctaaaggagggaagttggagaagcttgagactctcctccgaccgcagctgaagctccactgggaagatttcgacgtattcacgaaaggagagaatgtctctcctcgatttcaaaaagggactctcaggatgaactgtttggactgtctggacagaaccaacactgtccaaagcttcatcgcactggaagtgttacatttgcagctgaagaccctcggacttagctctaaaccaattgtcgatcgctttgtggagtcattcaaggcaatgtggtccctcaatgggcactccttgtcaaaagttttcaccgggtcaagagcactcgaagggaaagctaaagtcggcaagctcaaggacggggcaagatcaatgagtcggaccattcagagcaactttttcgatggcgtgaagcaggaagctatcaaattgctcctggtcggtgatgtctatggggaggaagtggccgataaaggtggaatgctgctggacagtactgctctgctcgtgacaccaagaattctcaaggcaatgaccgaaagacagtccgagtttaccaatttcaagagaattagaatcgccatgggaacctggaacgtgaacgggggaaagcagttccggtcaaacgttctgaggacagccgagttaacagactggttgctggactcgcctcagctctcaggcgctacagactcacaggatgacagttcccccgcagatattttcgcagttggttttgaggaaatggtcgagctgtctgcgggtaatatcgttaatgcttccacaaccaacaaaaagatgtggggcgaacagctgcagaaggcaatctcccgcagtcacagatatatcctcttaacgagtgcccagctggtgggtgtatgtctgtatatcttcgtccgcccttaccacgtcccgtttattcgggatgtcgccatagataccgtaaagactggcatggggggaaaggccggaaataaaggcgctgtcgggattaggttccagtttcactctactagcttttgcttcatttgtagccatctgactgccggacaatcacaggtgaaagaacgaaatgaggactacaaagaaatcacccagaaactgtgtttcccgatgggcagaaatgtattttcccatgactacgtattctggtgcggtgatttcaactacaggatcgatctgacctatgaggaagtcttttatttcgtgaagaggcaagactggaaaaagctcttagaatttgatcaactgcaactgcagaagtcatccggaaagatctttaaagacttccacgagggggcaatcaatttcggcccaacttataaatatgatgtgggctcagcagcttacgacacgtccgataagtgtagaactcctgcatggaccgacagggtactgtggtggagaaaaaaacacccatttgataagactgctggggagctaaatctgctagattctgacttggatgttgatacgaaggttcggcacacctggtcacccggtgcccttcaatattacggccgtgctgagttacaggcaagtgaccacaggcccgtcctggctatagtcgaagttgaagtccaggaggtggatgtaggggcacgggagcgtgtgttccaagaggtgtccagcttccagggccctttggacgccacggtggtagtgaatttacagagtcctacgctagaagaaaaaaatgagtttccagaagatcttcgtaccgagctgatgcagactctgggatcctacggtactatcgtcctcgtgaggattaatcagggacaaatgctcgttacctttgccgactcccattccgcgctgagtgtactggatgtggatgggatgaaggtcaaagggagggctgtcaagatacggccaaaaacaaaggactggctgaaagggctgagagaggaaattattaggaagcgggacagtatggcacctgttagccctaccgccaatagctgccttctggaggagaactttgattttacatctcttgattacgagagtgagggggacatcctcgaggatgatgaagactacctggtcgacgagttcaaccagccaggagtatccgattctgagctcggaggggacgatctctctgacgtgccgggacctactgcactggcaccgccatcaaagagtcccgcattaactaaaaaaaaacagcatcctacttacaaggcgggtctgatggtgaagaagagcgcttcagacgcttctatcagcagcggtacacatggacagtacagtatcctgcaaaccgctcggcttctccctggggctccacagcagccaccaaaagcgaggaccggtatcagcaagccctacaatgtaaagcaaatcaaaaccacgaacgctcaggaggccgaggccgctatacgatgcctcctggaagcgagggggggtgccagcgaggaggctctctcagcagtggcccctagggacctggaggcctcatctgaacctgaaccaacacccggtgctgcgaaaccagagacccctcaggctccacccctcttgccgagaagaccaccacccagagtgcctgccattaagaagccaacgctcaggcgtacaggtaagccactgtcgcctgaagagcaatttgagcaacagaccgtccacttcaccattggcccacctgagacatcagtcgaggcacccccagtggttacagctcctagggtgcccccagtgccaaagcccagaacattccagccaggaaaggcagcagagaggccaagtcaccgcaagcctgcgagcgacgaggctccaccaggagcgggtgcctctgtccccccaccactcgaagcacccccactggtgcccaaggtgccccctcggaggaagaaatcagcccctgccgctttccacctccaggtattacaatccaatagccaactcctccagggtctaacttacaattcctcagactctccttcaggtcacccgcctgctgctggcacggtcttcccacaaggtgattttctgagcacatcatctgctacctcacccgattcggatgggaccaaggcaatgaaacccgaagccgctcctctgttgggcgactaccaggacccattctggaatctgctgcaccaccctaaactgctgaacaatacctggctgtcaaagtccagcgatccactggacagcggtacccgcagccccaagcgagatcctattgatccagtctccgctggcgcatccgctgccaaggccgaactgcctcccgaccatgagcataagacactgggccattgggtcacaatctccgaccaggagaagaggactgctctccaggtgtttgatcctttagccaaaacttag

SEQ ID NO: 243029 - DNA, 279 bp, synthetic construct
  misc_feature 1..279: note = Description of Artificial Sequence: Synthetic coding sequence
  source 1..279: mol_type = other DNA
atgtttctatatgcgagcggcccagctcctcccgcaggaacctgcagatggggcggtcagggtggaacttcactctctttcctggtcctcgtgacgggctgtacttccgtgggacgcatccccgacgcagaaatttacaagatcacggctacggacttctacccactgcaggaagaggctaaagaggaagaacgactgatcgcgctgaaaaaaatcctgtcgtccggcgtgttttacttctcttggccaaacgacggctccagatttgatttaacctag

SEQ ID NO: 243030 - DNA, 1551 bp, synthetic construct
  misc_feature 1..1551: note = Description of Artificial Sequence: Synthetic coding sequence
  source 1..1551: mol_type = other DNA
atgtttctgtatgcgagcgggccagcccctcctgccggtacctgcagatggggaggacaaggagggacctcactgtcttttctcgtgctggtaaccggctgcacctccgtaggacgcatccctgacgcagagatctacaaaataactgccaccgatttctatcccctgcaggaagaggctaaggaggaggaacgtcttatcgcactcaagaagatactatcatccggagtcttctacttcagctggcccaacgacggcagtcgctttgacctcaccgtcaggacccagaaacagggcgatgactcaagcgagtgggggaactccttcttttggaaccagttactacacgtgcccttacggcagcatcaagtttcctgctgtgactggctgcttaaaataatttgtggagtggtgaccattcggaccgtctacgcctcccacaagcaggctaaagcctgcttagtatctagagtttcttgtgagagaaccggcaccagatttcacaccaggggcgttaacgacgatggacatgtgtccaacttcgtggagaccgagcagatgatctatatggacgatggtgtatcttcatttgtgcagattagaggcagtgtgcctctcttctgggagcaaccaggtcttcaggtagggagccaccaccttagattgcaccggggtctagaggcaaacgcgccagcctttgatagacacatggtgctgttgaaggagcagtacgggcaacaagtcgtcgttaacttactcggcagccggggtggagaagaagttctcaatagggccttcaagttcgctaagggtggaaagttggaaaagcttgaaactttactgagaccccagttaaagctgcactgggaagacttcgatgtcttcaccaaaggggaaaatgtatcaccacgcttccagaagggaactctgcgcatgaattgcctggactgcctggaccgtacaaatacagtccagtcatttattgcccttgaagtgctccacctgcagctcaagacgctgggacttagtagcaagcctatcgtcgatcggtttgtggagtcttttaaggccatgtggtccttgaatgggcactctctgtctaaggtgtttactgggtctagagccctggagggaaaggcaaaagtcggaaagctgaaagacggcgctaggtccatgtcacgtaccatccagagcaacttcttcgacggcgtgaagcaagaggcaatcaaactgttgctcgttggtgacgtctatggcgaggaggtcgctgataagggcggaatgctgctcgactcgaccgcccttctcgtgactccccgaattcttaaggcaatgaccgaaaggcagagcgaatttaccaacttcaaaaggatacgcatcgccatgggtacctggaatgtaaacgggggaaagcagttccgctcaaatgtccttagaacagcggagctaaccgactggttactcgactctccccagctgagtggagctacggatagccaaggagaggggagcgactttgggggagacaaaatccagctgcaccttacgtag

SEQ ID NO: 243031 - DNA, 438 bp, synthetic construct
  misc_feature 1..438: note = Description of Artificial Sequence: Synthetic coding sequence
  source 1..438: mol_type = other DNA
atgaatggacgagtggactatctggtgacagaagaagagatcaacttgacccgcggtccaagtggattaggcttcaatatcgtagggggaaccgatcagcagtacgtgagtaatgattcaggcatctatgtgtcgcgcattaaagagaacggtgccgctgccctggacggacgtctgcaggaaggcgacaaaatcctttcagtgaacggacaggacctgaaaaacctgcttcaccaggatgcggtagacctgtttcggaatgctggctacgctgtgtccctgagggttcagcatcgcctccaggtacagaatggcccaataggccacaggggcgaaggggacccatctggaataccgatattcatggttctagtgcctgtcttcgccttgacaatggtcgctgcgtgggcttttatgaggtataggcagcagctgtag

SEQ ID NO: 243032 - DNA, 957 bp, synthetic construct
  misc_feature 1..957: note = Description of Artificial Sequence: Synthetic coding sequence
  source 1..957: mol_type = other DNA
atggcgggacgctctctcacatccaaggcagaacccaccgccggtgcggtggatcgggcagagaaggccggaggacaggatacctcttcccagaagattgaggacctgatggagatggtacagaagctgcagaaagtcggtagcttagagcccagggtcgaagtactgattaaccgcatcaacgaagtgcagcaagcaaaaaagaaggccaacaaggacctcggggaggctaggactatatgcgaggcgcttcagaaggagttagactcactgcacggggaaaaggttcacctaaaggaaatcttatctaaaaaacaagagacactgaggatccttaggttgcactgtcaggagaaagaaagtgaagcccatagaaaacatacaatgctacaggagtgcaaagagagaatcagcgctctgaatttgcaaatcgaagaggagaagaacaaacaacgccagctgcgactggctttcgaggagcagctggaggatcttatggggcagcacaaggacttgtgggactttcacatgccggagaggctcgccaaggagatctgcgcactcgactcaagcaaggagcagctgctgaaggaagagaaattagttaaggccacgctcgaggatgtgaaacatcagctgtgtagcctatgcggagccgaaggccctagcacgctagatgaggggttatttttgagaagccaagaggccgctgccacggtgcaactgttccaagaggaacaccggaaagctgaagagctgctggcagcagctgcacagcgacatcaacagctgcagcagaaatgccaacagcagcagcagaaaagacaaagactgaaagaggagctggaaaagcacggtatgcaagtccctgcccaggctcagagcacccaggaggaggaagctggccctggagatgtggccccaagaccgggaagacccgtcacatggtggagctag

SEQ ID NO: 243033 - DNA, 1056 bp, synthetic construct
  misc_feature 1..1056: note = Description of Artificial Sequence: Synthetic coding sequence
  source 1..1056: mol_type = other DNA
atggcgggaaggagtcttacgtccaaagccgaacctactgctggggcagtagacagggccgaaaaagcgggagggcaagacacatcatcccaaaagatagaagacctgatggagatggttcagaaactccagaaagtgggatctttagaaccgcgagttgaagtcctgatcaaccgcatcaatgaggttcagcaggccaaaaagaaggctaacaaagacttgggagaggccagaacaatttgtgaggccctgcagaaggaacttgattctttacacggtgaaaaagttcacctgaaggaaatccttagcaagaaacaggagacactccggatactgcggcttcactgtcaggagaaagagagtgaggcacacaggaagcacacaatgcttcaggaatgcaaagaaaggattagcgccctaaatcttcagatcgaggaagaaaaaaacaaacaacgtcaactgcgattggcttttgaagagcagctggaggaccttatgggccaacacaaagatctctgggatttccatatgcctgaacgtcttgcgaaagaaatatgcgctttggatagtagtaaggaacaactgctcaaggaagagaaactcgtgaaagctacactggaggatgtcaaacaccagctgtgttcactgtgtggtgccgagggcccttccaccttggacgaggggttgtttctccgcagtcaggaggctgcggctaccgttcaacttttccaggaggagcataggaaagctgaggaactgctggccgctgcagcccagagacaccaacaactccagcagaagtgtcaacagcagcagcagaagaggcagcgactgaaagaagagcttgaaaaacacggcatgcaagtgcctgcccaggcccagtctactcaggaagaggaggctggacctggagacgtggcaagcccgaagccccttaagggggagcgccctggcgctgcccaccaggccggacccgatgtcctgattggacaggaggatacattacacccagatctctctccgagaggattccaggagatcaaggaactcttttag

SEQ ID NO: 243034 - DNA, 849 bp, synthetic construct
  misc_feature 1..849: note = Description of Artificial Sequence: Synthetic coding sequence
  source 1..849: mol_type = other DNA
atggagatggtacagaagctgcagaaggtggggagcttggaacccagggtcgaggtgcttataaacagaatcaatgaggtgcagcaggccaagaaaaaggcaaacaaggatttgggtgaagctaggactatatgcgaggcattgcagaaggagctagattcactgcacggggaaaaggtccacctcaaggaaatccttagcaaaaagcaggaaacactacggatcttacgtctgcattgccaggaaaaggagtccgaagctcatcgaaaacatactatgctccaagaatgtaaggaacgcattagtgctttgaacctccaaatcgaggaggaaaaaaacaaacagcggcaattgagactggccttcgaagagcagctggaggatcttatgggtcagcacaaggatctatgggattttcatatgcctgaacgcctggcgaaagagatctgtgcactggattcaagtaaagaacagctgctcaaggaagagaagcttgtgaaagctaccttggaagatgtaaaacaccaactgtgctctttatgcggcgcagaaggccctagtacactggacgagggcttatttctacgcagtcaggaagccgctgcgaccgttcaactgttccaggaagagcacaggaaggcagaagaattgctggcagctgcggcacaacgtcatcaacagttgcagcagaaatgtcagcagcagcagcaaaagcggcagcgcctcaaggaagagctggagaagcatgggatgcaggtgcctgcacaggcccagtctactcaggaggaagaagcaggccctggagatgtggccccacgcccaggccgtccagttacatggtggtcatag

SEQ ID NO: 243035 - DNA, 849 bp, synthetic construct
  misc_feature 1..849: note = Description of Artificial Sequence: Synthetic coding sequence
  source 1..849: mol_type = other DNA
atggaaatggtgcagaagttgcagaaggtgggttctcttgaacccagagttgaggtcctgatcaacaggataaatgaggtgcagcaggctaagaaaaaagctaacaaagatcttggtgaagccagaactatctgtgaagccctccaaaaagagctggatagtctccatggagaaaaagtccacctgaaggagatcctgagcaagaagcaagagacactgcggatattgagattgcactgccaggaaaaggaatccgaggctcatcgcaagcacactatgctgcaggaatgcaaagagcgcattagcgcattgaacttgcagatcgaggaagagaagaacaagcagcggcagctgcgattggccttcgaggaacagcttgaggacctgatgggacagcacaaagacctatgggacttccacatgcctgagcggcttgccaaggagatttgcgccctggactcgtcgaaggaacagcttctcaaagaggaaaaattagtgaaagctacactggaagatgtgaagcatcaactatgctctctgtgtggcgcagaaggcccaagcaccctggacgaaggactcttcctccggtcgcaggaggcagccgcaaccgtgcaactgtttcaggaggagcaccgcaaggccgaggaactgctggccgcagcagctcaaaggcaccagcagctgcagcagaagtgtcagcaacagcaacaaaagagacaacgcctgaaagaggagctcgagaagcacggcatgcaggtgccggctcaggcccagtcaacacaggaagaggaagctggaccaggcgacgtagctcctcggcctgggcgaccagtgacatggtggtcatag

SEQ ID NO: 243036 - DNA, 657 bp, synthetic construct
  misc_feature 1..657: note = Description of Artificial Sequence: Synthetic coding sequence
  source 1..657: mol_type = other DNA
atggagcggcagggtgtcgacgtgccacacgtaaaatgtaaggatcaggagccccagccactcggggagtcaaaggagcaccctcggtgggaggaaaattgtgaggaggaagcgggtggagggcctgcttccgcgagctgccagctgaccgttttggaagggaagtcaggcttgtattttagttctttggatagttcgatcgacatattgcagaaaagagcgcaggagcttatagagaacattaataagtctaggcagaaggatcacgctctgatgaccaactttcgaaactccctcaagactaaggtgagcgatctgacggagaaattagaggaaagaatataccagatctataatgatcacaataagatcatccaggagaagctccaggagtttactcaaaagatggccaaaatctctcaccttgagacagagctgaagcaggtgtgccactctgtcgagaccgtgtacaaggatctgtgtctgcagcccgagcagtccctccgcctgcgatgggggccagaccactcccggggaaaaagccctcctcgtccaggaaactcccagcccccagatgtattcgtctcctcggtcgccgagactacaagccaggccaccgccagcgaagtccaaactaaccgcgacggggagtgctag

SEQ ID NO: 243037 - DNA, 2931 bp, synthetic construct
  misc_feature 1..2931: note = Description of Artificial Sequence: Synthetic coding sequence
  source 1..2931: mol_type = other DNA
atggaaaagcaaaaacctttcgccctttttgtaccaccgaggtcaagttctagccaggtgtcagcagtgaaacctcagactctcggaggcgattctaccttcttcaagagttttaacaagtgtactgaggacgattttgagttcccatttgcgaagacaaatctctccaagaatggggaaaacatcgactccgaccccgctcttcagaaggtgaatttcttaccagtgctggagcaggtcggaaattccgactgccactaccaggaaggactgaaagatagtgacctcgaaaactccgaaggattatcccgcgtgtacagcaaattgtacaaggaagctgagaaaatcaagaagtggaaggtgtcgacagaggccgaattaagacagaaagagagtaagctgcaggaaaatcgaaagattattgaggctcagagaaaagctatccaggaattgcagttcgggaatgaaaaagtttctctcaaacttgaagagggcattcaggagaacaaagatctaattaaggagaacaatgcaactcgccacctgtgtaacctgttgaaggagacgtgcgcccgtagtgcggagaaaaccaaaaaatatgagtatgaaagggaagagacccgccaggtttatatggaccttaataataatattgagaaaatgattacagctttcgaagagctaagagttcaggccgagaattccagacttgagatgcactttaagttaaaggaagactacgagaagatccagcatttggaacaagagtacaagaaagagatcaacgacaaagagaaacaggtgtctcttctcctgatccaaattacagaaaaagagaacaagatgaaggacctaacgtttcttctagaggagtcacgagacaaggtaaaccagcttgaagaaaagactaaactgcagagtgaaaacttgaaacagtcaattgagaagcagcaccatcttactaaagagttggaggacatcaaagtctccctgcagcgctctgtgagtactcagaaagcactcgaggaggatttgcagatagctacgaaaactatttgccagttgaccgaggagaaggagacacagatggaggaatccaataaggctcgcgctgcccattcctttgtggttactgagttcgagaccactgtctgcagcctggaagagctgctgcgcactgaacagcagcgcctcgaaaaaaacgaagatcagctcaaaatcctcactatggaactgcagaaaaaatcgtccgaactcgaagagatgactaagcttacaaacaataaggaggtcgaactagaggaacttaaaaaggtgctcggagagaaagaaacactgctatacgagaacaagcagttcgagaagatcgcggaagaacttaaaggaactgaacaggagctgatcggtctattgcaggccagagagaaggaagttcacgatctcgaaatacagctgactgcaattaccacgagcgagcaatactattccaaagaggtgaaagatctgaaaactgagctggaaaatgagaagctgaaaaacaccgaacttacgtcgcactgcaacaaacttagcctggagaacaaagaattaacacaggagacctccgatatgactctcgaactcaagaaccagcaggaggacatcaacaataacaaaaaacaagaagagagaatgcttaaacaaatcgagaacctgcaggagaccgaaactcagctacggaatgagctggagtacgttagagaagaactgaagcagaagcgggatgaggttaagtgtaaactggacaaatccgaggagaattgcaataacttacgtaagcaggtagagaataagaataagtacatagaggagcttcaacaggaaaacaaggcccttaaaaaaaagggaaccgcagagagtaagcagctaaatgtatacgaaatcaaagtcaacaagcttgagctggagctggagagcgccaaacagaagttcggggaaatcacagatacctatcagaaggaaattgaggacaagaaaattagtgaggagaacttgctggaagaagtggagaaagcaaaagtcatcgccgatgaagcggtcaaactccagaaagagattgataagagatgccagcacaagatcgccgaaatggtggcactgatggaaaagcataaacatcaatatgataaaatcatcgaagaacgagacagcgaactgggcctgtacaagagcaaagaacaggaacagtcatcactgagggccagccttgagatagaactgagcaaccttaaggcggaactcctctccgtgaagaaacagttagaaatcgaacgagaggaaaaagaaaagctgaagagagaggcaaaggaaaataccgcgacgctaaaagagaaaaaagacaagaagacacagacatttctactggaaacccccgagatttattggaaactggattcaaaggcagttccatctcaaactgtcagcagaaattttaccagtgtcgaccacgggataagtaaggataaacgggattatttgtggaccagcgccaaaaatacactctcaacaccgctgcctaaggcctatacagtcaaaaccccaacaaaacctaagctgcagcaaagagagaatctcaacatccctatagaagaaagtaagaagaagcggaaaatggctttcgaattcgacattaattctgattcttccgaaacaaccgatcttctgagcatggtctccgaagaggagaccttaaaaaccctgtaccgcaacaacaatccccctgcatctcacctgtgcgtgaagaccccgaaaaaagccccatctagcctcactactcctggctccaccctgaaatttggggctataaggaaaatgcgcgaagatagatgggccgtcatcgcgaaaatggacaggaagaagaagttgaaggaggcggagaaactgttcgtctag

SEQ ID NO: 243038 - DNA, 2931 bp, synthetic construct
  misc_feature 1..2931: note = Description of Artificial Sequence: Synthetic coding sequence
  source 1..2931: mol_type = other DNA
atggaaaagcagaaaccattcgccctgtttgtgccacctagatcgagctcatcccaagtcagcgctgtcaagccccagacccttggcggtgacagtaccttttttaagtcttttaacaagtgcacagaggacgatttcgagtttccatttgcaaaaactaacctttctaaaaatggcgagaacattgattcagatcctgctctgcagaaagtaaacttccttccggtgctggaacaggtggggaacagcgattgtcactatcaggagggcctgaaagatagtgatctggaaaacagtgagggcctttctagagtgtactccaaactgtataaggaggccgagaagattaaaaaatggaaggtctccacagaggccgagctgcgacagaaggagtccaagctccaggagaaccggaagattattgaagctcaacgaaaggccatccaagaacttcagttcggcaacgagaaggtatcactcaagctggaagaggggatccaggaaaacaaggacctgatcaaggagaacaatgcaactaggcatttgtgtaatctgctgaaggaaacttgtgcccgtagcgccgagaaaactaagaaatacgagtacgagagagaggaaaccagacaggtttatatggacctgaacaacaacatcgagaagatgattaccgcctttgaggagctacgggtacaggcggagaatagcaggctcgagatgcacttcaaactgaaagaggactacgagaaaattcagcatctcgagcaggagtataaaaaagaaatcaacgacaaggaaaagcaggtgtcactcctcctcattcaaattactgagaaggagaacaagatgaaggatcttacatttctcctcgaagagtcaagggataaggtgaaccagctcgaagagaagaccaaactgcagtctgaaaatctgaagcaatctatcgaaaaacagcaccacctgaccaaggagctggaggatatcaaggttagcctccagcgatcggtgagtacccaaaaagcactggaggaggatctgcagatcgccaccaagactatatgtcagcttactgaagagaaggagactcaaatggaggaatccaacaaggccagagcggcacatagtttcgttgtgactgagtttgagactactgtgtgtagtctggaagagctgctgagaaccgagcaacagcgcctggaaaagaacgaggatcagctgaagatactgactatggagttgcagaagaagtctagcgagctggaggagatgacaaagctgacgaataataaggaggttgagttagaagaactgaagaaagttctaggagagaaggaaaccctgctgtacgaaaataaacaattcgaaaaaatcgcggaagaactaaagggaacagaacaggaactgatcggactgctgcaggcccgtgaaaaagaggtgcacgacctggagattcaactcactgccattacgacaagcgagcaatattactccaaagaagtgaaagatttgaagactgagctggaaaatgagaagctgaaaaacaccgaactaacttcgcactgcaacaaactctccctcgaaaataaagaactgacccaggagacaagtgatatgaccctagaactgaaaaatcaacaggaagacattaataataacaaaaagcaggaggagcgcatgcttaagcagatcgaaaacctgcaggaaaccgagactcagctgcgcaacgagctggagtatgtcagagaggagttgaaacagaagcgcgatgaggtcaagtgtaaactggataaaagcgaagagaattgtaataatctgcgtaagcaggtggaaaataaaaacaagtacatagaagagctccaacaagagaataaggctctcaagaagaaaggcactgccgagtcaaagcagctcaatgtttacgaaatcaaggttaataaattggaactggaactggaatctgctaaacagaagttcggcgagattacagacacctaccagaaagagatcgaggacaaaaagatttccgaagaaaacctacttgaagaagtcgaaaaagcaaaggtgatcgctgacgaggccgtaaaacttcagaaagagatcgataagcgatgccagcacaagatcgccgagatggtcgcattgatggagaagcacaaacaccagtacgacaaaattattgaagagcgcgattcagagttgggtctctacaagtctaaggagcaggaacaatcttccctgcgcgcatcccttgagatcgagttatctaacctgaaggctgagttactttccgtgaagaagcagctcgaaatcgaaagggaagagaaggaaaagctgaaaagagaagcaaaggaaaatacagctaccctcaaggagaagaaagataaaaagacccagacttttctgctcgagactcctgagatttactggaagctggatagcaaagcggtgccatcccagaccgtcagtagaaactttacttctgtcgatcatgggatttcgaaagataaacgcgattacctctggacaagcgccaagaacacgttgagtaccccgctgccgaaagcatacactgtgaaaactcccactaagcccaaacttcaacaacgggagaacttgaacattccgatcgaggagagtaaaaagaaaagaaaaatggcattcgagtttgacattaacagcgatagcagcgaaaccaccgacttactatccatggtgtcagaggaggagaccctaaagacactgtaccgcaacaataaccccccagcgtcccacctgtgtgtaaagacccccaagaaggccccttcttctttaacgacccccggatctacgctaaaatttggggctattcggaaaatgagagaggaccggtgggccgttattgctaagatggatcggaaaaaaaagctcaaggaggcagagaaacttttcgtttag

SEQ ID NO: 243039 - DNA, 2379 bp, synthetic construct
  misc_feature 1..2379: note = Description of Artificial Sequence: Synthetic coding sequence
  source 1..2379: mol_type = other DNA
atggagaagcagaagccattcgctctctttgtgccgcctagatccagctcaagtcaggtcagtgctgtgaaacctcaaaccctcggtggcgatagcactttcttcaaatcctttaataagtgcactgaggacgattttgaattcccctttgctaagacaaatctcagcaagaacggcgagaatatcgactccgatccggctctgcagaaggtgaattttttaccggtgctcgaacaggtaggcaatagcgactgccactaccaggaaggactcaaggattccgatctggagaactccgagggcttgtctcgagtctacagcaaactgtacaaagaggcagaaaagataaaaaaatggaaggtgtcaaccgaagctgaattgcgacagaaagagagtaagttgcaagagaataggaaaatcatcgaggcacagcggaaagcaattcaagagctacaatttggtaacgaaaaggtgagtttaaaactcgaggaaggtatccaggagaataaagatttaattaaggaaaataacgccacaagacatctgtgcaatctacttaaggagacatgcgctaggtcagctgaaaagacgaaaaaatacgaatatgagagagaagagactagacaggtttacatggacctgaataacaatatcgagaagatgatcaccgccttcgaagaactgcgagtccaggctgagaattctcgactggagatgcatttcaaattgaaggaggattatgagaagatccagcacctcgaacaggagtacaagaaagaaataaacgataaagagaagcaggtgagcctcctgctcatccaaattaccgagaaggagaacaaaatgaaagatttgactttcctgctggaagagagccgcgacaaggtcaatcaattggaggagaaaacaaagctacaatccgaaaatttaaagcagtctatcgaaaaacagcaccacctcactaaagaactggaggacattaaagtgagcctacagcgaagcgttagcactcagaaagcgctcgaggaagacttgcagatagccacaaagacaatttgccagcttaccgaggaaaaggagacacagatggaggagtccaataaagctcgagccgctcactccttcgtggtgaccgagttcgaaaccaccgtttgttccctggaggagcttctgcgcactgagcagcaaaggttagagaagaatgaggatcagctgaagattttaaccatggaactgcaaaaaaaatctagcgaactggaggaaatgactaaattaacaaacaataaagaagtggaactcgaggaactcaagaaagtccttggggagaaagaaactctcctttacgagaataaacaattcgagaagatcgccgaggaattgaagggcaccgagcaggagctgattggccttctgcaagccagagaaaaggaagtgcacgatctggagattcagctaacagctattactacatcagagcagtactacagcaaagaagtgaaggaccttaaaaccgagctggagaacgaaaaactaaagaataccgagctaacatcacattgtaacaagctttctctggagaacaaggagctcacccaggaaacgagtgacatgactctcgaactcaagaaccagcaggaagatattaacaataataaaaaacaagaggagagaatgttaaaacagattgagaacctccaggagaccgaaactcagctgaggaatgagcttgagtacgtgagagaggaattgaaacaaaagagggatgaggtgaagtgcaagctggacaagagtgaagagaattgcaataatctgcgtaagcaggtagaaaacaagaacaaatacatcgaagaactacagcaggagaataaagcactgaagaagaagggcaccgccgaatccaaacagctcaatgtgtacgaaattaaagtgaacaagctcgaactggagctggaaagcgccaagcaaaaattcggagagattactgacacataccagaaggaaattgaggacaagaagatttctgaggaaaacctgctggaggaagtggagaaggccaaagtcatagccgacgaggcggtgaagcttcagaaagagatcgacaaacggtgccagcacaaaatcgcagagatggttgctctgatggagaaacacaaacaccagtatgataagatcattgaggaaagagactcagagttgggactgtataagtcaaaagagcaggaacagagctccctccgagcgtcccttgaaatagaactcagcaacttgaaggcagagctgctgagtgtgaaaaaacagctggaaatcgaaagagaggaaaaagaaaagctcaaaagggaggcaaaagaaaacacggcaacgctgaaagaaaaaaaatag

SEQ ID NO: 243040 - DNA, 2388 bp, synthetic construct
  misc_feature 1..2388: note = Description of Artificial Sequence: Synthetic coding sequence
  source 1..2388: mol_type = other DNA
atggaaaaacagaagcccttcgccctgttcgttccccctaggagttcttccagccaggtttccgccgtgaagcctcaaactctggggggagatagcacattcttcaaaagcttcaataaatgtactgaggatgacttcgagtttccattcgccaaaaccaatctgtccaagaatggagaaaatatcgatagtgaccctgcgctccagaaggtgaactttcttccagtgttagaacaagtcggaaactccgactgccattatcaggagggtctgaaggactctgacctggaaaattccgaaggactaagccgcgtatatagtaagttgtataaagaggccgagaagataaagaagtggaaagtttcgacagaagctgaactgaggcaaaaagagtcaaaactgcaggaaaaccgtaaaattatcgaggcccaaagaaaagccattcaagagctacaattcgggaatgaaaaggtttcactcaagctggaggaaggaattcaggagaacaaagatttgattaaagagaacaatgcaacaagacatctgtgcaacctgttgaaagagacttgcgctaggagcgccgagaagactaaaaaatacgagtatgaaagagaagagacgcgacaggtgtacatggatctgaataataacattgagaagatgattacagcttttgaagagctcagagtccaggctgagaattctagactcgaaatgcacttcaagcttaaggaagactacgagaaaattcagcatctggagcaggaatacaaaaaagagatcaacgataaagagaagcaggttagcttattgctgattcagatcactgaaaaggagaacaaaatgaaagacctcactttcctccttgaagaatcaagagacaaggtcaatcagttagaggaaaaaactaagttgcaatctgagaatctcaagcagtcaatcgagaagcagcaccatctgaccaaagaattggaggacatcaaagtgtccctgcagcggtcagtttctacccaaaaagcgctagaggaagatctacagatcgctactaagacaatttgccagttaaccgaagagaaagagacccagatggaggaaagtaataaagccagggccgctcatagttttgtggtgacggaatttgaaactaccgtgtgctcactggaggagctccttcggaccgagcagcagagacttgagaagaacgaagatcagcttaaaatactcaccatggagctacagaaaaagtcatctgagctagaggaaatgacaaagctgaccaataacaaggaagtggaactggaggaactgaaaaaagtgttgggagagaaggaaacactgctttacgagaataagcaattcgaaaaaatcgccgaggagctaaagggtacagagcaggaactgattggactcttacaagcacgggaaaaagaggtgcacgatctggagatccagctcaccgcgatcacgacttctgagcagtattatagtaaggaggtcaaagacctcaaaaccgagctggaaaacgaaaagttaaagaacactgaacttaccagccactgtaacaagctgagcttagaaaacaaagagttgacacaggaaacaagcgacatgactttagaactgaagaatcagcaggaggacatcaacaataataagaaacaagaggagagaatgttgaaacagatcgaaaacttgcaagagaccgaaacacagctcaggaacgagcttgaatacgtacgggaagaactaaaacagaagagggatgaggttaaatgcaagctcgacaaaagcgaggagaattgtaacaacctgcggaagcaggtcgaaaataagaacaagtatatcgaggagctgcagcaagagaataaagcacttaagaagaaaggcacagctgagagcaaacaactaaatgtgtatgagattaaagtcaataaactggagctggagctggagtctgccaaacagaagttcggagagattacggacacttatcagaaggaaatcgaagataagaagatcagcgaagaaaacttgcttgaagaagtggaaaaagccaaggtaatcgcagatgaagccgtcaagctgcagaaggagatcgacaagcggtgccagcacaagatcgcagagatggtggcactgatggagaagcacaaacatcagtacgacaagattattgaagagagagattccgagttaggtctctacaagagtaaagaacaggagcagtctagtctgcgtgcaagccttgaaattgagttgagtaatctgaaggccgaactgctgtctgtcaagaagcagctggagatagaacgagaagagaaggagaagctgaaacgggaggccaaagaaaacactgctacactgaaggaaaagaaagataagaaatag

SEQ ID NO: 243041 - DNA, 4593 bp, synthetic construct
  misc_feature 1..4593: note = Description of Artificial Sequence: Synthetic coding sequence
  source 1..4593: mol_type = other DNA
atgccgatccggccagatcttcagcaattggaaaagtgcatcgatgacgctttgcgtaaaaacgactttaaaccactaaaaacattattacagattgacatatgtgaagatgtgaagattaaatgctccaaacagttctttcacaaggtggataatcttatatgtcgggagctaaacaaggaagatattcataacgtctccgcgatcctggtaagtgtcgggcgatgcgggaagaatatctccgtccttgggcaggctgggctgctaacgatgattaagcagggactcatccagaagatggtggcttggttcgagaagagtaaggacattattcaaagccaaggtaattctaaggatgaggctgtgttgaatatgatagaggatctggtggatctactattagttatccatgatgtttctgatgaaggaaaaaagcaagtggttgaaagctttgtgccaaggatatgttctctggtgatcgattcccgcgtgaacatttgtatccagcaagagatcattaagaagatgaacgcaatgctggataagatgcctcaggacgcaaggaaaatactgagtaatcaagagatgttgatcctgatgtcctcgatgggtgagaggatcctcgacgctggcgactacgacctgcaagtcggtatcgttgaggccctgtgccggatgacaacagaaaaacaaaggcaggagctggcacaccaatggtttagcatggatttcatagctaaggctttcaagcggataaaagatagtgaattcgaaaccgactgtagaatattcctgaacttagtcaacggcatgttaggtgacaagagacgggtgtttaccttcccctgcctgagtgcgtttttggataagtacgagctgcagatcccgagtgacgaaaagctcgaggagttttggattgacttcaacctgggttctcagactctttcattttatatcgctggcgacaatgatgatcatcagtgggaggctgttaccgtgcctgaagaaaaagtgcagatatatagcatagaggtccgtgagtcgaaaaagttgctgactatcattctcaaaaatacagttaagatttccaaacgggaagggaaggagttactactatacttcgatgccagcttggaaattacgaatgtgacccagaagatcttcggcgcaaccaagcatcgagagtcaattaggaaacagggcatttcagtggcaaagacttccttgcacattctgtttgacgcctctggttcccagattttagttcccgaatctcagatatcacccgtgggggaggaacttgtaagcttgaaagagaaaagcaaaagccctaaggaatttgcaaagccatctaagtatattaaaaatagcgataaaggaaatcgcaacaattcccagttggaaaaaacaacaccctcaaagcggaaaatgagtgaagctagcatgatcgtgagcggcgctgaccgttacactatgcgttcaccagtgctctttagcaatacatctattcctccccgaaggagacgaataaaaccccctctgcagatgacatcaagcgccgaaaagccttccgtgtctcagacaagcgaaaatcgcgtggacaacgcggcttcgctgaaaagcaggtctagcgagggacggcaccgacgggacaacattgataaacatatcaagaccgcaaaatgcgtggaaaacacagagaataagaacgtcgaatttccaaatcaaaatttcagcgagctgcaagatgttatccctgactcccaagccgctgagaaacgggatcacactattctgcctggtgtgctggataacatttgcggaaataagatccacagcaaatgggcgtgttggacgcctgtaacgaatatagagctgtgtaacaaccagcgcgctagcacaagctcaggtgatactctaaatcaggacatcgttattaataagaagctgacaaaacagaagtcgtcttcctctatcagcgatcataattccgagggaacagggaaagtcaaatataaaaaggaacagacggaccatatcaagattgacaaggcggaagttgaggtctgtaagaagcacaatcagcagcagaaccaccctaagtactccggacagaagaacactgagaacgccaagcagtccgactggcctgttgaaagcgagaccacgttcaagtccgtactgttgaataagactatcgaggagtctctgatataccgcaagaagtatatactgagcaaagacgtgaacactgctacttgtgacaaaaatccctctgcaagcaagaacgtccaatcccataggaaagccgagaaagaattgacatcagagctgaacagctgggacagcaagcagaagaagatgcgagagaaatccaaaggcaaggaattcacaaatgtggccgagtcactgatctcacaaatcaacaaacggtacaaaactaaagacgacataaagagcacacgcaagctgaaggaatctctcataaattcaggttttagtaataaacccgtggtgcagctctccaaggagaaggttcagaagaagtcctaccggaagctgaaaacgacattcgtgaacgtcaccagtgaatgtcctgtgaacgacgtgtataactttaacctgaacggagccgacgatcccatcatcaaacttggaatccaagaattccaagcgacagctaaagaagcttgcgccgacaggagcatccgattggtcggcccacggaatcacgacgagctgaagagctcagtgaagactaaggataagaaaataattacaaaccatcagaagaaaaatctcttcagcgatacagaaaccgagtatcgatgtgacgattcaaagaccgacatttcctggctgagagaaccgaaaagcaagccccagttgattgactattctcgtaataagaatgttaaaaaccataagagcggcaagagccgatcttccttagaaaaagggcagcctagctccaagatgactccctcaaagaacatcaccaagaagatggacaagaccattcccgaaggtaggatcagactccccaggaaagccacaaaaacgaagaaaaactataaagacctctctaacagcgagagtgagtgtgagcaagaattcagccatagctttaaggaaaacatcccagtaaaggaagagaatattcactcgcgcatgaagaccgtgaaattgcccaagaaacagcagaaggtcttttgtgcggagacagagaaggaactttccaagcagtggaagaacagtagcctcttaaaagatgcgattagagacaattgccttgatctgtccccacgctctttgtccggatcaccatcctctatcgaggtaaccagatgtatcgaaaaaattacagagaaggatttcacacaagactacgattgtatcactaagtcaatatccccttatcccaaaactagtagcctggagagtttgaattccaatagcggagtcggaggaactattaaatcaccgaaaaataatgaaaagaactttctctgtgccagcgaatcatgcagtcctatccctagacctctgtttctccccagacatacacccaccaagtctaacacgattgttaacagaaaaaaaatatccagcctggtgctgacccaggagacacagaactccaacagctattccgacgtatccagctatagctcagaggagcgatttatggagatagagtccccacacattaatgaaaattacatccagagtaaaagggaggagtcccatctagcctcatcgttgtcaaagtccagcgagggccgtgagaaaacttggtttgatatgccgtgcgatgcaacgcatgtctccggcccaacgcagcaccttagccgaaaacgaatctatattgaggacaatttgtcaaattcaaacgaagtcgaaatggaagaaaaaggagagcggcgtgcaaatctgcttccaaaaaagttgtgcaagatcgaagacgccgatcatcacattcataagatgagcgagtcagtatcttccttaagcaccaatgacttctctataccttgggagacgtggcagaatgagtttgccggaatcgaaatgacatacgagacctacgagcgcctgaattcagagttcaagcgcaggaataacataaggcacaagatgctgtcttatttcacaacccagtcttggaaaaccgctcaacagcatttacggacaatgaaccaccagtcccaggacagccgaattaaaaagttggataagttccagttcattatcatcgaagaattggaaaatttcgagaaagattcgcagtccttaaaggacctggaaaaggagtttgtggatttctgggagaagattttccagaagtttagcgcttaccagaaatcggagcagcagagacttcacctcctgaagacgagtctggccaagtctgtgttctgcaacacagactctgaagagacagtcttcaccagtgagatgtgtctcatgaaagaggacatgaaagtgctgcaggaccgcctcctgaaagatatgcttgaggaggaattattgaacgtcagacgcgaacttatgtctgtatttatgagccacgagcgcaatgctaacgtgtag

SEQ ID NO: 243042 - DNA, 4593 bp, synthetic construct
  misc_feature 1..4593: note = Description of Artificial Sequence: Synthetic coding sequence
  source 1..4593: mol_type = other DNA
atgcccattcgtcccgatctgcaacagttggagaagtgcatcgacgacgcattgcggaagaacgattttaaacctctgaaaacccttctgcagatcgacatttgcgaggatgtgaaaatcaagtgttctaaacagtttttccataaggtggataaccttatatgcagggaattgaacaaggaagacattcacaatgtctcagccatcctcgtaagtgtcgggagatgtgggaagaatatatctgtgctgggacaggcaggcctgctcactatgataaagcagggtctgatccagaaaatggttgcctggttcgagaaatcgaaggacattatccagtcccaagggaactcaaaggacgaagccgttctcaatatgattgaggatctcgtcgatcttcttctggtgattcacgacgtctctgatgaggggaaaaaacaagtggttgagagctttgtgccacggatttgttccctagtgattgattctcgagtcaacatatgcatccagcaggaaataatcaaaaagatgaacgcaatgctagacaagatgcctcaggatgccaggaaaatattgagcaaccaggaaatgcttatcctgatgtcctctatgggagagcggatcctggacgcaggcgactacgacctccaagttggaattgtggaggcgctgtgccgtatgacgacagagaagcagaggcaagaactggcacaccaatggttcagtatggacttcatagctaaggccttcaagcgcattaaggactcagagtttgagacagactgtagaatctttctaaacttggtcaacggcatgctgggagacaaaaggagagtctttacatttccatgtctttctgctttcctggataagtacgagctgcaaattccaagtgacgagaagctggaggaattctggatcgattttaatctgggctctcagacgctttccttttacatagccggagataatgacgaccatcaatgggaggcagtcacagtgcccgaagaaaaagtgcagatatatagcatcgaagttcgggaatcgaagaaacttcttacaattattctgaagaacaccgtgaaaatctccaagagggagggaaaggagcttctcctgtattttgacgcatcactggagatcactaacgtcacccagaaaatttttggggcaactaagcacagagagagcattcggaagcagggcatcagcgttgccaaaacgtccctgcacatcctcttcgacgcttccggttctcaaatccttgtgccggaatcacaaatttctccagtgggagaggagctggtgagcctgaaagagaagtccaaatcgcctaaggaatttgccaagcctagcaagtacatcaagaattccgacaaaggtaatagaaacaacagccagttggagaagacaacaccgtctaaaaggaagatgagtgaggcatccatgattgtctctggagcagaccgctacaccatgagatccccagtgttgtttagcaacacgtctatacccccacggaggagaagaattaaacccccactacagatgaccagtagcgccgaaaagcccagcgttagtcaaaccagcgagaaccgcgttgacaacgcagcttccttgaagtccaggagcagcgagggacggcaccgccgagacaatattgataagcacatcaagacagctaagtgtgtggaaaacactgagaataaaaatgtggagtttccaaaccagaactttagtgagcttcaggacgtcatccccgactcccaagccgctgagaagagagaccacactatcctgcccggtgtgttagacaacatttgcggaaataagatacattccaagtgggcctgttggaccccggtcacaaatattgagctgtgcaataatcagcgggcatcaaccagtagcggcgataccttgaatcaggatatagttattaataaaaaactgacaaagcagaagtccagctcaagtatctctgaccataacagcgagggaacaggcaaagttaagtacaagaaggaacagactgaccatatcaagattgacaaagcagaagtggaagtgtgcaagaagcacaatcagcagcaaaatcatcctaagtatagtggtcaaaaaaatacagagaatgcaaagcaatccgactggccagtggaatcggagacgacattcaaatctgtgctcctgaacaaaacaatcgaagagagtctcatctataggaaaaaatacatcctgagcaaggatgtgaacacggcaacttgtgataagaatccctcagcaagcaagaacgtgcaatcccaccgtaaggccgagaaggaattgacgtctgagcttaatagttgggatagtaagcagaagaagatgcgcgagaaaagcaagggaaaggagtttaccaatgtggccgagtcgctgatcagccagatcaataagaggtataagactaaggatgacatcaagtccacccggaaattaaaagaatcgctgattaatagcggcttttctaacaagcctgtggtccagttatctaaggagaaggtgcagaagaagtcttatcgcaaactcaagactacattcgtcaatgttacctccgagtgccccgtgaacgatgtttataactttaacttgaatggcgctgacgatcctattattaagctgggaattcaggaatttcaggctactgcgaaagaagcttgtgccgataggtctataagactggttgggccacgaaatcacgatgaactcaaatcatcagtcaaaactaaggacaagaagatcattacaaatcaccagaagaaaaacctgttctccgatactgaaactgaatataggtgtgacgacagtaagaccgacatctcctggctccgcgaaccaaaaagcaagcctcagctgattgactattcccggaataaaaatgtgaaaaatcataaaagcggcaagtccaggtcctccctggagaagggccagccaagctccaagatgactccctccaagaacataacgaagaagatggataaaactatcccggaaggcagaattcgtctccccagaaaggccaccaagaccaaaaagaactacaaggacctcagcaatagtgagtccgagtgcgagcaagaattttcacactcctttaaggaaaacatccccgttaaggaagaaaacattcattcccggatgaagacagttaagctccctaagaaacagcaaaaagtgttctgtgctgagactgagaaagagctgtctaaacaatggaaaaactctagtcttctcaaagacgcaattcgcgacaattgcttagatttaagccccaggagcttgagtggttcaccctcatctatcgaagtcactagatgtattgaaaagatcacagagaaggacttcactcaagactacgattgtattactaagagtatttcgccctaccctaagactagttcactggaatccctgaactcgaattccggcgtcggagggaccataaaatcgcccaagaataacgagaagaacttcctgtgtgcatcagaatcctgctcacctatcccgaggccactgttcctcccgagacatacccctacaaagagcaataccattgtcaacagaaagaagattagcagcttggttctgactcaggagacccagaacagcaacagctattcagatgtctcctcctattcttctgaggaacgcttcatggagatagaatcaccccacataaatgaaaactacattcagtctaagagggaagagagtcacttggcatcgagccttagcaagtcttccgaggggagggagaaaacatggttcgacatgccctgtgatgcaactcacgtgtcaggcccaacgcagcatctatcaagaaagagaatttatatcgaggataatctgtctaacagtaacgaagtagagatggaagaaaaaggagaaaggcgagctaacttactacctaagaaactgtgcaaaatcgaagacgcggaccaccacatccataaaatgtcagagtcagtgtctagtttatcaacaaatgacttcagtattccatgggaaacgtggcagaacgagttcgccggtatcgaaatgacgtacgagacttacgagcggctgaatagcgagttcaagagaagaaacaacattcgtcacaaaatgctcagttacttcacgacccagtcttggaagactgcccagcagcacctccgcacaatgaatcatcagtctcaggacagtcgcatcaaaaagctggacaaatttcagttcataatcatcgaagagctggagaatttcgaaaaggattcccagagtttaaaagacctggagaaggaattcgtggatttctgggagaagatctttcagaagttctctgcctaccaaaaaagcgagcagcaacggcttcatctgttgaagacatccctcgccaagtccgtcttctgcaatacggatagcgaggagactgtgtttacttctgaaatgtgcctgatgaaggaggatatgaaggtccttcaggataggctactgaaggacatgcttgaggaagaacttctgaatgtgaggcgcgagttaatgagcgtgttcatgagtcatgaaagaaacgcaaatgtgtag

SEQ ID NO: 243043 - DNA, 3072 bp, synthetic construct
  misc_feature 1..3072: note = Description of Artificial Sequence: Synthetic coding sequence
  source 1..3072: mol_type = other DNA
atgccgatccggcctgatctacagcagttggaaaagtgtatagacgatgctctcaggaagaatgattttaagccccttaagacactgctccagatcgacatctgcgaggacgtcaagatcaagtgctctaagcagttctttcacaaagtggataacctaatttgccgcgaactcaacaaggaagacattcataatgtgtcggctatcctggtgtcagtggggcgatgcggaaaaaatatatcagtactcggccaggctggactgctgaccatgattaagcagggtctcatccaaaagatggttgcctggttcgaaaaatcaaaggacattattcagagccaagggaactcgaaggacgaagccgtactgaatatgattgaggaccttgtcgatttactgttggtgatccacgacgtaagcgatgagggcaagaagcaagtggtggagtcctttgtacccaggatttgcagcctcgtgattgacagtcgcgtcaatatctgcattcaacaggagataattaagaaaatgaatgccatgctggacaaaatgcctcaggatgccagaaaaatccttagcaatcaagaaatgctaatcttaatgagctctatgggcgagcggatcctcgacgccggagactacgacctacaagtggggatcgtagaagcattgtgtcgaatgacaaccgaaaaacagcgccaagaactggcccatcagtggttttccatggacttcatagcaaaagccttcaagagaatcaaggattccgagttcgagaccgactgtcgcatctttctgaatttggtgaacggaatgctcggagataaacgcagagtcttcacattcccgtgtctgtccgccttcttagacaaatatgaacttcagatcccctctgatgaaaaactggaggagttctggatcgacttcaacctcggctcacaaacgctgagcttctatattgctggcgacaacgacgaccatcagtgggaggctgtcaccgtccccgaggagaaagtccagatatattccatcgaagtgcgcgagtcaaaaaagctactgactattattctgaaaaacacagtgaagatcagtaaacgtgaagggaaggaactactgctgtattttgatgcctccttggaaattacaaacgtcacacagaaaatcttcggagccacgaagcaccgtgaaagcattaggaagcagggcatctcagtggcgaagacatctttgcatattttgttcgacgccagcgggtcacaaatcttggtgcccgaatctcagataagccctgtcggcgaagaacttgtgagcctgaaggaaaaatctaaaagcccgaaagagttcgctaaaccctccaagtacatcaagaactctgacaagggcaaccggaataactctcagctggagaagaccaccccctctaaacgcaaaatgtctgaagccagtatgatcgtctccggggcagatcgatatactatgcgatcgcccgttttgtttagtaacactagcatcccacctaggagacggcgaattaaacccccactgcagatgaccagttctgccgaaaaaccctccgtgagtcaaacctccgaaaatagagttgacaatgctgccagcttgaaaagtcggtctagcgaaggtaggcacaggcgcgacaacattgataagcacatcaaaacagccaagtgtgtagaaaataccgagaataaaaacgttgagtttccaaatcagaatttcagtgagttacaagatgtcatacccgactcacaggctgccgagaaaagggatcataccatccttcccggtgtgttggacaacatctgtgggaataagatacactcaaagtgggcttgctggacgcccgtcacgaacatcgaactgtgtaacaaccagcgggcaagtacaagcagcggggacacacttaatcaggacatcgtcatcaacaaaaagcttacgaaacagaagtctagtagcagtattagcgatcacaactctgaaggcacaggaaaggtgaagtataaaaaggagcagactgaccacatcaagattgataaggcagaggttgaagtctgtaaaaagcataatcaacagcagaaccaccctaagtacagcggacagaagaatacagagaacgccaagcagagcgactggcccgtggagtcagaaaccactttcaaaagtgtgctcctgaataagacaatcgaagagtctctcatctacagaaaaaagtacatactgagtaaggatgtgaatactgcaacatgtgataaaaatccaagcgcctccaaaaatgttcaatcgcaccggaaagccgaaaaggaattgacaagcgagctcaacagctgggatagtaaacagaaaaagatgcgagagaaaagcaaggggaaagagttcacaaacgtagctgagtcactgatatcccagataaacaagcggtataagactaaggacgatattaaatcgaccagaaagttgaaggagagcttgattaactcgggattctctaataaacctgtcgtgcagctgtcgaaagaaaaagtccagaagaagagttatagaaagcttaagaccacattcgttaacgtaacatccgaatgccctgttaacgatgtttataattttaacctgaatggcgctgatgatccgataataaagctgggtatccaggaattccaagcaacagccaaggaggcttgcgcagaccgcagcatacgtctggttgggcctcgcaaccatgacgagctgaagagcagcgtgaagaccaaggataagaagattatcaccaatcaccaaaagaagaacttgttttctgatactgaaacagagtacaggtgcgacgactcaaagacggacataagttggcttagggagcctaagtctaagccgcaattaatcgattattccagaaataagaatgtcaagaatcacaagagcggaaagtcgcggagctcactcgaaaagggacagcctagttccaagatgacaccgagcaagaacatcacaaaaaagatggacaagactatccccgagggacgcatcaggctgcctcgcaaggcgacgaagaccaaaaaatag

SEQ ID NO: 243044 - DNA, 711 bp, synthetic construct
  misc_feature 1..711: note = Description of Artificial Sequence: Synthetic coding sequence
  source 1..711: mol_type = other DNA
atggtgtcctccggcaagaagtacagccggaaaagtggcaagccttctgtggaagatcaatttactcgcgcatacgacttcgagactgaggacaagaaggacctgtccggaagcgaggaggacgtgatcgagggcaagacagcagtgatagagaagcgccgtaaaaaaagaagctccgctggcgtcgtcgaggacatgggaggtgaagttcaaaacatgttggagggggtcggggtcgacattaacaaggccctgctggcaaaacgcaagcgactcgagatgtatacgaaggcctctctgaagacttctaatcagaagattgagcacgtgtggaagacccagcaggatcaacgccaaaagctgaaccaagagtattctcagcagtttctgacgttatttcaacagtgggaccttgacatgcaaaaagccgaggaacaggaggagaaaattctgaacatgtttagacaacagcagaagattctgcagcagagtaggatagtgcaatctcaacgacttaagactatcaagcagctttacgaacagtttatcaaatccatggaagaactggaaaaaaatcacgataacctgctgaccggtgcccaaaatgagttcaaaaaagaaatggcaatgctgcagaagaagatcatgatggaaacccagcagcaggaaatcgcctctgtgcggaagtccctccagagcatgctgttttag

SEQ ID NO: 243045 - DNA, 711 bp, synthetic construct
  misc_feature 1..711: note = Description of Artificial Sequence: Synthetic coding sequence
  source 1..711: mol_type = other DNA
atggtgagctctggcaagaaatattcgcggaagagcggcaagcccagcgtggaagaccagttcaccagggcctatgatttcgaaaccgaagataaaaaagacctgtcaggtagcgaagaggacgttatagaaggaaaaactgcagttattgagaagaggcgaaaaaagcgatcctctgccggagtggtggaggacatgggtggggaggtacagaatatgctggaaggggtcggcgtcgatataaacaaagccctactggctaagagaaagcggctggaaatgtacactaaagcctctttaaaaacgagtaaccagaaaatcgaacatgtctggaaaactcaacaagatcagcgacagaagttaaaccaagaatattcccagcagttccttacgctgttccaacagtgggatctcgacatgcaaaaagctgaagaacaagaagaaaagatccttaatatgtttcgccaacagcagaagatcctgcaacaaagtagaattgtccagagccaacggttaaagacaattaagcagttatatgagcagttcatcaagtctatggaggagctcgagaagaaccatgataacttgctgacaggggcacagaacgagttcaaaaaagagatggctatgctgcagaagaagatcatgatggaaacccagcaacaggagatcgcttcagtccgaaagagtctccagtcaatgctcttttag
